United States Patent Application Publication US 2007/0214517 A1 - sequence listing, part 3

SEQ ID NO: 3268 - DNA, 1719 bp, Zea mays subsp. mays
  misc_feature (1)..(1719): Ceres Seq. ID no. 12348980
  misc_feature: MA Experiment ID: 108522 Result: Down-regulated in Transcription
  misc_feature: MA Experiment 108522 PARAMETER Experiment Name: Zm_42deg_Heat_P Parameter: Age (day) Value: 8
  misc_feature: MA Experiment 108522 PARAMETER Experiment Name: Zm_42deg_Heat_P Parameter: Organism Value: Zea mays
  misc_feature: MA Experiment 108522 PARAMETER Experiment Name: Zm_42deg_Heat_P Parameter: Plant Line Value: 35A19
  misc_feature: MA Experiment 108522 PARAMETER Experiment Name: Zm_42deg_Heat_P Parameter: Temperature (deg C) Value: 42 vs. 22
  misc_feature: MA Experiment 108522 PARAMETER Experiment Name: Zm_42deg_Heat_P Parameter: Timepoint (hr) Value: 1
  misc_feature: MA Experiment 108522 PARAMETER Experiment Name: Zm_42deg_Heat_P Parameter: Tissue Value: Aerial
  misc_feature: MA Experiment ID: 108556 Result: Up-regulated in Transcription
  misc_feature: MA Experiment 108556 PARAMETER Experiment Name: Zm_Drought_P Parameter: Age (day) Value: 9
  misc_feature: MA Experiment 108556 PARAMETER Experiment Name: Zm_Drought_P Parameter: Organism Value: Zea mays
  misc_feature: MA Experiment 108556 PARAMETER Experiment Name: Zm_Drought_P Parameter: Plant Line Value: 35A19
  misc_feature: MA Experiment 108556 PARAMETER Experiment Name: Zm_Drought_P Parameter: Timepoint (hr) Value: 24
  misc_feature: MA Experiment 108556 PARAMETER Experiment Name: Zm_Drought_P Parameter: Tissue Value: Aerial
  misc_feature: MA Experiment 108556 PARAMETER Experiment Name: Zm_Drought_P Parameter: Treatment Value: Drought vs. No Drought
  misc_feature: MA Experiment ID: 20000108 Result: Down-regulated in Transcription
  misc_feature: MA Experiment 20000108 PARAMETER Experiment Name: Zm_Root-Tips_P Parameter: Age (day) Value: 12
  misc_feature: MA Experiment 20000108 PARAMETER Experiment Name: Zm_Root-Tips_P Parameter: Organism Value: Zea mays
  misc_feature: MA Experiment 20000108 PARAMETER Experiment Name: Zm_Root-Tips_P Parameter: Tissue Value: Root tips vs. Root mid region    35
  misc_feature: MA Experiment 20000108 PARAMETER Experiment Name: Zm_Root-Tips_P Parameter: Tissue Value: Root tips vs. Root mid region   Sequence Listing-Misc Features (4)
  misc_feature: MA Experiment ID: 20000488 Result: Down-regulated in Transcription
  misc_feature: MA Experiment 20000488 PARAMETER Experiment Name: Zm_50mM_NH4NO3_L_to_H_P Parameter: Organism Value: Zea mays
  misc_feature: MA Experiment 20000488 PARAMETER Experiment Name: Zm_50mM_NH4NO3_L_to_H_P Parameter: Timepoint (hr) Value: 8
  misc_feature: MA Experiment 20000488 PARAMETER Experiment Name: Zm_50mM_NH4NO3_L_to_H_P Parameter: Tissue Value: Leaves
  misc_feature: MA Experiment 20000488 PARAMETER Experiment Name: Zm_50mM_NH4NO3_L_to_H_P Parameter: Treatment Value: 50mM NH4NO3 vs. 100mM Mannitol
  misc_feature: MA Experiment ID: 20000492 Result: Down-regulated in Transcription
  misc_feature: MA Experiment 20000492 PARAMETER Experiment Name: Zm_Hybrid_Seed_Dev_P Parameter: DAP Value: 12
  misc_feature: MA Experiment 20000492 PARAMETER Experiment Name: Zm_Hybrid_Seed_Dev_P Parameter: Organism Value: Zea mays
  misc_feature: MA Experiment 20000492 PARAMETER Experiment Name: Zm_Hybrid_Seed_Dev_P Parameter: Plant Line Value: 35A19
  misc_feature: MA Experiment 20000492 PARAMETER Experiment Name: Zm_Hybrid_Seed_Dev_P Parameter: Tissue Value: Fert Kernel vs. Unfert Floret
cccggcccgcgcctcgctctctcttgtctcgcccgctagctcccatcccagcctcccaccgcgcccgcctgccccaacatcccccctccccgctccgctccacgcacggctccagatctgctacggcggcggccggtggacgccgcgccgcgcgtgccggaggcggtgacgtgagcggcggatcctgcccggccgtgccatcctggcgacgatgacagcgtaagcgggcggcggacgaccgcgtccccccggcccctactcccgaggtcattggcgtgtgctccttggcagaaaatggcgatgatggtggatccccccaatggcatggcaagtcaaggaaagcattactatactatgtggcagacactgtttgagatcgacaccaagtacgtgccgatcaagcccatcggaagaggagcttacggaatcgtttgctcatctgttaaccgcgagaccaatgaaaaagtcgcgataaaaaagataaacaacgtctttgacaaccgtgtggatgcgctaaggacgctgagagagctgaaactccttcggcacctgaggcacgagaatgttattgctctcaaggacataatgatgcctgcgcatagaaggagcttcaaggacgtttacttggtttatgagctcatggacactgatctgcatcaaataattaagtcatctcaaccactatccaatgaccactgccagtatttcctttttcagctgctccgaggcctgaagtacctccattcagccgggatactccacagagacctaaagccagggaacctcctggtcaacgcaaactgtgacctgaagatatgcgacttcgggctcgcccgcacgaacaacaccaagggccagttcatgacggagtacgtggtgacccgctggtacagggcacccgagctgctgctctgctgcgacaactacggcacgtccattgacgtctggtctgtggggtgcatattcgcggagctgcttggccgcaagccgatcttcccaggaaccgagtgcctgaaccagctcaagctcatcgtcaacgtcctcggcaccatgggcgaggccgacctcgcgttcatcgacaacccgaaggcccgcaagtacatcaagtcccttccgtacgccccgggcgcccccttcaccggcatgtaccctcaggcgcaccctctcgccatcgacctgctgcagaagatgctcgtgttcgacccgtccaagaggatcagcgtcaccgaggcgctggagcacccgtacatgtctccgctctatgacccgagcgcgaaccctcccgcgcaggtgccgatcgacctcgacatcgacgagaacctcggcgtcgacatgatcagggagatgatgtggcaggagatgatccactaccaccccgaggtcctcacgagaatcagcatgtgagtatgtgatgtgaccagacaggcagcaatgaaacatgtggacagaggtctgctgcgccaggatcatcacatgttcgcccttcttacgagcttaactgcgattacggcaccgagtcgaggtatcactacatgtatcggaaccgtcaggcggtctcttgtgtaaatatgcgctgaataagatgtgtggcaatctcttgttttttggttgtacatggacctcgctgttgtacgagtctgtgaagtggaaccctggtactaagacctgtaatttcagaccctaatctgttgtatggaaatctgaaggccttgactcccg

SEQ ID NO: 3269 - protein, 369 aa, Zea mays subsp. mays
  peptide (1)..(369): Ceres Seq. ID no. 12348981
  misc_feature (32)..(319): Pfam Name: Protein kinase domain Pfam Description: Protein kinase domain
  misc_feature (32)..(319): Pfam Name: Protein kinase domain Pfam Description: Protein kinase domain
  misc_feature (1)..(362): Homolog of NCBI NO: 4887127 NR Description: putative mitogen-activated protein kinase MAPK
  misc_feature (1)..(365): Homolog of NCBI NO: 15218451 NR Description: putative mitogen-activated protein kinase, MAP
  misc_feature (1)..(362): Homolog of NCBI NO: 2499612 NR Description: MITOGEN-ACTIVATED PROTEIN KINASE HOMOLOG 1
  misc_feature (1)..(365): Homolog of NCBI NO: 533281 NR Description: ATMPK2 [Arabidopsis thaliana]
  misc_feature (1)..(365): Homolog of NCBI NO: 18406388 NR Description: expressed protein
  misc_feature (1)..(362): Homolog of NCBI NO: 4887127 NR Description: putative mitogen-activated protein kinase MAPK
  misc_feature (1)..(362): Homolog of NCBI NO: 2499612 NR Description: MITOGEN-ACTIVATED PROTEIN KINASE HOMOLOG 1
  misc_feature (1)..(365): Homolog of NCBI NO: 18406388 NR Description: expressed protein
  misc_feature (1)..(369): Homolog of NCBI NO: 11869994 NR Description: MAP kinase 2 [Oryza sativa]
  misc_feature (1)..(369): Homolog of NCBI NO: 24412848 NR Description: putative mitogen-activated protein kinase, msrmk3
  misc_feature (1)..(369): Homolog of NCBI NO: 6491800 NR Description: MAPK4 protein [Oryza sativa]
  misc_feature (1)..(368): Homolog of NCBI NO: 7341300 NR Description: MAP kinase MAPK2 [Oryza sativa]
  misc_feature (1)..(365): Homolog of NCBI NO: 2499614 NR Description: MITOGEN-ACTIVATED PROTEIN KINASE HOMOLOG NTF3
  misc_feature (1)..(365): Homolog of NCBI NO: 533281 NR Description: ATMPK2 [Arabidopsis thaliana]
  misc_feature (1)..(365): Homolog of NCBI NO: 15218451 NR Description: putative mitogen-activated protein kinase, MAP
  misc_feature (1)..(365): Homolog of NCBI NO: 2499614 NR Description: MITOGEN-ACTIVATED PROTEIN KINASE HOMOLOG NTF3
  misc_feature (1)..(368): Homolog of NCBI NO: 7341300 NR Description: MAP kinase MAPK2 [Oryza sativa]
  misc_feature (1)..(369): Homolog of NCBI NO: 6491800 NR Description: MAPK4 protein [Oryza sativa]
  misc_feature (1)..(369): Homolog of NCBI NO: 24412848 NR Description: putative mitogen-activated protein kinase, msrmk3
  misc_feature (1)..(369): Homolog of NCBI NO: 11869994 NR Description: MAP kinase 2 [Oryza sativa]
MAMMVDPPNGMASQGKHYYTMWQTLFEIDTKYVPIKPIGRGAYGIVCSSVNRETNEKVAIKKINNVFDNRVDALRTLRELKLLRHLRHENVIALKDIMMPAHRRSFKDVYLVYELMDTDLHQIIKSSQPLSNDHCQYFLFQLLRGLKYLHSAGILHRDLKPGNLLVNANCDLKICDFGLARTNNTKGQFMTEYVVTRWYRAPELLLCCDNYGTSIDVWSVGCIFAELLGRKPIFPGTECLNQLKLIVNVLGTMGEADLAFIDNPKARKYIKSLPYAPGAPFTGMYPQAHPLAIDLLQKMLVFDPSKRISVTEALEHPYMSPLYDPSANPPAQVPIDLDIDENLGVDMIREMMWQEMIHYHPEVLTRISM

SEQ ID NO: 3270 - protein, 367 aa, Zea mays subsp. mays
  peptide (1)..(367): Ceres Seq. ID no. 12348982
  misc_feature (30)..(317): Pfam Name: Protein kinase domain Pfam Description: Protein kinase domain
  misc_feature (30)..(317): Pfam Name: Protein kinase domain Pfam Description: Protein kinase domain
  misc_feature (1)..(360): Homolog of NCBI NO: 4887127 NR Description: putative mitogen-activated protein kinase MAPK
  misc_feature (1)..(363): Homolog of NCBI NO: 15218451 NR Description: putative mitogen-activated protein kinase, MAP
  misc_feature (1)..(360): Homolog of NCBI NO: 2499612 NR Description: MITOGEN-ACTIVATED PROTEIN KINASE HOMOLOG 1
  misc_feature (1)..(363): Homolog of NCBI NO: 533281 NR Description: ATMPK2 [Arabidopsis thaliana]
  misc_feature (1)..(363): Homolog of NCBI NO: 18406388 NR Description: expressed protein
  misc_feature (1)..(360): Homolog of NCBI NO: 4887127 NR Description: putative mitogen-activated protein kinase MAPK
  misc_feature (1)..(360): Homolog of NCBI NO: 2499612 NR Description: MITOGEN-ACTIVATED PROTEIN KINASE HOMOLOG 1
  misc_feature (1)..(363): Homolog of NCBI NO: 18406388 NR Description: expressed protein
  misc_feature (1)..(367): Homolog of NCBI NO: 11869994 NR Description: MAP kinase 2 [Oryza sativa]
  misc_feature (1)..(367): Homolog of NCBI NO: 24412848 NR Description: putative mitogen-activated protein kinase, msrmk3
  misc_feature (1)..(367): Homolog of NCBI NO: 6491800 NR Description: MAPK4 protein [Oryza sativa]
  misc_feature (1)..(366): Homolog of NCBI NO: 7341300 NR Description: MAP kinase MAPK2 [Oryza sativa]
  misc_feature (1)..(363): Homolog of NCBI NO: 2499614 NR Description: MITOGEN-ACTIVATED PROTEIN KINASE HOMOLOG NTF3
  misc_feature (1)..(363): Homolog of NCBI NO: 533281 NR Description: ATMPK2 [Arabidopsis thaliana]
  misc_feature (1)..(363): Homolog of NCBI NO: 15218451 NR Description: putative mitogen-activated protein kinase, MAP
  misc_feature (1)..(363): Homolog of NCBI NO: 2499614 NR Description: MITOGEN-ACTIVATED PROTEIN KINASE HOMOLOG NTF3
  misc_feature (1)..(366): Homolog of NCBI NO: 7341300 NR Description: MAP kinase MAPK2 [Oryza sativa]
  misc_feature (1)..(367): Homolog of NCBI NO: 6491800 NR Description: MAPK4 protein [Oryza sativa]
  misc_feature (1)..(367): Homolog of NCBI NO: 24412848 NR Description: putative mitogen-activated protein kinase, msrmk3
  misc_feature (1)..(367): Homolog of NCBI NO: 11869994 NR Description: MAP kinase 2 [Oryza sativa]
MMVDPPNGMASQGKHYYTMWQTLFEIDTKYVPIKPIGRGAYGIVCSSVNRETNEKVAIKKINNVFDNRVDALRTLRELKLLRHLRHENVIALKDIMMPAHRRSFKDVYLVYELMDTDLHQIIKSSQPLSNDHCQYFLFQLLRGLKYLHSAGILHRDLKPGNLLVNANCDLKICDFGLARTNNTKGQFMTEYVVTRWYRAPELLLCCDNYGTSIDVWSVGCIFAELLGRKPIFPGTECLNQLKLIVNVLGTMGEADLAFIDNPKARKYIKSLPYAPGAPFTGMYPQAHPLAIDLLQKMLVFDPSKRISVTEALEHPYMSPLYDPSANPPAQVPIDLDIDENLGVDMIREMMWQEMIHYHPEVLTRISM

SEQ ID NO: 3271 - protein, 366 aa, Zea mays subsp. mays
  peptide (1)..(366): Ceres Seq. ID no. 12348983
  misc_feature (29)..(316): Pfam Name: Protein kinase domain Pfam Description: Protein kinase domain
  misc_feature (29)..(316): Pfam Name: Protein kinase domain Pfam Description: Protein kinase domain
  misc_feature (1)..(359): Homolog of NCBI NO: 4887127 NR Description: putative mitogen-activated protein kinase MAPK
  misc_feature (1)..(362): Homolog of NCBI NO: 15218451 NR Description: putative mitogen-activated protein kinase, MAP
  misc_feature (1)..(359): Homolog of NCBI NO: 2499612 NR Description: MITOGEN-ACTIVATED PROTEIN KINASE HOMOLOG 1
  misc_feature (1)..(362): Homolog of NCBI NO: 533281 NR Description: ATMPK2 [Arabidopsis thaliana]
  misc_feature (1)..(362): Homolog of NCBI NO: 18406388 NR Description: expressed protein
  misc_feature (1)..(359): Homolog of NCBI NO: 4887127 NR Description: putative mitogen-activated protein kinase MAPK
  misc_feature (1)..(359): Homolog of NCBI NO: 2499612 NR Description: MITOGEN-ACTIVATED PROTEIN KINASE HOMOLOG 1
  misc_feature (1)..(362): Homolog of NCBI NO: 18406388 NR Description: expressed protein
  misc_feature (1)..(366): Homolog of NCBI NO: 11869994 NR Description: MAP kinase 2 [Oryza sativa]
  misc_feature (1)..(366): Homolog of NCBI NO: 24412848 NR Description: putative mitogen-activated protein kinase, msrmk3
  misc_feature (1)..(366): Homolog of NCBI NO: 6491800 NR Description: MAPK4 protein [Oryza sativa]
  misc_feature (1)..(365): Homolog of NCBI NO: 7341300 NR Description: MAP kinase MAPK2 [Oryza sativa]
  misc_feature (1)..(362): Homolog of NCBI NO: 2499614 NR Description: MITOGEN-ACTIVATED PROTEIN KINASE HOMOLOG NTF3
  misc_feature (1)..(362): Homolog of NCBI NO: 533281 NR Description: ATMPK2 [Arabidopsis thaliana]
  misc_feature (1)..(362): Homolog of NCBI NO: 15218451 NR Description: putative mitogen-activated protein kinase, MAP
  misc_feature (1)..(362): Homolog of NCBI NO: 2499614 NR Description: MITOGEN-ACTIVATED PROTEIN KINASE HOMOLOG NTF3
  misc_feature (1)..(365): Homolog of NCBI NO: 7341300 NR Description: MAP kinase MAPK2 [Oryza sativa]
  misc_feature (1)..(366): Homolog of NCBI NO: 6491800 NR Description: MAPK4 protein [Oryza sativa]
  misc_feature (1)..(366): Homolog of NCBI NO: 24412848 NR Description: putative mitogen-activated protein kinase, msrmk3
  misc_feature (1)..(366): Homolog of NCBI NO: 11869994 NR Description: MAP kinase 2 [Oryza sativa]
MVDPPNGMASQGKHYYTMWQTLFEIDTKYVPIKPIGRGAYGIVCSSVNRETNEKVAIKKINNVFDNRVDALRTLRELKLLRHLRHENVIALKDIMMPAHRRSFKDVYLVYELMDTDLHQIIKSSQPLSNDHCQYFLFQLLRGLKYLHSAGILHRDLKPGNLLVNANCDLKICDFGLARTNNTKGQFMTEYVVTRWYRAPELLLCCDNYGTSIDVWSVGCIFAELLGRKPIFPGTECLNQLKLIVNVLGTMGEADLAFIDNPKARKYIKSLPYAPGAPFTGMYPQAHPLAIDLLQKMLVFDPSKRISVTEALEHPYMSPLYDPSANPPAQVPIDLDIDENLGVDMIREMMWQEMIHYHPEVLTRISM

SEQ ID NO: 3272 - DNA, 1291 bp, Zea mays subsp. mays
  misc_feature (1)..(1291): Ceres Seq. ID no. 12406180
  misc_feature: MA Experiment ID: 108528 Result: Down-regulated in Transcription
  misc_feature: MA Experiment 108528 PARAMETER Experiment Name: Zm_Imbibed_Seeds_P Parameter: Age (day) Value: 5 vs. 2
  misc_feature: MA Experiment 108528 PARAMETER Experiment Name: Zm_Imbibed_Seeds_P Parameter: Organism Value: Zea mays
  misc_feature: MA Experiment 108528 PARAMETER Experiment Name: Zm_Imbibed_Seeds_P Parameter: Plant Line Value: 35A19
  misc_feature: MA Experiment 108528 PARAMETER Experiment Name: Zm_Imbibed_Seeds_P Parameter: Tissue Value: Aerial vs. Embryo
  misc_feature: MA Experiment ID: 108530 Result: Down-regulated in Transcription
  misc_feature: MA Experiment 108530 PARAMETER Experiment Name: Zm_Imbibed_Seeds_P Parameter: Age (day) Value: 6 vs. 2
  misc_feature: MA Experiment 108530 PARAMETER Experiment Name: Zm_Imbibed_Seeds_P Parameter: Organism Value: Zea mays
  misc_feature: MA Experiment 108530 PARAMETER Experiment Name: Zm_Imbibed_Seeds_P Parameter: Plant Line Value: 35A19
  misc_feature: MA Experiment 108530 PARAMETER Experiment Name: Zm_Imbibed_Seeds_P Parameter: Tissue Value: Aerial vs. Embryo
  misc_feature: MA Experiment ID: 108535 Result: Up-regulated in Transcription
  misc_feature: MA Experiment 108535 PARAMETER Experiment Name: Zm_Meristem_P Parameter: Age (day) Value: 8
  misc_feature: MA Experiment 108535 PARAMETER Experiment Name: Zm_Meristem_P Parameter: Organism Value: Zea mays
  misc_feature: MA Experiment 108535 PARAMETER Experiment Name: Zm_Meristem_P Parameter: Plant Line Value: 35A19
  misc_feature: MA Experiment 108535 PARAMETER Experiment Name: Zm_Meristem_P Parameter: Tissue Value: Root Meristem vs. Above Root Meristem
  misc_feature: MA Experiment ID: 108543 Result: Up-regulated in Transcription
  misc_feature: MA Experiment ID: 108544 Result: Down-regulated in Transcription
  misc_feature: MA Experiment ID: 108547 Result: Down-regulated in Transcription
  misc_feature: MA Experiment 108547 PARAMETER Experiment Name: Zm_Imbibed_Seeds_P Parameter: Age (day) Value: 4 vs. 2
  misc_feature: MA Experiment 108547 PARAMETER Experiment Name: Zm_Imbibed_Seeds_P Parameter: Organism Value: Zea mays
  misc_feature: MA Experiment 108547 PARAMETER Experiment Name: Zm_Imbibed_Seeds_P Parameter: Plant Line Value: 35A19
  misc_feature: MA Experiment 108547 PARAMETER Experiment Name: Zm_Imbibed_Seeds_P Parameter: Tissue Value: Aerial vs. Embryo
  misc_feature: MA Experiment ID: 108556 Result: Down-regulated in Transcription
  misc_feature: MA Experiment 108556 PARAMETER Experiment Name: Zm_Drought_P Parameter: Age (day) Value: 9
  misc_feature: MA Experiment 108556 PARAMETER Experiment Name: Zm_Drought_P Parameter: Organism Value: Zea mays
  misc_feature: MA Experiment 108556 PARAMETER Experiment Name: Zm_Drought_P Parameter: Plant Line Value: 35A19
  misc_feature: MA Experiment 108556 PARAMETER Experiment Name: Zm_Drought_P Parameter: Timepoint (hr) Value: 24
  misc_feature: MA Experiment 108556 PARAMETER Experiment Name: Zm_Drought_P Parameter: Tissue Value: Aerial
  misc_feature: MA Experiment 108556 PARAMETER Experiment Name: Zm_Drought_P Parameter: Treatment Value: Drought vs. No Drought
  misc_feature: MA Experiment ID: 108597 Result: Down-regulated in Transcription
  misc_feature: MA Experiment 108597 PARAMETER Experiment Name: Zm_100uM_ABA_P Parameter: Age (day) Value: 9
  misc_feature: MA Experiment 108597 PARAMETER Experiment Name: Zm_100uM_ABA_P Parameter: Organism Value: Zea mays
  misc_feature: MA Experiment 108597 PARAMETER Experiment Name: Zm_100uM_ABA_P Parameter: Plant Line Value: 35A19
  misc_feature: MA Experiment 108597 PARAMETER Experiment Name: Zm_100uM_ABA_P Parameter: Timepoint (hr) Value: 24
  misc_feature: MA Experiment 108597 PARAMETER Experiment Name: Zm_100uM_ABA_P Parameter: Tissue Value: Aerial
  misc_feature: MA Experiment 108597 PARAMETER Experiment Name: Zm_100uM_ABA_P Parameter: Treatment Value: 100uM ABA vs. No Treatment
  misc_feature: MA Experiment ID: 108687 Result: Down-regulated in Transcription
  misc_feature: MA Experiment 108687 PARAMETER Experiment Name: Zm_Embryos-Flowers__P Parameter: Tissue Value: Embryo vs. Aerial+
  misc_feature: MA Experiment ID: 108689 Result: Down-regulated in Transcription
  misc_feature: MA Experiment 108689 PARAMETER Experiment Name: Zm_Drought_Roots_P Parameter: Age (day) Value: 9
  misc_feature: MA Experiment 108689 PARAMETER Experiment Name: Zm_Drought_Roots_P Parameter: Organism Value: Zea mays
  misc_feature: MA Experiment 108689 PARAMETER Experiment Name: Zm_Drought_Roots_P Parameter: Plant Line Value: 35A19
  misc_feature: MA Experiment 108689 PARAMETER Experiment Name: Zm_Drought_Roots_P Parameter: Timepoint (hr) Value: 24
  misc_feature: MA Experiment 108689 PARAMETER Experiment Name: Zm_Drought_Roots_P Parameter: Tissue Value: Roots
  misc_feature: MA Experiment 108689 PARAMETER Experiment Name: Zm_Drought_Roots_P Parameter: Treatment Value: Drought vs. No Drought
  misc_feature: MA Experiment ID: 20000477 Result: Down-regulated in Transcription
  misc_feature: MA Experiment 20000477 PARAMETER Experiment Name: Zm_5mM_SA_P Parameter: Age (day) Value: 10
  misc_feature: MA Experiment 20000477 PARAMETER Experiment Name: Zm_5mM_SA_P Parameter: Organism Value: Zea mays
  misc_feature: MA Experiment 20000477 PARAMETER Experiment Name: Zm_5mM_SA_P Parameter: Plant Line Value: 35A19
  misc_feature: MA Experiment 20000477 PARAMETER Experiment Name: Zm_5mM_SA_P Parameter: Timepoint (hr) Value: 48
  misc_feature: MA Experiment 20000477 PARAMETER Experiment Name: Zm_5mM_SA_P Parameter: Tissue Value: Aerial
  misc_feature: MA Experiment 20000477 PARAMETER Experiment Name: Zm_5mM_SA_P Parameter: Treatment Value: 5mM SA vs. No Treatment
  misc_feature: MA Experiment ID: 20000478 Result: Down-regulated in Transcription
  misc_feature: MA Experiment 20000478 PARAMETER Experiment Name: Zm_5mM_SA_P Parameter: Age (day) Value: 11
  misc_feature: MA Experiment 20000478 PARAMETER Experiment Name: Zm_5mM_SA_P Parameter: Organism Value: Zea mays
  misc_feature: MA Experiment 20000478 PARAMETER Experiment Name: Zm_5mM_SA_P Parameter: Plant Line Value: 35A19
  misc_feature: MA Experiment 20000478 PARAMETER Experiment Name: Zm_5mM_SA_P Parameter: Timepoint (hr) Value: 72
  misc_feature: MA Experiment 20000478 PARAMETER Experiment Name: Zm_5mM_SA_P Parameter: Tissue Value: Aerial
  misc_feature: MA Experiment 20000478 PARAMETER Experiment Name: Zm_5mM_SA_P Parameter: Treatment Value: 5mM SA vs. No Treatment
  misc_feature: MA Experiment ID: 20000492 Result: Down-regulated in Transcription
  misc_feature: MA Experiment 20000492 PARAMETER Experiment Name: Zm_Hybrid_Seed_Dev_P Parameter: DAP Value: 12
  misc_feature: MA Experiment 20000492 PARAMETER Experiment Name: Zm_Hybrid_Seed_Dev_P Parameter: Organism Value: Zea mays
  misc_feature: MA Experiment 20000492 PARAMETER Experiment Name: Zm_Hybrid_Seed_Dev_P Parameter: Plant Line Value: 35A19
  misc_feature: MA Experiment 20000492 PARAMETER Experiment Name: Zm_Hybrid_Seed_Dev_P Parameter: Tissue Value: Fert Kernel vs. Unfert Floret
  misc_feature: MA Experiment ID: 20000535 Result: Down-regulated in Transcription
  misc_feature: MA Experiment 20000535 PARAMETER Experiment Name: Zm_Hybrid_Seed_Dev_P Parameter: DAP Value: 30 vs. 12
  misc_feature: MA Experiment 20000535 PARAMETER Experiment Name: Zm_Hybrid_Seed_Dev_P Parameter: Organism Value: Zea mays
  misc_feature: MA Experiment 20000535 PARAMETER Experiment Name: Zm_Hybrid_Seed_Dev_P Parameter: Plant Line Value: 35A19
  misc_feature: MA Experiment 20000535 PARAMETER Experiment Name: Zm_Hybrid_Seed_Dev_P Parameter: Tissue Value: Embryo vs. Unfert Floret
  misc_feature: MA Experiment ID: 20000626 Result: Down-regulated in Transcription
  misc_feature: MA Experiment 20000626 PARAMETER Experiment Name: Zm_Herbicide-Treatments_P Parameter: Timepoint (hr) Value: 12
  misc_feature: MA Experiment 20000626 PARAMETER Experiment Name: Zm_Herbicide-Treatments_P Parameter: Tissue Value: Aerial
  misc_feature: MA Experiment 20000626 PARAMETER Experiment Name: Zm_Herbicide-Treatments_P Parameter: Treatment Value: Roundup vs. No Treatment
  misc_feature: MA Experiment ID: 20001614 Result: Up-regulated in Transcription
  misc_feature: MA Experiment 20001614 PARAMETER Experiment Name: Zm_50ppm_KNO3_L-to-H_P Parameter: Age (day) Value: 21
  misc_feature: MA Experiment 20001614 PARAMETER Experiment Name: Zm_50ppm_KNO3_L-to-H_P Parameter: Organism Value: Zea mays
  misc_feature: MA Experiment 20001614 PARAMETER Experiment Name: Zm_50ppm_KNO3_L-to-H_P Parameter: Plant Line Value: 35A19
  misc_feature: MA Experiment 20001614 PARAMETER Experiment Name: Zm_50ppm_KNO3_L-to-H_P Parameter: Timepoint (hr) Value: 48
  misc_feature: MA Experiment 20001614 PARAMETER Experiment Name: Zm_50ppm_KNO3_L-to-H_P Parameter: Tissue Value: Roots
  misc_feature: MA Experiment 20001614 PARAMETER Experiment Name: Zm_50ppm_KNO3_L-to-H_P Parameter: Treatment Value: 50ppm KNO3 vs. 50ppm KCl
atataaataaagtactcaagcaatcctcgagcctcaggcccaagcaaagcatccagcggancacaccacaccacccttggtccggcactagcactagctatccagtggagacgaagatggcgacggcgcggtggctgcaggttgccgccatggcggtggcgctgctggcggagtgggcgacggcggcggcgcctcggaagcccgtggacgtgccgttccagaagaactacgtgccgacgtgggcgcaggaccacatccactacatcgacggcgggcgggaggtgcagctgtacctggacaagtccaccggcacgggcttccagacgcggggctcctacctcttcggccacttcagcatgcacatgaagctcgtcggcggcgactccgcgggcaccgtcacggccttctacctgtcgtcgcagaactcgggagcacgacgagatcgacttcgagttcctgggcaaccggacggggcagccctacatcctgcagaccaacgtgttcaccggcggcaagggcgaccgcgagcagcggatctacctctggttcgaccccaccaaggagtaccactcctactccgtcctctggaacctctacatgatcgcgttcttcgtggacgacgtgccgatccgggtgttcaagaacacgagcgccgacctgggcgtgcggtacccgttcagccagccgatgaagctctactccagcctgtggaacgccgacgactgggcgacccgcggcgggcgcgagaagacggactggtccaacgcgcccttcgtcgcctcctaccgcggcttccacgtcgacggctgcgaggcctccgcggaggcgcgcttctgcgccacccagggcgcgcgctggtgggaccagccggagttcagggacctcgacgccgcgcagtaccgccgcctggccgaggtcaggcgccgctacaccatctacaactactgcaccgatcgcgaccgctacggcgccgccgtgccgcccgagtgcgcccgcgaccgcgacgtctgatgatgatgcgttgggccggcaagctgcttgatcgagagcagcctgtaatgtatgtatggtatggtattgttgtgtgtcaggttcgtcgtcgtgggtctgcagagacagagagagtccgatccggcgcgtacgtgtgcccgcgtgggcacatgcatacgtacatgcttgtgttgtactgtacgctcgtatctcctcacaccgaaatgaattgcgattaagtatcgaaatttcggcagcttatccatcatgtaatgagttcctctgcagtacttaaaactct

SEQ ID NO: 3273 - protein, 408 aa, Zea mays subsp. mays
  peptide (1)..(408): Ceres Seq. ID no. 12406181
  misc_feature (72)..(142): Pfam Name: Glycosyl hydrolases family 16 Pfam Description: Glycosyl hydrolases family 16
  misc_feature (52)..(142): Homolog of NCBI NO: 541939 NR Description: xyloglucan endo-1,4-beta-D-glucanase (EC 3.2.1.-)
  misc_feature (39)..(142): Homolog of NCBI NO: 27228078 NR Description: xyloglucan endotransglycosylase precursor
  misc_feature (39)..(142): Homolog of NCBI NO: 950299 NR Description: xyloglucan endotransglycosylase precursor
  misc_feature (40)..(142): Homolog of NCBI NO: 1885310 NR Description: Endoxyloglucan transferase (EXT) [Hordeum vulgare
  misc_feature (40)..(142): Homolog of NCBI NO: 38605539 NR Description: Probable xyloglucan
  misc_feature (20)..(20): Xaa is any aa, unknown or other
INKVLKQSSSLRPKQSIQRXTPHHPWSGTSTSYPVETKMATARWLQVAAMAVALLAEWATAAAPRKPVDVPFQKNYVPTWAQDHIHYIDGGREVQLYLDKSTGTGFQTRGSYLFGHFSMHMKLVGGDSAGTVTAFYLSSQNSGARRDRLRVPGQPDGAALHPADQRVHRRQGRPRAADLPLVRPHQGVPLLLRPLEPLHDRVLRGRRADPGVQEHERRPGRAVPVQPADEALLQPVERRRLGDPRRAREDGLVQRALRRLLPRLPRRRLRGLRGGALLRHPGRALVGPAGVQGPRRRAVPPPGRGQAPLHHLQLLHRSRPLRRRRAARVRPRPRRLMMMRWAGKLLDREQPVMYVWYGIVVCQVRRRGSAETERVRSGAYVCPRGHMHTYMLVLYCTLVSPHTEMNCD

SEQ ID NO: 3274 - protein, 370 aa, Zea mays subsp. mays
  peptide (1)..(370): Ceres Seq. ID no. 12406182
  misc_feature (34)..(104): Pfam Name: Glycosyl hydrolases family 16 Pfam Description: Glycosyl hydrolases family 16
  misc_feature (14)..(104): Homolog of NCBI NO: 541939 NR Description: xyloglucan endo-1,4-beta-D-glucanase (EC 3.2.1.-)
  misc_feature (1)..(104): Homolog of NCBI NO: 27228078 NR Description: xyloglucan endotransglycosylase precursor
  misc_feature (1)..(104): Homolog of NCBI NO: 950299 NR Description: xyloglucan endotransglycosylase precursor
  misc_feature (2)..(104): Homolog of NCBI NO: 1885310 NR Description: Endoxyloglucan transferase (EXT) [Hordeum vulgare
  misc_feature (2)..(104): Homolog of NCBI NO: 38605539 NR Description: Probable xyloglucan
MATARWLQVAAMAVALLAEWATAAAPRKPVDVPFQKNYVPTWAQDHIHYIDGGREVQLYLDKSTGTGFQTRGSYLFGHFSMHMKLVGGDSAGTVTAFYLSSQNSGARRDRLRVPGQPDGAALHPADQRVHRRQGRPRAADLPLVRPHQGVPLLLRPLEPLHDRVLRGRRADPGVQEHERRPGRAVPVQPADEALLQPVERRRLGDPRRAREDGLVQRALRRLLPRLPRRRLRGLRGGALLRHPGRALVGPAGVQGPRRRAVPPPGRGQAPLHHLQLLHRSRPLRRRRAARVRPRPRRLMMMRWAGKLLDREQPVMYVWYGIVVCQVRRRGSAETERVRSGAYVCPRGHMHTYMLVLYCTLVSPHTEMNCD

SEQ ID NO: 3275 - protein, 359 aa, Zea mays subsp. mays
  peptide (1)..(359): Ceres Seq. ID no. 12406183
  misc_feature (23)..(93): Pfam Name: Glycosyl hydrolases family 16 Pfam Description: Glycosyl hydrolases family 16
  misc_feature (3)..(93): Homolog of NCBI NO: 541939 NR Description: xyloglucan endo-1,4-beta-D-glucanase (EC 3.2.1.-)
  misc_feature (1)..(93): Homolog of NCBI NO: 27228078 NR Description: xyloglucan endotransglycosylase precursor
  misc_feature (1)..(93): Homolog of NCBI NO: 950299 NR Description: xyloglucan endotransglycosylase precursor
  misc_feature (1)..(93): Homolog of NCBI NO: 1885310 NR Description: Endoxyloglucan transferase (EXT) [Hordeum vulgare
  misc_feature (1)..(93): Homolog of NCBI NO: 38605539 NR Description: Probable xyloglucan
MAVALLAEWATAAAPRKPVDVPFQKNYVPTWAQDHIHYIDGGREVQLYLDKSTGTGFQTRGSYLFGHFSMHMKLVGGDSAGTVTAFYLSSQNSGARRDRLRVPGQPDGAALHPADQRVHRRQGRPRAADLPLVRPHQGVPLLLRPLEPLHDRVLRGRRADPGVQEHERRPGRAVPVQPADEALLQPVERRRLGDPRRAREDGLVQRALRRLLPRLPRRRLRGLRGGALLRHPGRALVGPAGVQGPRRRAVPPPGRGQAPLHHLQLLHRSRPLRRRRAARVRPRPRRLMMMRWAGKLLDREQPVMYVWYGIVVCQVRRRGSAETERVRSGAYVCPRGHMHTYMLVLYCTLVSPHTEMNCD

SEQ ID NO: 3276 - DNA, 1481 bp, Zea mays subsp. mays
  misc_feature (1)..(1481): Ceres Seq. ID no. 12410320
  misc_feature: MA Experiment ID: 108527 Result: Up-regulated in Transcription
  misc_feature: MA Experiment 108527 PARAMETER Experiment Name: Zm_5mM_NO_P Parameter: Age (day) Value: 8
  misc_feature: MA Experiment 108527 PARAMETER Experiment Name: Zm_5mM_NO_P Parameter: Organism Value: Zea mays
  misc_feature: MA Experiment 108527 PARAMETER Experiment Name: Zm_5mM_NO_P Parameter: Plant Line Value: 35A19
  misc_feature: MA Experiment 108527 PARAMETER Experiment Name: Zm_5mM_NO_P Parameter: Timepoint (hr) Value: 6
  misc_feature: MA Experiment 108527 PARAMETER Experiment Name: Zm_5mM_NO_P Parameter: Tissue Value: Aerial
  misc_feature: MA Experiment 108527 PARAMETER Experiment Name: Zm_5mM_NO_P Parameter: Treatment Value: 5mM NO vs. No Treatment
  misc_feature: MA Experiment ID: 20000492 Result: Up-regulated in Transcription
  misc_feature: MA Experiment 20000492 PARAMETER Experiment Name: Zm_Hybrid_Seed_Dev_P Parameter: DAP Value: 12
  misc_feature: MA Experiment 20000492 PARAMETER Experiment Name: Zm_Hybrid_Seed_Dev_P Parameter: Organism Value: Zea mays
  misc_feature: MA Experiment 20000492 PARAMETER Experiment Name: Zm_Hybrid_Seed_Dev_P Parameter: Plant Line Value: 35A19
  misc_feature: MA Experiment 20000492 PARAMETER Experiment Name: Zm_Hybrid_Seed_Dev_P Parameter: Tissue Value: Fert Kernel vs. Unfert Floret
gccaaccgatcctcctcctcctcgctcgacgagtcgtctgtgagaacaatggcaactgccgcgggtggagccaccgccggctcgcgccgtcgggcgctgctcctgatcgcgaactacgccgcgctgctggtggggtccgtctcgtcgagcctgctgtccaggttctacttcgcgcgaggcgggcggaaccggtgggtggtgacgctggtgcagtcggcgggcttcccactgctggtcgtcgccgtcctcgtcgccggccgccccgccgccgcgccgcgccccttcacgtggttctcgaggcggttcctcacggtgtgcctcgtcatcggcgcgctcatgggcgccaacaacctgctcttctcgtacagcacgtcgttcctgcccgtgtccacgtcgtcgctgctgctgtcgacgcagttggcgttcacgctcgtgctggccgccgtcatcgtccgccacccgctcaccttcgtcaacctcaatgccgtcgtgctcctgaccgtcagctccgtgctcctggcgctccgctcgggggactccggcgagaacccggacgggggcggcgcggccgcggcgcactacttcgccgggtacgtggtcacgctgggcgcggcggggctgttcgccgcgtacctgcccgtcatggagctcctgtaccgccaggccgtgtccggcgggttcgtcctggccgtggaggtgcaggcggtgatgcaggccatggcctcgctggtggcggcgatcgggctggcggccaagggaggcctgggcggcgacgtggcgcgctggaagggctcggcggcgctctactgggtcgtggtgtccaccctggtcctgacttggcaggcgtgcttcatgggcacggcgggggtgatctacctcacgtcgtcgctacacagcggcgtgtgcatgaccgccgtgctgacggcgaacgtgctgggcggcgtgttggtgttcggcgacccattcggcgccgagaagggcatcgcgaccgcgctctgcgcctggggcctcgcctcctacctctacggcgagtacaccaagaaaaagaaagaagaagaggatgaggccgtcgccgacgcgtccgcttccgacgccgacagcgtccggaagagccttacaggcggcgccggagacgagctagaagacgtctgaaaacaaactaaaggccacaggggaatgaaccgtgtgatcagggacgaagcaagaatggaaactgaaaagggtgtagctgcagttgttgagtcatgttagatcgatggattataggcaaagttacaagcaaccaaacttgtaactgatggccagctcttctggctgctagctagtagctattaatctagtcatgaggtttcactagcggtttaagtgatcagggtttagtactttagtgtagtgtggggtgggtggaatacaacatgtaaaccagctgttcctcctccttactcactgtcgtcatcaatattcaatagccgccgttgttg

SEQ ID NO: 3277 - protein, 383 aa, Zea mays subsp. mays
  peptide (1)..(383): Ceres Seq. ID no. 12410321
  misc_feature (179)..(358): Pfam Name: Domain of unknown function, DUF250 Pfam Description: Domain of unknown function, DUF250
  misc_feature (10)..(365): Homolog of NCBI NO: 38344291 NR Description: OSJNBa0013K16.23 [Oryza sativa (japonica
  misc_feature (94)..(364): Homolog of NCBI NO: 30685825 NR Description: purine permease family [Arabidopsis thaliana]
  misc_feature (94)..(364): Homolog of NCBI NO: 25350217 NR Description: hypothetical protein At2g33750 [imported] -
  misc_feature (18)..(367): Homolog of NCBI NO: 34902418 NR Description: Hypothetical protein [Oryza sativa (japonica
  misc_feature (33)..(360): Homolog of NCBI NO: 15219436 NR Description: hypothetical protein
  misc_feature (34)..(363): Homolog of NCBI NO: 15217872 NR Description: purine permease, putative; protein id:
  misc_feature (34)..(350): Homolog of NCBI NO: 7620007 NR Description: purine permease [Arabidopsis thaliana]
  misc_feature (34)..(350): Homolog of NCBI NO: 15217873 NR Description: purine permease
  misc_feature (29)..(367): Homolog of NCBI NO: 18397682 NR Description: expressed protein
  misc_feature (18)..(383): Homolog of NCBI NO: 34911172 NR Description: putative purine permease [Oryza sativa (japonica
ANRSSSSSLDESSVRTMATAAGGATAGSRRRALLLIANYAALLVGSVSSSLLSRFYFARGGRNRWVVTLVQSAGFPLLVVAVLVAGRPAAAPRPFTWFSRRFLTVCLVIGALMGANNLLFSYSTSFLPVSTSSLLLSTQLAFTLVLAAVIVRHPLTFVNLNAVVLLTVSSVLLALRSGDSGENPDGGGAAAAHYFAGYVVTLGAAGLFAAYLPVMELLYRQAVSGGFVLAVEVQAVMQAMASLVAAIGLAAKGGLGGDVARWKGSAALYWVVVSTLVLTWQACFMGTAGVIYLTSSLHSGVCMTAVLTANVLGGVLVFGDPFGAEKGIATALCAWGLASYLYGEYTKKKKEEEDEAVADASASDADSVRKSLTGGAGDELEDV

SEQ ID NO: 3278 - protein, 367 aa, Zea mays subsp. mays
  peptide (1)..(367): Ceres Seq. ID no. 12410322
  misc_feature (163)..(342): Pfam Name: Domain of unknown function, DUF250 Pfam Description: Domain of unknown function, DUF250
  misc_feature (18)..(347): Homolog of NCBI NO: 15217872 NR Description: purine permease, putative; protein id:
  misc_feature (18)..(334): Homolog of NCBI NO: 7620007 NR Description: purine permease [Arabidopsis thaliana]
  misc_feature (18)..(334): Homolog of NCBI NO: 15217873 NR Description: purine permease
  misc_feature (78)..(348): Homolog of NCBI NO: 30685825 NR Description: purine permease family [Arabidopsis thaliana]
  misc_feature (2)..(351): Homolog of NCBI NO: 34902418 NR Description: Hypothetical protein [Oryza sativa (japonica
  misc_feature (17)..(344): Homolog of NCBI NO: 15219436 NR Description: hypothetical protein
  misc_feature (78)..(348): Homolog of NCBI NO: 25350217 NR Description: hypothetical protein At2g33750 [imported] -
  misc_feature (1)..(349): Homolog of NCBI NO: 38344291 NR Description: OSJNBa0013K16.23 [Oryza sativa (japonica
  misc_feature (13)..(351): Homolog of NCBI NO: 18397682 NR Description: expressed protein
  misc_feature (2)..(367): Homolog of NCBI NO: 34911172 NR Description: putative purine permease [Oryza sativa (japonica
MATAAGGATAGSRRRALLLIANYAALLVGSVSSSLLSRFYFARGGRNRWVVTLVQSAGFPLLVVAVLVAGRPAAAPRPFTWFSRRFLTVCLVIGALMGANNLLFSYSTSFLPVSTSSLLLSTQLAFTLVLAAVIVRHPLTFVNLNAVVLLTVSSVLLALRSGDSGENPDGGGAAAAHYFAGYVVTLGAAGLFAAYLPVMELLYRQAVSGGFVLAVEVQAVMQAMASLVAAIGLAAKGGLGGDVARWKGSAALYWVVVSTLVLTWQACFMGTAGVIYLTSSLHSGVCMTAVLTANVLGGVLVFGDPFGAEKGIATALCAWGLASYLYGEYTKKKKEEEDEAVADASASDADSVRKSLTGGAGDELEDV

SEQ ID NO: 3279 - protein, 353 aa, Zea mays subsp. mays
  peptide (1)..(353): Ceres Seq. ID no. 12410323
  misc_feature (132)..(353): Pfam Name: DivIVA protein Pfam Description: DivIVA protein
  misc_feature (29)..(258): Homolog of NCBI NO: 23018055 NR Description: hypothetical protein [Thermobifida fusca]
QPILLLLARRVVCENNGNCRGWSHRRLAPSGAAPDRELRRAAGGVRLVEPAVQVLLRARRAEPVGGDAGAVGGLPTAGRRRPRRRPPRRRAAPLHVVLEAVPHGVPRHRRAHGRQQPALLVQHVVPARVHVVAAAVDAVGVHARAGRRHRPPPAHLRQPQCRRAPDRQLRAPGAPLGGLRREPGRGRRGRGALLRRVRGHAGRGGAVRRVPARHGAPVPPGRVRRVRPGRGGAGGDAGHGLAGGGDRAGGQGRPGRRRGALEGLGGALLGRGVHPGPDLAGVLHGHGGGDLPHVVATQRRVHDRRADGERAGRRVGVRRPIRRREGHRDRALRLGPRLLPLRRVHQEKERRRG

SEQ ID NO: 3280 - DNA, 1900 bp, Zea mays subsp. mays
  misc_feature (1)..(1900): Ceres Seq. ID no. 13493214
  misc_feature: MA Experiment ID: 108535 Result: Up-regulated in Transcription
  misc_feature: MA Experiment 108535 PARAMETER Experiment Name: Zm_Meristem_P Parameter: Age (day) Value: 8
  misc_feature: MA Experiment 108535 PARAMETER Experiment Name: Zm_Meristem_P Parameter: Organism Value: Zea mays
  misc_feature: MA Experiment 108535 PARAMETER Experiment Name: Zm_Meristem_P Parameter: Plant Line Value: 35A19
  misc_feature: MA Experiment 108535 PARAMETER Experiment Name: Zm_Meristem_P Parameter: Tissue Value: Root Meristem vs. Above Root Meristem
  misc_feature: MA Experiment ID: 108556 Result: Down-regulated in Transcription
  misc_feature: MA Experiment 108556 PARAMETER Experiment Name: Zm_Drought_P Parameter: Age (day) Value: 9
  misc_feature: MA Experiment 108556 PARAMETER Experiment Name: Zm_Drought_P Parameter: Organism Value: Zea mays
  misc_feature: MA Experiment 108556 PARAMETER Experiment Name: Zm_Drought_P Parameter: Plant Line Value: 35A19
  misc_feature: MA Experiment 108556 PARAMETER Experiment Name: Zm_Drought_P Parameter: Timepoint (hr) Value: 24
  misc_feature: MA Experiment 108556 PARAMETER Experiment Name: Zm_Drought_P Parameter: Tissue Value: Aerial
  misc_feature: MA Experiment 108556 PARAMETER Experiment Name: Zm_Drought_P Parameter: Treatment Value: Drought vs. No Drought
  misc_feature: MA Experiment ID: 20000477 Result: Down-regulated in Transcription
  misc_feature: MA Experiment 20000477 PARAMETER Experiment Name: Zm_5mM_SA_P Parameter: Age (day) Value: 10
  misc_feature: MA Experiment 20000477 PARAMETER Experiment Name: Zm_5mM_SA_P Parameter: Organism Value: Zea mays
  misc_feature: MA Experiment 20000477 PARAMETER Experiment Name: Zm_5mM_SA_P Parameter: Plant Line Value: 35A19
  misc_feature: MA Experiment 20000477 PARAMETER Experiment Name: Zm_5mM_SA_P Parameter: Timepoint (hr) Value: 48
  misc_feature: MA Experiment 20000477 PARAMETER Experiment Name: Zm_5mM_SA_P Parameter: Tissue Value: Aerial
  misc_feature: MA Experiment 20000477 PARAMETER Experiment Name: Zm_5mM_SA_P Parameter: Treatment Value: 5mM SA vs. No Treatment
  misc_feature: MA Experiment ID: 20000478 Result: Down-regulated in Transcription
  misc_feature: MA Experiment 20000478 PARAMETER Experiment Name: Zm_5mM_SA_P Parameter: Age (day) Value: 11
  misc_feature: MA Experiment 20000478 PARAMETER Experiment Name: Zm_5mM_SA_P Parameter: Organism Value: Zea mays
  misc_feature: MA Experiment 20000478 PARAMETER Experiment Name: Zm_5mM_SA_P Parameter: Plant Line Value: 35A19
  misc_feature: MA Experiment 20000478 PARAMETER Experiment Name: Zm_5mM_SA_P Parameter: Timepoint (hr) Value: 72
  misc_feature: MA Experiment 20000478 PARAMETER Experiment Name: Zm_5mM_SA_P Parameter: Tissue Value: Aerial
  misc_feature: MA Experiment 20000478 PARAMETER Experiment Name: Zm_5mM_SA_P Parameter: Treatment Value: 5mM SA vs. No Treatment
  misc_feature: MA Experiment ID: 20000479 Result: Down-regulated in Transcription
  misc_feature: MA Experiment 20000479 PARAMETER Experiment Name: Zm_Drought_P Parameter: Age (day) Value: 10
  misc_feature: MA Experiment 20000479 PARAMETER Experiment Name: Zm_Drought_P Parameter: Organism Value: Zea mays
  misc_feature: MA Experiment 20000479 PARAMETER Experiment Name: Zm_Drought_P Parameter: Plant Line Value: 35A19
  misc_feature: MA Experiment 20000479 PARAMETER Experiment Name: Zm_Drought_P Parameter: Timepoint (hr) Value: 48
  misc_feature: MA Experiment 20000479 PARAMETER Experiment Name: Zm_Drought_P Parameter: Tissue Value: Aerial
  misc_feature: MA Experiment 20000479 PARAMETER Experiment Name: Zm_Drought_P Parameter: Treatment Value: Drought vs. No Drought
  misc_feature: MA Experiment ID: 20000480 Result: Down-regulated in Transcription
  misc_feature: MA Experiment 20000480 PARAMETER Experiment Name: Zm_Drought_P Parameter: Age (day) Value: 11
  misc_feature: MA Experiment 20000480 PARAMETER Experiment Name: Zm_Drought_P Parameter: Organism Value: Zea mays
  misc_feature: MA Experiment 20000480 PARAMETER Experiment Name: Zm_Drought_P Parameter: Plant Line Value: 35A19
  misc_feature: MA Experiment 20000480 PARAMETER Experiment Name: Zm_Drought_P Parameter: Timepoint (hr) Value: 72
  misc_feature: MA Experiment 20000480 PARAMETER Experiment Name: Zm_Drought_P Parameter: Tissue Value: Aerial
  misc_feature: MA Experiment 20000480 PARAMETER Experiment Name: Zm_Drought_P Parameter: Treatment Value: Drought vs. No Drought
aacttcacataacggctgtgtcctgttcctgtagctgctctcttttatggttgatggttacgacctgaacagatcgatcgtccttcctgtcgtttcgttttctcgccggcagggcactgggtacgccgccgccgcctcaacgccaccacgctgccgccgcgccagttcgtcaccgcgagacacaagacacgtgcctcgcttccctcgggccggttggccgtggccggccgtcgctgttctgttcctatttcttggcaactccgcccgtttcacctccggaggaccgacagcgacggcgccagtagatagatgcactactgacgccactggccacctcgagttcgagtgccaagggacgccacgagaccaaccgtgaggacaggacaacggtcgcctttgcccgcggatccgcggatttcgtcttcttgggtgccatggatccagtcgccggcacggcggagcatcggggcccgttggaagtgcgcgcccgcgcgcccggcaagatcatcctcgcgggcgagcacgccgtcgtccacggctccgccgccgtcgccgctgccatcgatctctacaccaactcctccctcctcctccgccccgcaggcccaggagatggtggcggcgctggctccggcgcggtggagctggacctcagggactcgggcctcaccttctcgtggccgtgctcgcgcctccgcggggcgctgggggaggagatcagcgccaaccccggggctccggcgccgtgctcccctgaccagctggccgccattgccaggctcttgcaggaccaggagatccctgaggccaagatctggctctccgccggcctctccgccttccttttcctctacgcctccattttgggatgcaggcctggcaaggcagtggtgtcctcggacctgcccatgggcgcagggctcggctcatcagcggcattttgtgtctccatgtcgggggcgctattgactgctgctggtgcagtaagtgttggagcatgcatgggtgctgagggttgggaggtgttggagaagggtgctcttgagctggtcaaccaatgggcgttccaaggggaaaagattattcatggcaagccttctggcattgacaattccgtcagcacttttgggaaaatgatcaaattcaagaagggggaactgacaaaccttgagtcctggaacccagtcaaaatgcttattactgatacaagagttggtaggaacacaaaggcattggttgctggtgtgtctgaaagggcgtctaggcatccagatgctatggcttctgtcttccatgcagtgaactctattagtgaagagctttcaagcattgtcgagttagcagccgaggatgagatagccatcacctctaaggaggataagctagcggagcttatggagatgaaccaaggtttgcttcagtgtatgggagtcagccattcttctatagaaactgtgttgcggaccactctgaaatatagcttggtctcaaagctaactggagctggtggtggaggctgtgtgttgactctaatacccgacgttatcggccaatactgttctggagaaagtcaccacagatctcgaatctcacggttatcgctgcttcaaagttgaggttggtgggcgaggtctccaagtattccgtgtataacactcatcctatttcaaggagatgttgtaccaaacttagatggcttacctgcactgaagctgtttagattctcttcttgagttattccaagatcatgataggatattcttctcctaagcctagcggctagcaggttctgtatccagtacttgagttgctccaggattaggacattcttatgctatccctagcgatcttgtatcaaataagctcatagatgcatgatcattgctggtgtgattgttgt

SEQ ID NO: 3281 - protein, 393 aa, Zea mays subsp. mays
  peptide (1)..(393): Ceres Seq. ID no. 13493215
  misc_feature (132)..(367): Homolog of NCBI NO: 28828936 NR Description: similar to Rattus norvegicus (Rat). Mevalonate
  misc_feature (20)..(367): Homolog of NCBI NO: 12963731 NR Description: mevalonate kinase [Mus musculus]
  misc_feature (20)..(367): Homolog of NCBI NO: 33303805 NR Description: mevalonate kinase [synthetic construct]
  misc_feature (20)..(367): Homolog of NCBI NO: 4557769 NR Description: mevalonate kinase [Homo sapiens]
  misc_feature (20)..(367): Homolog of NCBI NO: 450346 NR Description: ORF for viral-cellular fusion transcript
  misc_feature (20)..(367): Homolog of NCBI NO: 13592007 NR Description: mevalonate kinase [Rattus norvegicus]
  misc_feature (14)..(368): Homolog of NCBI NO: 5578718 NR Description: mevalonate kinase [Arabidopsis thaliana]
  misc_feature (14)..(368): Homolog of NCBI NO: 15240936 NR Description: mevalonate kinase [Arabidopsis thaliana]
  misc_feature (14)..(371): Homolog of NCBI NO: 16417946 NR Description: mevalonate kinase [Hevea brasiliensis]
  misc_feature (14)..(368): Homolog of NCBI NO: 37532842 NR Description: putative mevalonate kinase
  misc_feature (14)..(368): Homolog of NCBI NO: 5578718 NR Description: mevalonate kinase [Arabidopsis thaliana]
  misc_feature (14)..(368): Homolog of NCBI NO: 15240936 NR Description: mevalonate kinase [Arabidopsis thaliana]
  misc_feature (14)..(371): Homolog of NCBI NO: 16417946 NR Description: mevalonate kinase [Hevea brasiliensis]
  misc_feature (14)..(368): Homolog of NCBI NO: 37532842 NR Description: putative mevalonate kinase
  misc_feature (132)..(367): Homolog of NCBI NO: 28828936 NR Description: similar to Rattus norvegicus (Rat). Mevalonate
  misc_feature (20)..(367): Homolog of NCBI NO: 12963731 NR Description: mevalonate kinase [Mus musculus]
  misc_feature (20)..(367): Homolog of NCBI NO: 33303805 NR Description: mevalonate kinase [synthetic construct]
  misc_feature (20)..(367): Homolog of NCBI NO: 4557769 NR Description: mevalonate kinase [Homo sapiens]
  misc_feature (20)..(367): Homolog of NCBI NO: 450346 NR Description: ORF for viral-cellular fusion transcript
  misc_feature (20)..(367): Homolog of NCBI NO: 13592007 NR Description: mevalonate kinase [Rattus norvegicus]
MDPVAGTAEHRGPLEVRARAPGKIILAGEHAVVHGSAAVAAAIDLYTNSSLLLRPAGPGDGGGAGSGAVELDLRDSGLTFSWPCSRLRGALGEEISANPGAPAPCSPDQLAAIARLLQDQEIPEAKIWLSAGLSAFLFLYASILGCRPGKAVVSSDLPMGAGLGSSAAFCVSMSGALLTAAGAVSVGACMGAEGWEVLEKGALELVNQWAFQGEKIIHGKPSGIDNSVSTFGKMIKFKKGELTNLESWNPVKMLITDTRVGRNTKALVAGVSERASRHPDAMASVFHAVNSISEELSSIVELAAEDEIAITSKEDKLAELMEMNQGLLQCMGVSHSSIETVLRTTLKYSLVSKLTGAGGGGCVLTLIPDVIGQYCSGESHHRSRISRLSLLQS

SEQ ID NO: 3282 - protein, 235 aa, Zea mays subsp. mays
  peptide (1)..(235): Ceres Seq. ID no. 13493216
  misc_feature (1)..(209): Homolog of NCBI NO: 28828936 NR Description: similar to Rattus norvegicus (Rat). Mevalonate
  misc_feature (1)..(209): Homolog of NCBI NO: 12963731 NR Description: mevalonate kinase [Mus musculus]
  misc_feature (1)..(209): Homolog of NCBI NO: 33303805 NR Description: mevalonate kinase [synthetic construct]
  misc_feature (1)..(209): Homolog of NCBI NO: 4557769 NR Description: mevalonate kinase [Homo sapiens]
  misc_feature (1)..(209): Homolog of NCBI NO: 450346 NR Description: ORF for viral-cellular fusion transcript
  misc_feature (1)..(209): Homolog of NCBI NO: 13592007 NR Description: mevalonate kinase [Rattus norvegicus]
  misc_feature (1)..(210): Homolog of NCBI NO: 5578718 NR Description: mevalonate kinase [Arabidopsis thaliana]
  misc_feature (1)..(210): Homolog of NCBI NO: 15240936 NR Description: mevalonate kinase [Arabidopsis thaliana]
  misc_feature (1)..(213): Homolog of NCBI NO: 16417946 NR Description: mevalonate kinase [Hevea brasiliensis]
  misc_feature (1)..(210): Homolog of NCBI NO: 37532842 NR Description: putative mevalonate kinase
  misc_feature (1)..(209): Homolog of NCBI NO: 28828936 NR Description: similar to Rattus norvegicus (Rat). Mevalonate
  misc_feature (1)..(209): Homolog of NCBI NO: 12963731 NR Description: mevalonate kinase [Mus musculus]
  misc_feature (1)..(209): Homolog of NCBI NO: 33303805 NR Description: mevalonate kinase [synthetic construct]
  misc_feature (1)..(209): Homolog of NCBI NO: 4557769 NR Description: mevalonate kinase [Homo sapiens]
  misc_feature (1)..(209): Homolog of NCBI NO: 450346 NR Description: ORF for viral-cellular fusion transcript
  misc_feature (1)..(209): Homolog of NCBI NO: 13592007 NR Description: mevalonate kinase [Rattus norvegicus]
  misc_feature (1)..(210): Homolog of NCBI NO: 5578718 NR Description: mevalonate kinase [Arabidopsis thaliana]
  misc_feature (1)..(210): Homolog of NCBI NO: 15240936 NR Description: mevalonate kinase [Arabidopsis thaliana]
  misc_feature (1)..(213): Homolog of NCBI NO: 16417946 NR Description: mevalonate kinase [Hevea brasiliensis]
  misc_feature (1)..(210): Homolog of NCBI NO: 37532842 NR Description: putative mevalonate kinase
MGAGLGSSAAFCVSMSGALLTAAGAVSVGACMGAEGWEVLEKGALELVNQWAFQGEKIIHGKPSGIDNSVSTFGKMIKFKKGELTNLESWNPVKMLITDTRVGRNTKALVAGVSERASRHPDAMASVFHAVNSISEELSSIVELAAEDEIAITSKEDKLAELMEMNQGLLQCMGVSHSSIETVLRTTLKYSLVSKLTGAGGGGCVLTLIPDVIGQYCSGESHHRSRISRLSLLQS

SEQ ID NO: 3283 - protein, 221 aa, Zea mays subsp. mays
  peptide (1)..(221): Ceres Seq. ID no. 13493217
  misc_feature (1)..(195): Homolog of NCBI NO: 28828936 NR Description: similar to Rattus norvegicus (Rat). Mevalonate
  misc_feature (1)..(195): Homolog of NCBI NO: 12963731 NR Description: mevalonate kinase [Mus musculus]
  misc_feature (1)..(195): Homolog of NCBI NO: 33303805 NR Description: mevalonate kinase [synthetic construct]
  misc_feature (1)..(195): Homolog of NCBI NO: 4557769 NR Description: mevalonate kinase [Homo sapiens]
  misc_feature (1)..(195): Homolog of NCBI NO: 450346 NR Description: ORF for viral-cellular fusion transcript
  misc_feature (1)..(195): Homolog of NCBI NO: 13592007 NR Description: mevalonate kinase [Rattus norvegicus]
  misc_feature (1)..(196): Homolog of NCBI NO: 5578718 NR Description: mevalonate kinase [Arabidopsis thaliana]
  misc_feature (1)..(196): Homolog of NCBI NO: 15240936 NR Description: mevalonate kinase [Arabidopsis thaliana]
  misc_feature (1)..(199): Homolog of NCBI NO: 16417946 NR Description: mevalonate kinase [Hevea brasiliensis]
  misc_feature (1)..(196): Homolog of NCBI NO: 37532842 NR Description: putative mevalonate kinase
  misc_feature (1)..(195): Homolog of NCBI NO: 28828936 NR Description: similar to Rattus norvegicus (Rat). Mevalonate
  misc_feature (1)..(195): Homolog of NCBI NO: 12963731 NR Description: mevalonate kinase [Mus musculus]
  misc_feature (1)..(195): Homolog of NCBI NO: 33303805 NR Description: mevalonate kinase [synthetic construct]
  misc_feature (1)..(195): Homolog of NCBI NO: 4557769 NR Description: mevalonate kinase [Homo sapiens]
  misc_feature (1)..(195): Homolog of NCBI NO: 450346 NR Description: ORF for viral-cellular fusion transcript
  misc_feature (1)..(195): Homolog of NCBI NO: 13592007 NR Description: mevalonate kinase [Rattus norvegicus]
  misc_feature (1)..(196): Homolog of NCBI NO: 5578718 NR Description: mevalonate kinase [Arabidopsis thaliana]
  misc_feature (1)..(196): Homolog of NCBI NO: 15240936 NR Description: mevalonate kinase [Arabidopsis thaliana]
  misc_feature (1)..(199): Homolog of NCBI NO: 16417946 NR Description: mevalonate kinase [Hevea brasiliensis]
  misc_feature (1)..(196): Homolog of NCBI NO: 37532842 NR Description: putative mevalonate kinase
MSGALLTAAGAVSVGACMGAEGWEVLEKGALELVNQWAFQGEKIIHGKPSGIDNSVSTFGKMIKFKKGELTNLESWNPVKMLITDTRVGRNTKALVAGVSERASRHPDAMASVFHAVNSISEELSSIVELAAEDEIAITSKEDKLAELMEMNQGLLQCMGVSHSSIETVLRTTLKYSLVSKLTGAGGGGCVLTLIPDVIGQYCSGESHHRSRISRLSLLQS

SEQ ID NO: 3284 - DNA, 1565 bp, Zea mays subsp. mays
  misc_feature (1)..(1565): Ceres Seq. ID no. 12356044
  misc_feature: MA Experiment ID: 108504 Result: Up-regulated in Transcription
  misc_feature: MA Experiment 108504 PARAMETER Experiment Name: Zm_Drought_P Parameter: Age (day) Value: 8
  misc_feature: MA Experiment 108504 PARAMETER Experiment Name: Zm_Drought_P Parameter: Organism Value: Zea mays
  misc_feature: MA Experiment 108504 PARAMETER Experiment Name: Zm_Drought_P Parameter: Plant Line Value: 35A19
  misc_feature: MA Experiment 108504 PARAMETER Experiment Name: Zm_Drought_P Parameter: Timepoint (hr) Value: 12
  misc_feature: MA Experiment 108504 PARAMETER Experiment Name: Zm_Drought_P Parameter: Tissue Value: Aerial
  misc_feature: MA Experiment 108504 PARAMETER Experiment Name: Zm_Drought_P Parameter: Treatment Value: Drought vs. No Drought
  misc_feature: MA Experiment ID: 108528 Result: Up-regulated in Transcription
  misc_feature: MA Experiment 108528 PARAMETER Experiment Name: Zm_Imbibed_Seeds_P Parameter: Age (day) Value: 5 vs. 2
  misc_feature: MA Experiment 108528 PARAMETER Experiment Name: Zm_Imbibed_Seeds_P Parameter: Organism Value: Zea mays
  misc_feature: MA Experiment 108528 PARAMETER Experiment Name: Zm_Imbibed_Seeds_P Parameter: Plant Line Value: 35A19
  misc_feature: MA Experiment 108528 PARAMETER Experiment Name: Zm_Imbibed_Seeds_P Parameter: Tissue Value: Aerial vs. Embryo
  misc_feature: MA Experiment ID: 108530 Result: Up-regulated in Transcription
  misc_feature: MA Experiment 108530 PARAMETER Experiment Name: Zm_Imbibed_Seeds_P Parameter: Age (day) Value: 6 vs. 2
  misc_feature: MA Experiment 108530 PARAMETER Experiment Name: Zm_Imbibed_Seeds_P Parameter: Organism Value: Zea mays
  misc_feature: MA Experiment 108530 PARAMETER Experiment Name: Zm_Imbibed_Seeds_P Parameter: Plant Line Value: 35A19
  misc_feature: MA Experiment 108530 PARAMETER Experiment Name: Zm_Imbibed_Seeds_P Parameter: Tissue Value: Aerial vs. Embryo
  misc_feature: MA Experiment ID: 108547 Result: Up-regulated in Transcription
  misc_feature: MA Experiment 108547 PARAMETER Experiment Name: Zm_Imbibed_Seeds_P Parameter: Age (day) Value: 4 vs. 2
  misc_feature: MA Experiment 108547 PARAMETER Experiment Name: Zm_Imbibed_Seeds_P Parameter: Organism Value: Zea mays
  misc_feature: MA Experiment 108547 PARAMETER Experiment Name: Zm_Imbibed_Seeds_P Parameter: Plant Line Value: 35A19
  misc_feature: MA Experiment 108547 PARAMETER Experiment Name: Zm_Imbibed_Seeds_P Parameter: Tissue Value: Aerial vs. Embryo
  misc_feature: MA Experiment ID: 20000477 Result: Up-regulated in Transcription
  misc_feature: MA Experiment 20000477 PARAMETER Experiment Name: Zm_5mM_SA_P Parameter: Age (day) Value: 10
  misc_feature: MA Experiment 20000477 PARAMETER Experiment Name: Zm_5mM_SA_P Parameter: Organism Value: Zea mays
  misc_feature: MA Experiment 20000477 PARAMETER Experiment Name: Zm_5mM_SA_P Parameter: Plant Line Value: 35A19
  misc_feature: MA Experiment 20000477 PARAMETER Experiment Name: Zm_5mM_SA_P Parameter: Timepoint (hr) Value: 48
  misc_feature: MA Experiment 20000477 PARAMETER Experiment Name: Zm_5mM_SA_P Parameter: Tissue Value: Aerial
  misc_feature: MA Experiment 20000477 PARAMETER Experiment Name: Zm_5mM_SA_P Parameter: Treatment Value: 5mM SA vs. No Treatment
  misc_feature: MA Experiment ID: 20001608 Result: Down-regulated in Transcription
  misc_feature: MA Experiment 20001608 PARAMETER Experiment Name: Zm_50ppm_KNO3_L-to-H_P Parameter: Age (day) Value: 21
  misc_feature: MA Experiment 20001608 PARAMETER Experiment Name: Zm_50ppm_KNO3_L-to-H_P Parameter: Organism Value: Zea mays
  misc_feature: MA Experiment 20001608 PARAMETER Experiment Name: Zm_50ppm_KNO3_L-to-H_P Parameter: Plant Line Value: 35A19
  misc_feature: MA Experiment 20001608 PARAMETER Experiment Name: Zm_50ppm_KNO3_L-to-H_P Parameter: Timepoint (hr) Value: 48
  misc_feature: MA Experiment 20001608 PARAMETER Experiment Name: Zm_50ppm_KNO3_L-to-H_P Parameter: Tissue Value: Shoots
  misc_feature: MA Experiment 20001608 PARAMETER Experiment Name: Zm_50ppm_KNO3_L-to-H_P Parameter: Treatment Value: 50ppm KNO3 vs. 50ppm KCl
gccgcaacgaattcccagtctccagccaaccaccgcagacaagatcctctcttccgcgtccccaaaccctcgagttcgcacgggctccggccagattcgcgcagtctaagcttcgaatcggcgcatggaggcggcagcagtagccgcggcgctcaggtcgcctaccgccaccaccgccgccgccgccgctggccccacgtggcggcccgctgccccgggcgccgcctcgctcgcctttgaccggagacgcagcttcgccttcggctccgtcaagggtctcgggcggcagcagcagctcacctctaggtctactaggaggcgaagcagtgtggtcagggcatcctggtccccctcggagtctctgccaccgtcctcgccgatcgcgcctctcaggatggaatcgccggcggggcagctactctcgcaaatcctgcacacgcacccgcacttgctgtctgccgctgccgagcagcagctcgagcagctccagactgaccgcgaggccgacaaggagaaggataaggagagcgatgctggcgacaagctggctccgacaggtggcaacctcgtgctgtacaggcggattgctgaagtaaaagagaaggaacggagaaggactttggaggagatactctatgctctggttgttcagaagttcgttgaagctggtgtctctctggttccagcactctcacgctccaccgatccttctggaagagttgatcagtgggcagaaactgtggaagaaaatcttcaacgtctgcactcgcacgaggcctatgaaatgatcgagaatcacctcaccctcattctggggcagcgtcaaggtgacgccactatcgcagccataagtaagctccgtgttggccaggtctatgctgcatctgtgatgtacggttatttcctgaagagagttgaccagaggttccagctcgagaagacaatgaagggcctcccttggggatcagaagaggaagacagcgctttgaatcaagttatgatgaccgacttgatgccttcagctcagacttctagctctcatccagagatgggctcgtggaccgcgcctgccttcagcacaggagggcccagccaatctatcaagccttgccgccttaggtcgtatgtcatgtcgtttgattccgatacgctccagaggtatgcgacagtcaggtcaaaggaggccttcggcatcattgagaagcacacggaagcgctatttgggaagccagagattgtgatcacacctgaaggcacccttgattcttccaaggatgagcatattaggataagctttgctgggctgagaaggctgatcctggaggctgttaccttcggatcgttcctctgggacgttgagagctttgtggattcccggtaccatttcgtgaccagctaagatggtcatcctaagtgaagaacgattcatggtttacggatcttgtctcacaatgtctatgggcttcggaaaggctgttgtacaatgatgttagactgttaccactccccttaggccatgtttttcaccgttaatatatgtgaattggatggtattgagttgattt

SEQ ID NO: 3285 - protein, 424 aa, Zea mays subsp. mays
  peptide (1)..(424): Ceres Seq. ID no. 12356045
  misc_feature (21)..(422): Pfam Name: Protein of unknown function (DUF760) Pfam Description: Protein of unknown function (DUF760)
  misc_feature (316)..(419): Homolog of NCBI NO: 18397912 NR Description: expressed protein
  misc_feature (61)..(277): Homolog of NCBI NO: 18397912 NR Description: expressed protein
  misc_feature (1)..(299): Homolog of NCBI NO: 32489097 NR Description: OSJNBa0093F12.3 [Oryza sativa (japonica
  misc_feature (134)..(424): Homolog of NCBI NO: 32489097 NR Description: OSJNBa0093F12.3 [Oryza sativa (japonica
  misc_feature (30)..(422): Homolog of NCBI NO: 18398302 NR Description: expressed protein
  misc_feature (165)..(422): Homolog of NCBI NO: 13561930 NR Description: unknown [Brassica napus]
  misc_feature (5)..(422): Homolog of NCBI NO: 15221185 NR Description: unknown protein
  misc_feature (21)..(422): Homolog of NCBI NO: 17064820 NR Description: Unknown protein [Arabidopsis thaliana]
  misc_feature (21)..(422): Homolog of NCBI NO: 18401645 NR Description: expressed protein
  misc_feature (1)..(424): Homolog of NCBI NO: 28301943 NR Description: unknown protein [Oryza sativa (japonica
MEAAAVAAALRSPTATTAAAAAGPTWRPAAPGAASLAFDRRRSFAFGSVKGLGRQQQLTSRSTRRRSSVVRASWSPSESLPPSSPIAPLRMESPAGQLLSQILHTHPHLLSAAAEQQLEQLQTDREADKEKDKESDAGDKLAPTGGNLVLYRRIAEVKEKERRRTLEEILYALVVQKFVEAGVSLVPALSRSTDPSGRVDQWAETVEENLQRLHSHEAYEMIENHLTLILGQRQGDATIAAISKLRVGQVYAASVMYGYFLKRVDQRFQLEKTMKGLPWGSEEEDSALNQVMMTDLMPSAQTSSSHPEMGSWTAPAFSTGGPSQSIKPCRLRSYVMSFDSDTLQRYATVRSKEAFGIIEKHTEALFGKPEIVITPEGTLDSSKDEHIRISFAGLRRLILEAVTFGSFLWDVESFVDSRYHFVTS

SEQ ID NO: 3286 - protein, 334 aa, Zea mays subsp. mays
  peptide (1)..(334): Ceres Seq. ID no. 12356046
  misc_feature (1)..(332): Pfam Name: Protein of unknown function (DUF760) Pfam Description: Protein of unknown function (DUF760)
  misc_feature (226)..(329): Homolog of NCBI NO: 18397912 NR Description: expressed protein
  misc_feature (1)..(187): Homolog of NCBI NO: 18397912 NR Description: expressed protein
  misc_feature (1)..(209): Homolog of NCBI NO: 32489097 NR Description: OSJNBa0093F12.3 [Oryza sativa (japonica
  misc_feature (44)..(334): Homolog of NCBI NO: 32489097 NR Description: OSJNBa0093F12.3 [Oryza sativa (japonica
  misc_feature (1)..(332): Homolog of NCBI NO: 18398302 NR Description: expressed protein
  misc_feature (75)..(332): Homolog of NCBI NO: 13561930 NR Description: unknown [Brassica napus]
  misc_feature (1)..(332): Homolog of NCBI NO: 15221185 NR Description: unknown protein
  misc_feature (1)..(332): Homolog of NCBI NO: 17064820 NR Description: Unknown protein [Arabidopsis thaliana]
  misc_feature (1)..(332): Homolog of NCBI NO: 18401645 NR Description: expressed protein
  misc_feature (1)..(334): Homolog of NCBI NO: 28301943 NR Description: unknown protein [Oryza sativa (japonica
MESPAGQLLSQILHTHPHLLSAAAEQQLEQLQTDREADKEKDKESDAGDKLAPTGGNLVLYRRIAEVKEKERRRTLEEILYALVVQKFVEAGVSLVPALSRSTDPSGRVDQWAETVEENLQRLHSHEAYEMIENHLTLILGQRQGDATIAAISKLRVGQVYAASVMYGYFLKRVDQRFQLEKTMKGLPWGSEEEDSALNQVMMTDLMPSAQTSSSHPEMGSWTAPAFSTGGPSQSIKPCRLRSYVMSFDSDTLQRYATVRSKEAFGIIEKHTEALFGKPEIVITPEGTLDSSKDEHIRISFAGLRRLILEAVTFGSFLWDVESFVDSRYHFVTS

SEQ ID NO: 3287 - DNA, 1446 bp, Zea mays subsp. mays
  misc_feature (1)..(1446): Ceres Seq. ID no. 12407308
  misc_feature: MA Experiment ID: 108522 Result: Down-regulated in Transcription
  misc_feature: MA Experiment 108522 PARAMETER Experiment Name: Zm_42deg_Heat_P Parameter: Age (day) Value: 8
  misc_feature: MA Experiment 108522 PARAMETER Experiment Name: Zm_42deg_Heat_P Parameter: Organism Value: Zea mays
  misc_feature: MA Experiment 108522 PARAMETER Experiment Name: Zm_42deg_Heat_P Parameter: Plant Line Value: 35A19
  misc_feature: MA Experiment 108522 PARAMETER Experiment Name: Zm_42deg_Heat_P Parameter: Temperature (deg C) Value: 42 vs. 22
  misc_feature: MA Experiment 108522 PARAMETER Experiment Name: Zm_42deg_Heat_P Parameter: Timepoint (hr) Value: 1
  misc_feature: MA Experiment 108522 PARAMETER Experiment Name: Zm_42deg_Heat_P Parameter: Tissue Value: Aerial
  misc_feature: MA Experiment ID: 108534 Result: Up-regulated in Transcription
  misc_feature: MA Experiment 108534 PARAMETER Experiment Name: Zm_4deg_Cold_P Parameter: Age (hr) Value: 8
  misc_feature: MA Experiment 108534 PARAMETER Experiment Name: Zm_4deg_Cold_P Parameter: Organism Value: Zea mays
  misc_feature: MA Experiment 108534 PARAMETER Experiment Name: Zm_4deg_Cold_P Parameter: Plant Line Value: 35A19
  misc_feature: MA Experiment 108534 PARAMETER Experiment Name: Zm_4deg_Cold_P Parameter: Temperature (deg C) Value: 4 vs. 22
  misc_feature: MA Experiment 108534 PARAMETER Experiment Name: Zm_4deg_Cold_P Parameter: Timepoint (hr) Value: 6
  misc_feature: MA Experiment 108534 PARAMETER Experiment Name: Zm_4deg_Cold_P Parameter: Tissue Value: Aerial
  misc_feature: MA Experiment ID: 20000492 Result: Up-regulated in Transcription
  misc_feature: MA Experiment 20000492 PARAMETER Experiment Name: Zm_Hybrid_Seed_Dev_P Parameter: DAP Value: 12
  misc_feature: MA Experiment 20000492 PARAMETER Experiment Name: Zm_Hybrid_Seed_Dev_P Parameter: Organism Value: Zea mays
  misc_feature: MA Experiment 20000492 PARAMETER Experiment Name: Zm_Hybrid_Seed_Dev_P Parameter: Plant Line Value: 35A19
  misc_feature: MA Experiment 20000492 PARAMETER Experiment Name: Zm_Hybrid_Seed_Dev_P Parameter: Tissue Value: Fert Kernel vs. Unfert Floret
  misc_feature: MA Experiment ID: 20000626 Result: Down-regulated in Transcription
  misc_feature: MA Experiment 20000626 PARAMETER Experiment Name: Zm_Herbicide-Treatments_P Parameter: Timepoint (hr) Value: 12
  misc_feature: MA Experiment 20000626 PARAMETER Experiment Name: Zm_Herbicide-Treatments_P Parameter: Tissue Value: Aerial
  misc_feature: MA Experiment 20000626 PARAMETER Experiment Name: Zm_Herbicide-Treatments_P Parameter: Treatment Value: Roundup vs. No Treatment
  misc_feature: MA Experiment ID: 20000629 Result: Down-regulated in Transcription
  misc_feature: MA Experiment 20000629 PARAMETER Experiment Name: Zm_Herbicide-Treatments_P Parameter: Timepoint (hr) Value: 12
  misc_feature: MA Experiment 20000629 PARAMETER Experiment Name: Zm_Herbicide-Treatments_P Parameter: Tissue Value: Aerial
  misc_feature: MA Experiment 20000629 PARAMETER Experiment Name: Zm_Herbicide-Treatments_P Parameter: Treatment Value: Trimec vs. No Treatment
ctttattttgcgaggagggggcacaacatctcagacctccagtcttcgagtcctcgttgtgcctctcttgatctcctcgcgtccatggctcctgtgcgaggtgccaagaagaggaagcggccggagaagcccgccccggcgcctactccagggttgccgctgccgccgctgccggacggtagcgattggtggggcgtcttctaccgaagggttgcaggacattccccttttccaagagaacaccagaacatggagtctgtcctgaagatgtcaagaagaaccttcgactacatctgctcacttgttaagaaggacctgacaacaaagacatacggtttcagaaacttcaggtttggtgacaagaaagtccttggggtggaggatcaggtggcggtggctctgatgaggctgactactggtgagtcgctgcagaacataggaatgtggtttggcatgaaccactctgccatctcgaacatcacatggcggttcatcgagtccgtggaggagcgtgccatctgccacctgaaatggccgagccctgaggagatggcgaccatcaagacaaggtttgacaaggtttacgggctccctaactgctgcggcgccattgacaccacacacatcctcatgtgttcctcggctcagcccaacagcaaggtctggctggacaatgagaacaaaaacagcatggtgctgcaggccgttgtggatgcagacttgcggttcagagacgtcgtcagtggctggcctgggagcatggacgacacgtgcatccttcgcacttcaggcctgtacaggttgtgtgagaagggcctcaggcttggggggcagatggagcttcccggaggttccgcggttagggagtacctagtcggagatgcaagctacccgctacttccctggctcatgaccccgtaccgggaacatggcctccaggcggccaaggtggaattcaacaagcggcacacggccgcggcggcggtggtgcagaccgcattggcgacgctcaaagggaggtggcgtgtcattcagggagagctgtggaggcctgacaaacaccggctgccacggatcatctttgtctgctgcttgataaccaacatcatcatcgacatggaagggactccaagcagagacgaactggtttcaggcaaccatgaccttggctacaagcagcagttcagtgacgccgcagatgacaatgcaatcaagcagagagacgacctgtctcgacatgtcgacaatgcaatcaagcggagagacgatctgtctcaccatgtcaccgccggcgagtaaacactcaccgtcaccctttgctttttgcacccattaatataaaaaacagggatacaaaattgtaaggtgaatttttagcagattccaataatgttttggtttcagggagacattaccatcttaaacaaagtgtagccctaatttgcc

SEQ ID NO: 3288 - protein, 432 aa, Zea mays subsp. mays
  peptide (1)..(432): Ceres Seq. ID no. 12407309
  misc_feature (61)..(369): Homolog of NCBI NO: 21592524 NR Description: unknown [Arabidopsis thaliana]
  misc_feature (74)..(382): Homolog of NCBI NO: 21902022 NR Description: B1097D05.23 [Oryza sativa (japonica
  misc_feature (88)..(386): Homolog of NCBI NO: 31207419 NR Description: ENSANGP00000015380 [Anopheles gambiae]
  misc_feature (77)..(414): Homolog of NCBI NO: 15239835 NR Description: putative protein
  misc_feature (29)..(160): Homolog of NCBI NO: 11357482 NR Description: hypothetical protein F16M2.120 - Arabidopsis
  misc_feature (145)..(414): Homolog of NCBI NO: 11357482 NR Description: hypothetical protein F16M2.120 - Arabidopsis
  misc_feature (29)..(414): Homolog of NCBI NO: 18412695 NR Description: putative protein
  misc_feature (29)..(414): Homolog of NCBI NO: 25553597 NR Description: OJ1656_E11.28 [Oryza sativa (japonica
  misc_feature (62)..(411): Homolog of NCBI NO: 15233248 NR Description: putative protein
  misc_feature (29)..(414): Homolog of NCBI NO: 34908114 NR Description: P0031D11.14 [Oryza sativa (japonica
LYFARRGHNISDLQSSSPRCASLDLLASMAPVRGAKKRKRPEKPAPAPTPGLPLPPLPDGSDWWGVFYRRVAGHSPFPREHQNMESVLKMSRRTFDYICSLVKKDLTTKTYGFRNFRFGDKKVLGVEDQVAVALMRLTTGESLQNIGMWFGMNHSAISNITWRFIESVEERAICHLKWPSPEEMATIKTRFDKVYGLPNCCGAIDTTHILMCSSAQPNSKVWLDNENKNSMVLQAVVDADLRFRDVVSGWPGSMDDTCILRTSGLYRLCEKGLRLGGQMELPGGSAVREYLVGDASYPLLPWLMTPYREHGLQAAKVEFNKRHTAAAAVVQTALATLKGRWRVIQGELWRPDKHRLPRIIFVCCLITNIIIDMEGTPSRDELVSGNHDLGYKQQFSDAADDNAIKQRDDLSRHVDNAIKRRDDLSHHVTAGE

SEQ ID NO: 3289 - protein, 404 aa, Zea mays subsp. mays
  peptide (1)..(404): Ceres Seq. ID no. 12407310
  misc_feature (33)..(341): Homolog of NCBI NO: 21592524 NR Description: unknown [Arabidopsis thaliana]
  misc_feature (46)..(354): Homolog of NCBI NO: 21902022 NR Description: B1097D05.23 [Oryza sativa (japonica
  misc_feature (60)..(358): Homolog of NCBI NO: 31207419 NR Description: ENSANGP00000015380 [Anopheles gambiae]
  misc_feature (49)..(386): Homolog of NCBI NO: 15239835 NR Description: putative protein
  misc_feature (1)..(132): Homolog of NCBI NO: 11357482 NR Description: hypothetical protein F16M2.120 - Arabidopsis
  misc_feature (117)..(386): Homolog of NCBI NO: 11357482 NR Description: hypothetical protein F16M2.120 - Arabidopsis
  misc_feature (1)..(386): Homolog of NCBI NO: 18412695 NR Description: putative protein
  misc_feature (1)..(386): Homolog of NCBI NO: 25553597 NR Description: OJ1656_E11.28 [Oryza sativa (japonica
  misc_feature (34)..(383): Homolog of NCBI NO: 15233248 NR Description: putative protein
  misc_feature (1)..(386): Homolog of NCBI NO: 34908114 NR Description: P0031D11.14 [Oryza sativa (japonica
MAPVRGAKKRKRPEKPAPAPTPGLPLPPLPDGSDWWGVFYRRVAGHSPFPREHQNMESVLKMSRRTFDYICSLVKKDLTTKTYGFRNFRFGDKKVLGVEDQVAVALMRLTTGESLQNIGMWFGMNHSAISNITWRFIESVEERAICHLKWPSPEEMATIKTRFDKVYGLPNCCGAIDTTHILMCSSAQPNSKVWLDNENKNSMVLQAVVDADLRFRDVVSGWPGSMDDTCILRTSGLYRLCEKGLRLGGQMELPGGSAVREYLVGDASYPLLPWLMTPYREHGLQAAKVEFNKRHTAAAAVVQTALATLKGRWRVIQGELWRPDKHRLPRIIFVCCLITNIIIDMEGTPSRDELVSGNHDLGYKQQFSDAADDNAIKQRDDLSRHVDNAIKRRDDLSHHVTAGE

SEQ ID NO: 3290 - protein, 349 aa, Zea mays subsp. mays
  peptide (1)..(349): Ceres Seq. ID no. 12407311
  misc_feature (1)..(331): Homolog of NCBI NO: 25553597 NR Description: OJ1656_E11.28 [Oryza sativa (japonica
  misc_feature (1)..(328): Homolog of NCBI NO: 15233248 NR Description: putative protein
  misc_feature (1)..(331): Homolog of NCBI NO: 34908114 NR Description: P0031D11.14 [Oryza sativa (japonica
  misc_feature (1)..(286): Homolog of NCBI NO: 21592524 NR Description: unknown [Arabidopsis thaliana]
  misc_feature (1)..(299): Homolog of NCBI NO: 21902022 NR Description: B1097D05.23 [Oryza sativa (japonica
  misc_feature (5)..(303): Homolog of NCBI NO: 31207419 NR Description: ENSANGP00000015380 [Anopheles gambiae]
  misc_feature (1)..(331): Homolog of NCBI NO: 15239835 NR Description: putative protein
  misc_feature (1)..(77): Homolog of NCBI NO: 11357482 NR Description: hypothetical protein F16M2.120 - Arabidopsis
  misc_feature (62)..(331): Homolog of NCBI NO: 11357482 NR Description: hypothetical protein F16M2.120 - Arabidopsis
  misc_feature (1)..(331): Homolog of NCBI NO: 18412695 NR Description: putative protein
MESVLKMSRRTFDYICSLVKKDLTTKTYGFRNFRFGDKKVLGVEDQVAVALMRLTTGESLQNIGMWFGMNHSAISNITWRFIESVEERAICHLKWPSPEEMATIKTRFDKVYGLPNCCGAIDTTHILMCSSAQPNSKVWLDNENKNSMVLQAVVDADLRFRDVVSGWPGSMDDTCILRTSGLYRLCEKGLRLGGQMELPGGSAVREYLVGDASYPLLPWLMTPYREHGLQAAKVEFNKRHTAAAAVVQTALATLKGRWRVIQGELWRPDKHRLPRIIFVCCLITNIIIDMEGTPSRDELVSGNHDLGYKQQFSDAADDNAIKQRDDLSRHVDNAIKRRDDLSHHVTAGE

SEQ ID NO: 3291 - DNA, 1331 bp, Zea mays subsp. mays
  misc_feature (1)..(1331): Ceres Seq. ID no. 12352196
  misc_feature: MA Experiment ID: 108529 Result: Up-regulated in Transcription
  misc_feature: MA Experiment 108529 PARAMETER Experiment Name: Zm_Imbibed_Seeds_P Parameter: Age (day) Value: 5 vs. 2
  misc_feature: MA Experiment 108529 PARAMETER Experiment Name: Zm_Imbibed_Seeds_P Parameter: Organism Value: Zea mays
  misc_feature: MA Experiment 108529 PARAMETER Experiment Name: Zm_Imbibed_Seeds_P Parameter: Plant Line Value: 35A19
  misc_feature: MA Experiment 108529 PARAMETER Experiment Name: Zm_Imbibed_Seeds_P Parameter: Tissue Value: Roots vs. Embryo
  misc_feature: MA Experiment ID: 108535 Result: Down-regulated in Transcription
  misc_feature: MA Experiment 108535 PARAMETER Experiment Name: Zm_Meristem_P Parameter: Age (day) Value: 8
  misc_feature: MA Experiment 108535 PARAMETER Experiment Name: Zm_Meristem_P Parameter: Organism Value: Zea mays
  misc_feature: MA Experiment 108535 PARAMETER Experiment Name: Zm_Meristem_P Parameter: Plant Line Value: 35A19
  misc_feature: MA Experiment 108535 PARAMETER Experiment Name: Zm_Meristem_P Parameter: Tissue Value: Root Meristem vs. Above Root Meristem
  misc_feature: MA Experiment ID: 108543 Result: Up-regulated in Transcription
  misc_feature: MA Experiment ID: 108544 Result: Up-regulated in Transcription
  misc_feature: MA Experiment ID: 20000108 Result: Down-regulated in Transcription
  misc_feature: MA Experiment 20000108 PARAMETER Experiment Name: Zm_Root-Tips_P Parameter: Age (day) Value: 12
  misc_feature: MA Experiment 20000108 PARAMETER Experiment Name: Zm_Root-Tips_P Parameter: Organism Value: Zea mays
  misc_feature: MA Experiment 20000108 PARAMETER Experiment Name: Zm_Root-Tips_P Parameter: Tissue Value: Root tips vs. Root mid region    35
  misc_feature: MA Experiment 20000108 PARAMETER Experiment Name: Zm_Root-Tips_P Parameter: Tissue Value: Root tips vs. Root mid region   Sequence Listing-Misc Features (4)
aaaaaggggaagttctcgccagcgtgctgccttgcaagctgctaactagaataggaattcgacgtcgcccccgcccccccctgtgaaaattcgtgatgcggagaacagctaccgccgccctcgtcctcgtccccctcctcgctgcggcggtacagacctccgccctgcctttcatcgtcctgcacgggattggggaccagtgcgccaaccatggcgttgccaagttcactaaacttctcgccgattggtccggctccgacggctactgcctagagattggcagaggaacatgggactcttgggtcatgcctcttcaacaacaggctgatataatctgcaacaaggtcaaggaaatgaaacaactgagaggtggctacaacatagttggtctgtctcaggggaacttgattggtcgagcagtggttgagtactgtgatgatggaccgccggtcaagaatttcatctctctaggaggtcctcatgctggtaccgcttcagtgcctctttgtggttctggatttttttgcattattgttgatgctctgatcaaattggagatctactcagactatgtgcaggaacatcttgcacctagtggctacctcaaaatcccaactgatatggcagattatctgaagagttgtaggtttcttccaaaacttaacaatgaaattccagataaaagaaatgccacctacaaggaaagattcagtagcttagagaatttggttctgattatgtttcaggatgatgcagtcctgataccacgagaaacggcatggtttggttactaccctgatggagcctttgatccagttctaccacctcagaagacgaaactgtatgaggaagactggattggtttgaagacactggatgaagcagggcgggtgaagtttgtgtctgtgccgggaggtcatcttggtatctccaaaggtgacatgaagaagtacattgtgccttacctgacaaacaaaaaggcatcggtgacggtttctgatttgctagttgccatttggcacgctgtgcttgggctggcactggcagagggtgatgacgctgttttgatttgatgcatgggcttccgacagtggcttggattgttacgctgcctctgcttggttggcttggcactcagtcacaaataagattcatctcatctcatattctgttctgttggaaggccctttgattcatggtcacagaaataacagaatgcatgcatgcatgcatccaactagctagctagcttatagtcggagacaatctgtgcggtgcagctagttaattatctatctatacagggcaggcccatgccatgagtattgttg

SEQ ID NO: 3292 - protein, 325 aa, Zea mays subsp. mays
  peptide (1)..(325): Ceres Seq. ID no. 12352197
  misc_feature (22)..(273): Pfam Name: Palmitoyl protein thioesterase Pfam Description: Palmitoyl protein thioesterase
  misc_feature (6)..(294): Homolog of NCBI NO: 15236077 NR Description: putative protein; protein id: At4g17470.1
  misc_feature (6)..(303): Homolog of NCBI NO: 21554369 NR Description: palmitoyl-protein thioesterase precursor-like
  misc_feature (6)..(303): Homolog of NCBI NO: 15236078 NR Description: putative protein
  misc_feature (2)..(291): Homolog of NCBI NO: 15236079 NR Description: putative protein; protein id: At4g17483.1
  misc_feature (1)..(298): Homolog of NCBI NO: 28393539 NR Description: putative palmitoyl-protein thioesterase precursor
  misc_feature (1)..(298): Homolog of NCBI NO: 15238063 NR Description: palmitoyl-protein thioesterase precursor-like
  misc_feature (8)..(306): Homolog of NCBI NO: 21593393 NR Description: palmitoyl-protein thioesterase precursor-like
  misc_feature (8)..(306): Homolog of NCBI NO: 14334718 NR Description: putative palmitoyl-protein thioesterase precursor
  misc_feature (8)..(306): Homolog of NCBI NO: 15232301 NR Description: palmitoyl-protein thioesterase precursor - like
  misc_feature (1)..(273): Homolog of NCBI NO: 37536884 NR Description: putative palmitoyl-protein thioesterase
MRRTATAALVLVPLLAAAVQTSALPFIVLHGIGDQCANHGVAKFTKLLADWSGSDGYCLEIGRGTWDSWVMPLQQQADIICNKVKEMKQLRGGYNIVGLSQGNLIGRAVVEYCDDGPPVKNFISLGGPHAGTASVPLCGSGFFCIIVDALIKLEIYSDYVQEHLAPSGYLKIPTDMADYLKSCRFLPKLNNEIPDKRNATYKERFSSLENLVLIMFQDDAVLIPRETAWFGYYPDGAFDPVLPPQKTKLYEEDWIGLKTLDEAGRVKFVSVPGGHLGISKGDMKKYIVPYLTNKKASVTVSDLLVAIWHAVLGLALAEGDDAVLI

SEQ ID NO: 3293 - protein, 255 aa, Zea mays subsp. mays
  peptide (1)..(255): Ceres Seq. ID no. 12352198
  misc_feature (1)..(203): Pfam Name: Palmitoyl protein thioesterase Pfam Description: Palmitoyl protein thioesterase
  misc_feature (1)..(224): Homolog of NCBI NO: 15236077 NR Description: putative protein; protein id: At4g17470.1
  misc_feature (1)..(233): Homolog of NCBI NO: 21554369 NR Description: palmitoyl-protein thioesterase precursor-like
  misc_feature (1)..(233): Homolog of NCBI NO: 15236078 NR Description: putative protein
  misc_feature (1)..(221): Homolog of NCBI NO: 15236079 NR Description: putative protein; protein id: At4g17483.1
  misc_feature (1)..(228): Homolog of NCBI NO: 28393539 NR Description: putative palmitoyl-protein thioesterase precursor
  misc_feature (1)..(228): Homolog of NCBI NO: 15238063 NR Description: palmitoyl-protein thioesterase precursor-like
  misc_feature (1)..(236): Homolog of NCBI NO: 21593393 NR Description: palmitoyl-protein thioesterase precursor-like
  misc_feature (1)..(236): Homolog of NCBI NO: 14334718 NR Description: putative palmitoyl-protein thioesterase precursor
  misc_feature (1)..(236): Homolog of NCBI NO: 15232301 NR Description: palmitoyl-protein thioesterase precursor - like
  misc_feature (1)..(203): Homolog of NCBI NO: 37536884 NR Description: putative palmitoyl-protein thioesterase
MPLQQQADIICNKVKEMKQLRGGYNIVGLSQGNLIGRAVVEYCDDGPPVKNFISLGGPHAGTASVPLCGSGFFCIIVDALIKLEIYSDYVQEHLAPSGYLKIPTDMADYLKSCRFLPKLNNEIPDKRNATYKERFSSLENLVLIMFQDDAVLIPRETAWFGYYPDGAFDPVLPPQKTKLYEEDWIGLKTLDEAGRVKFVSVPGGHLGISKGDMKKYIVPYLTNKKASVTVSDLLVAIWHAVLGLALAEGDDAVLI

SEQ ID NO: 3294 - protein, 239 aa, Zea mays subsp. mays
  peptide (1)..(239): Ceres Seq. ID no. 12352199
  misc_feature (1)..(187): Pfam Name: Palmitoyl protein thioesterase Pfam Description: Palmitoyl protein thioesterase
  misc_feature (1)..(208): Homolog of NCBI NO: 15236077 NR Description: putative protein; protein id: At4g17470.1
  misc_feature (1)..(217): Homolog of NCBI NO: 21554369 NR Description: palmitoyl-protein thioesterase precursor-like
  misc_feature (1)..(217): Homolog of NCBI NO: 15236078 NR Description: putative protein
  misc_feature (1)..(205): Homolog of NCBI NO: 15236079 NR Description: putative protein; protein id: At4g17483.1
  misc_feature (1)..(212): Homolog of NCBI NO: 28393539 NR Description: putative palmitoyl-protein thioesterase precursor
  misc_feature (1)..(212): Homolog of NCBI NO: 15238063 NR Description: palmitoyl-protein thioesterase precursor-like
  misc_feature (1)..(220): Homolog of NCBI NO: 21593393 NR Description: palmitoyl-protein thioesterase precursor-like
  misc_feature (1)..(220): Homolog of NCBI NO: 14334718 NR Description: putative palmitoyl-protein thioesterase precursor
  misc_feature (1)..(220): Homolog of NCBI NO: 15232301 NR Description: palmitoyl-protein thioesterase precursor - like
  misc_feature (1)..(187): Homolog of NCBI NO: 37536884 NR Description: putative palmitoyl-protein thioesterase
MKQLRGGYNIVGLSQGNLIGRAVVEYCDDGPPVKNFISLGGPHAGTASVPLCGSGFFCIIVDALIKLEIYSDYVQEHLAPSGYLKIPTDMADYLKSCRFLPKLNNEIPDKRNATYKERFSSLENLVLIMFQDDAVLIPRETAWFGYYPDGAFDPVLPPQKTKLYEEDWIGLKTLDEAGRVKFVSVPGGHLGISKGDMKKYIVPYLTNKKASVTVSDLLVAIWHAVLGLALAEGDDAVLI

SEQ ID NO: 3295 - DNA, 1030 bp, Zea mays subsp. mays
  misc_feature (1)..(1030): Ceres Seq. ID no. 12361972
  misc_feature: MA Experiment ID: 20000492 Result: Up-regulated in Transcription
  misc_feature: MA Experiment 20000492 PARAMETER Experiment Name: Zm_Hybrid_Seed_Dev_P Parameter: DAP Value: 12
  misc_feature: MA Experiment 20000492 PARAMETER Experiment Name: Zm_Hybrid_Seed_Dev_P Parameter: Organism Value: Zea mays
  misc_feature: MA Experiment 20000492 PARAMETER Experiment Name: Zm_Hybrid_Seed_Dev_P Parameter: Plant Line Value: 35A19
  misc_feature: MA Experiment 20000492 PARAMETER Experiment Name: Zm_Hybrid_Seed_Dev_P Parameter: Tissue Value: Fert Kernel vs. Unfert Floret
cccagattttcccgcgttcgtggtctccactctccagttctccgttccccaaccccaacctagcatccttgcatcccggggctcagttagcgttgccgccgcaccgtactacacctccggtggccggtgcgcccatttcccgccgatcaagcgcgatggcctcgacgagggatctagccatagcttctctctcagctgcgaccggcgccgttgttgccgccgctgcactgcgcctcttgtcttcccgcagaacatcctccgtcagaccccagaacctccccgccgccgctaacggatctgcctccgagcgcccgctggctcagtcccccttcgatcctgtcaagagggaaggatatatttcctgggacgactacttcatggcgatcgccttcctttcggctgagcgatctaaggatcctaaccggcaggttggagcatgcttggttagccaagagggaataatcctaggaattggctacaatggcttccctagaggttgttccgatgacaagcttccttgggcaaagaaatctgcaagtggagatccattagagacaaaattcccctacgttgtccatgctgaggttaatgcaattctaaataccaaccatgcttcagcggctggacagaaattatatgtcaccatgttcccatgcaatgaatgtgccaagattattattcagtcaggcgtatctgaggtcatatatttcgttgaaaaaaagattgacaactcagctcacgtttatgttgcctctcacaagctattgtcgatggctggtgtcaaggtcaggaagcatcagccccagatggcgcaaataccgatccagttccaggagccatgaagccggtactagttccagccttccagaagcactagtgagcgaataaacagtgcaagatacctgttgaccgcggcacctgtgacaaccgacaatggccgacccgcagcggtctcggtatgcggcgtcgatccctctccctccctcagaggctgttgtaaaactatagctagaatgagtaaagtttggcg

SEQ ID NO: 3296 - protein, 279 aa, Zea mays subsp. mays
  peptide (1)..(279): Ceres Seq. ID no. 12361973
  misc_feature (119)..(235): Pfam Name: Cytidine and deoxycytidylate deaminase Pfam Description: Cytidine and deoxycytidylate deaminase
  misc_feature (114)..(279): Homolog of NCBI NO: 30520263 NR Description: RIKEN cDNA 6030466N05 gene [Mus musculus]
  misc_feature (114)..(279): Homolog of NCBI NO: 21619349 NR Description: Similar to dCMP deaminase [Mus musculus]
  misc_feature (114)..(279): Homolog of NCBI NO: 12654885 NR Description: Similar to dCMP deaminase [Homo sapiens]
  misc_feature (114)..(279): Homolog of NCBI NO: 4503277 NR Description: dCMP deaminase [Homo sapiens]
  misc_feature (114)..(279): Homolog of NCBI NO: 23503055 NR Description: Deoxycytidylate deaminase (dCMP deaminase)
  misc_feature (105)..(276): Homolog of NCBI NO: 24667298 NR Description: CG6951-PA [Drosophila melanogaster]
  misc_feature (209)..(264): Homolog of NCBI NO: 15228398 NR Description: putative protein; protein id: At3g48540.1
  misc_feature (54)..(156): Homolog of NCBI NO: 15228398 NR Description: putative protein; protein id: At3g48540.1
  misc_feature (189)..(262): Homolog of NCBI NO: 34909822 NR Description: P0403C05.19 [Oryza sativa (japonica
  misc_feature (52)..(145): Homolog of NCBI NO: 34909822 NR Description: P0403C05.19 [Oryza sativa (japonica
QIFPRSWSPLSSSPFPNPNLASLHPGAQLALPPHRTTPPVAGAPISRRSSAMASTRDLAIASLSAATGAVVAAAALRLLSSRRTSSVRPQNLPAAANGSASERPLAQSPFDPVKREGYISWDDYFMAIAFLSAERSKDPNRQVGACLVSQEGIILGIGYNGFPRGCSDDKLPWAKKSASGDPLETKFPYVVHAEVNAILNTNHASAAGQKLYVTMFPCNECAKIIIQSGVSEVIYFVEKKIDNSAHVYVASHKLLSMAGVKVRKHQPQMAQIPIQFQEP

SEQ ID NO: 3297 - protein, 228 aa, Zea mays subsp. mays
  peptide (1)..(228): Ceres Seq. ID no. 12361974
  misc_feature (68)..(184): Pfam Name: Cytidine and deoxycytidylate deaminase Pfam Description: Cytidine and deoxycytidylate deaminase
  misc_feature (63)..(228): Homolog of NCBI NO: 30520263 NR Description: RIKEN cDNA 6030466N05 gene [Mus musculus]
  misc_feature (63)..(228): Homolog of NCBI NO: 21619349 NR Description: Similar to dCMP deaminase [Mus musculus]
  misc_feature (63)..(228): Homolog of NCBI NO: 12654885 NR Description: Similar to dCMP deaminase [Homo sapiens]
  misc_feature (63)..(228): Homolog of NCBI NO: 4503277 NR Description: dCMP deaminase [Homo sapiens]
  misc_feature (63)..(228): Homolog of NCBI NO: 23503055 NR Description: Deoxycytidylate deaminase (dCMP deaminase)
  misc_feature (54)..(225): Homolog of NCBI NO: 24667298 NR Description: CG6951-PA [Drosophila melanogaster]
  misc_feature (158)..(213): Homolog of NCBI NO: 15228398 NR Description: putative protein; protein id: At3g48540.1
  misc_feature (3)..(105): Homolog of NCBI NO: 15228398 NR Description: putative protein; protein id: At3g48540.1
  misc_feature (138)..(211): Homolog of NCBI NO: 34909822 NR Description: P0403C05.19 [Oryza sativa (japonica
  misc_feature (1)..(94): Homolog of NCBI NO: 34909822 NR Description: P0403C05.19 [Oryza sativa (japonica
MASTRDLAIASLSAATGAVVAAAALRLLSSRRTSSVRPQNLPAAANGSASERPLAQSPFDPVKREGYISWDDYFMAIAFLSAERSKDPNRQVGACLVSQEGIILGIGYNGFPRGCSDDKLPWAKKSASGDPLETKFPYVVHAEVNAILNTNHASAAGQKLYVTMFPCNECAKIIIQSGVSEVIYFVEKKIDNSAHVYVASHKLLSMAGVKVRKHQPQMAQIPIQFQEP

SEQ ID NO: 3298 - protein, 154 aa, Zea mays subsp. mays
  peptide (1)..(154): Ceres Seq. ID no. 12361975
  misc_feature (1)..(110): Pfam Name: Cytidine and deoxycytidylate deaminase Pfam Description: Cytidine and deoxycytidylate deaminase
  misc_feature (1)..(154): Homolog of NCBI NO: 30520263 NR Description: RIKEN cDNA 6030466N05 gene [Mus musculus]
  misc_feature (1)..(154): Homolog of NCBI NO: 21619349 NR Description: Similar to dCMP deaminase [Mus musculus]
  misc_feature (1)..(154): Homolog of NCBI NO: 12654885 NR Description: Similar to dCMP deaminase [Homo sapiens]
  misc_feature (1)..(154): Homolog of NCBI NO: 4503277 NR Description: dCMP deaminase [Homo sapiens]
  misc_feature (1)..(154): Homolog of NCBI NO: 23503055 NR Description: Deoxycytidylate deaminase (dCMP deaminase)
  misc_feature (1)..(151): Homolog of NCBI NO: 24667298 NR Description: CG6951-PA [Drosophila melanogaster]
  misc_feature (84)..(139): Homolog of NCBI NO: 15228398 NR Description: putative protein; protein id: At3g48540.1
  misc_feature (1)..(31): Homolog of NCBI NO: 15228398 NR Description: putative protein; protein id: At3g48540.1
  misc_feature (64)..(137): Homolog of NCBI NO: 34909822 NR Description: P0403C05.19 [Oryza sativa (japonica
  misc_feature (1)..(20): Homolog of NCBI NO: 34909822 NR Description: P0403C05.19 [Oryza sativa (japonica
MAIAFLSAERSKDPNRQVGACLVSQEGIILGIGYNGFPRGCSDDKLPWAKKSASGDPLETKFPYVVHAEVNAILNTNHASAAGQKLYVTMFPCNECAKIIIQSGVSEVIYFVEKKIDNSAHVYVASHKLLSMAGVKVRKHQPQMAQIPIQFQEP

SEQ ID NO: 3299 - DNA, 1628 bp, Zea mays subsp. mays
  misc_feature (1)..(1628): Ceres Seq. ID no. 13498801
  misc_feature: MA Experiment ID: 108504 Result: Down-regulated in Transcription
  misc_feature: MA Experiment 108504 PARAMETER Experiment Name: Zm_Drought_P Parameter: Age (day) Value: 8
  misc_feature: MA Experiment 108504 PARAMETER Experiment Name: Zm_Drought_P Parameter: Organism Value: Zea mays
  misc_feature: MA Experiment 108504 PARAMETER Experiment Name: Zm_Drought_P Parameter: Plant Line Value: 35A19
  misc_feature: MA Experiment 108504 PARAMETER Experiment Name: Zm_Drought_P Parameter: Timepoint (hr) Value: 12
  misc_feature: MA Experiment 108504 PARAMETER Experiment Name: Zm_Drought_P Parameter: Tissue Value: Aerial
  misc_feature: MA Experiment 108504 PARAMETER Experiment Name: Zm_Drought_P Parameter: Treatment Value: Drought vs. No Drought
  misc_feature: MA Experiment ID: 108527 Result: Down-regulated in Transcription
  misc_feature: MA Experiment 108527 PARAMETER Experiment Name: Zm_5mM_NO_P Parameter: Age (day) Value: 8
  misc_feature: MA Experiment 108527 PARAMETER Experiment Name: Zm_5mM_NO_P Parameter: Organism Value: Zea mays
  misc_feature: MA Experiment 108527 PARAMETER Experiment Name: Zm_5mM_NO_P Parameter: Plant Line Value: 35A19
  misc_feature: MA Experiment 108527 PARAMETER Experiment Name: Zm_5mM_NO_P Parameter: Timepoint (hr) Value: 6
  misc_feature: MA Experiment 108527 PARAMETER Experiment Name: Zm_5mM_NO_P Parameter: Tissue Value: Aerial
  misc_feature: MA Experiment 108527 PARAMETER Experiment Name: Zm_5mM_NO_P Parameter: Treatment Value: 5mM NO vs. No Treatment
  misc_feature: MA Experiment ID: 108528 Result: Up-regulated in Transcription
  misc_feature: MA Experiment 108528 PARAMETER Experiment Name: Zm_Imbibed_Seeds_P Parameter: Age (day) Value: 5 vs. 2
  misc_feature: MA Experiment 108528 PARAMETER Experiment Name: Zm_Imbibed_Seeds_P Parameter: Organism Value: Zea mays
  misc_feature: MA Experiment 108528 PARAMETER Experiment Name: Zm_Imbibed_Seeds_P Parameter: Plant Line Value: 35A19
  misc_feature: MA Experiment 108528 PARAMETER Experiment Name: Zm_Imbibed_Seeds_P Parameter: Tissue Value: Aerial vs. Embryo
  misc_feature: MA Experiment ID: 108530 Result: Up-regulated in Transcription
  misc_feature: MA Experiment 108530 PARAMETER Experiment Name: Zm_Imbibed_Seeds_P Parameter: Age (day) Value: 6 vs. 2
  misc_feature: MA Experiment 108530 PARAMETER Experiment Name: Zm_Imbibed_Seeds_P Parameter: Organism Value: Zea mays
  misc_feature: MA Experiment 108530 PARAMETER Experiment Name: Zm_Imbibed_Seeds_P Parameter: Plant Line Value: 35A19
  misc_feature: MA Experiment 108530 PARAMETER Experiment Name: Zm_Imbibed_Seeds_P Parameter: Tissue Value: Aerial vs. Embryo
  misc_feature: MA Experiment ID: 108536 Result: Down-regulated in Transcription
  misc_feature: MA Experiment 108536 PARAMETER Experiment Name: Zm_Meristem_P Parameter: Age (day) Value: 8
  misc_feature: MA Experiment 108536 PARAMETER Experiment Name: Zm_Meristem_P Parameter: Organism Value: Zea mays
  misc_feature: MA Experiment 108536 PARAMETER Experiment Name: Zm_Meristem_P Parameter: Plant Line Value: 35A19
  misc_feature: MA Experiment 108536 PARAMETER Experiment Name: Zm_Meristem_P Parameter: Tissue Value: Shoot Meristem vs. Above Shoot Meristem
  misc_feature: MA Experiment ID: 108540 Result: Down-regulated in Transcription
  misc_feature: MA Experiment 108540 PARAMETER Experiment Name: Zm_20percent_PEG_P Parameter: Age (day) Value: 8
  misc_feature: MA Experiment 108540 PARAMETER Experiment Name: Zm_20percent_PEG_P Parameter: Organism Value: Zea mays
  misc_feature: MA Experiment 108540 PARAMETER Experiment Name: Zm_20percent_PEG_P Parameter: Plant Line Value: 35A19
  misc_feature: MA Experiment 108540 PARAMETER Experiment Name: Zm_20percent_PEG_P Parameter: Timepoint (hr) Value: 6
  misc_feature: MA Experiment 108540 PARAMETER Experiment Name: Zm_20percent_PEG_P Parameter: Tissue Value: Aerial
  misc_feature: MA Experiment 108540 PARAMETER Experiment Name: Zm_20percent_PEG_P Parameter: Treatment Value: 20percent PEG vs. No Treatment
  misc_feature: MA Experiment ID: 108543 Result: Up-regulated in Transcription
  misc_feature: MA Experiment ID: 108545 Result: Up-regulated in Transcription
  misc_feature: MA Experiment 108545 PARAMETER Experiment Name: Zm_Imbibed_Seeds_P Parameter: Age (day) Value: 3 vs. 2
  misc_feature: MA Experiment 108545 PARAMETER Experiment Name: Zm_Imbibed_Seeds_P Parameter: Organism Value: Zea mays
  misc_feature: MA Experiment 108545 PARAMETER Experiment Name: Zm_Imbibed_Seeds_P Parameter: Plant Line Value: 35A19
  misc_feature: MA Experiment 108545 PARAMETER Experiment Name: Zm_Imbibed_Seeds_P Parameter: Tissue Value: Aerial vs. Embryo
  misc_feature: MA Experiment ID: 108547 Result: Up-regulated in Transcription
  misc_feature: MA Experiment 108547 PARAMETER Experiment Name: Zm_Imbibed_Seeds_P Parameter: Age (day) Value: 4 vs. 2
  misc_feature: MA Experiment 108547 PARAMETER Experiment Name: Zm_Imbibed_Seeds_P Parameter: Organism Value: Zea mays
  misc_feature: MA Experiment 108547 PARAMETER Experiment Name: Zm_Imbibed_Seeds_P Parameter: Plant Line Value: 35A19
  misc_feature: MA Experiment 108547 PARAMETER Experiment Name: Zm_Imbibed_Seeds_P Parameter: Tissue Value: Aerial vs. Embryo
  misc_feature: MA Experiment ID: 108556 Result: Down-regulated in Transcription
  misc_feature: MA Experiment 108556 PARAMETER Experiment Name: Zm_Drought_P Parameter: Age (day) Value: 9
  misc_feature: MA Experiment 108556 PARAMETER Experiment Name: Zm_Drought_P Parameter: Organism Value: Zea mays
  misc_feature: MA Experiment 108556 PARAMETER Experiment Name: Zm_Drought_P Parameter: Plant Line Value: 35A19
  misc_feature: MA Experiment 108556 PARAMETER Experiment Name: Zm_Drought_P Parameter: Timepoint (hr) Value: 24
  misc_feature: MA Experiment 108556 PARAMETER Experiment Name: Zm_Drought_P Parameter: Tissue Value: Aerial
  misc_feature: MA Experiment 108556 PARAMETER Experiment Name: Zm_Drought_P Parameter: Treatment Value: Drought vs. No Drought
  misc_feature: MA Experiment ID: 108559 Result: Down-regulated in Transcription
  misc_feature: MA Experiment 108559 PARAMETER Experiment Name: Zm_5mM_NO_P Parameter: Age (day) Value: 8
  misc_feature: MA Experiment 108559 PARAMETER Experiment Name: Zm_5mM_NO_P Parameter: Organism Value: Zea mays
  misc_feature: MA Experiment 108559 PARAMETER Experiment Name: Zm_5mM_NO_P Parameter: Plant Line Value: 35A19
  misc_feature: MA Experiment 108559 PARAMETER Experiment Name: Zm_5mM_NO_P Parameter: Timepoint (hr) Value: 12
  misc_feature: MA Experiment 108559 PARAMETER Experiment Name: Zm_5mM_NO_P Parameter: Tissue Value: Aerial
  misc_feature: MA Experiment 108559 PARAMETER Experiment Name: Zm_5mM_NO_P Parameter: Treatment Value: 5mM NO vs. No Treatment
  misc_feature: MA Experiment ID: 108687 Result: Down-regulated in Transcription
  misc_feature: MA Experiment 108687 PARAMETER Experiment Name: Zm_Embryos-Flowers__P Parameter: Tissue Value: Embryo vs. Aerial+
  misc_feature: MA Experiment ID: 108688 Result: Down-regulated in Transcription
  misc_feature: MA Experiment 108688 PARAMETER Experiment Name: Zm_Embryos-Flowers__P Parameter: Tissue Value: Immature Flowers vs. Aerial+
  misc_feature: MA Experiment ID: 20000480 Result: Down-regulated in Transcription
  misc_feature: MA Experiment 20000480 PARAMETER Experiment Name: Zm_Drought_P Parameter: Age (day) Value: 11
  misc_feature: MA Experiment 20000480 PARAMETER Experiment Name: Zm_Drought_P Parameter: Organism Value: Zea mays
  misc_feature: MA Experiment 20000480 PARAMETER Experiment Name: Zm_Drought_P Parameter: Plant Line Value: 35A19
  misc_feature: MA Experiment 20000480 PARAMETER Experiment Name: Zm_Drought_P Parameter: Timepoint (hr) Value: 72
  misc_feature: MA Experiment 20000480 PARAMETER Experiment Name: Zm_Drought_P Parameter: Tissue Value: Aerial
  misc_feature: MA Experiment 20000480 PARAMETER Experiment Name: Zm_Drought_P Parameter: Treatment Value: Drought vs. No Drought
gcagcagccactcgctctccccacctcgtctctcttccactcatcccctccctcgccccttcgcctcgcctctcttcttcggatcgagcagcagtactgcactgcatgccgccgatacaaatcccatcctctccctcctctactgcacctgcaccacagtagctagctagctatctttgctacggcggctctgtaatctggtccactagcgctccattcgaccccacccacagccatggctgccgtgaccgcggcggccgtctctctgccctcctcctcctcctcccctgccgccgccaaggccaaggcgtccgcgtccgcgtccccgtcgtctccatgcggccacctccagttcccgcggcggcacggcggcccgcgcgcggtgcggctgcgcgtgcaggtgtccaccaccgagaccgcggaggcggagccggtcaagaagctggagaaggtgtccaagaagcaggaggaggggctcgtcaccaacaagtacaagcccaaggagccgtacgtcgggaggtgcctgctcaacaccaggatcaccggcgaccaagcgcccggggagacgtggcacatggtcttcagcacagaaggcgaggtcccctacagagagggccagtccatcggcgtcatcgcggatggcgaggacaagaacggcaagccgcacaagctcaggctctactccatcgccagcagcgccctcggagatttcggcgactccaagacggtgtcgctgtgcgtgaagaggctggtctacaccaacgatcagggggaggtcgtcaaaggagtctgctcgaacttcctctgtgacttgaagccaggcgctgaggtgaagatcacagggccagtgggcaaggagatgctcatgcccaaagaccccaacgcaacaatcatcatgctcgcaacgggtaccggcatcgctccgttccgctccttcttgtggaagatgttcttcgaggagcacgaggactacaagtacaccgggctggcgtggctgttcctgggcgtcccgaccagcgacaccctgctgtacaaggaggagctggagaagatgaaggagatggcgccggacaacttccggctggacttcgcggtgagccgggagcagacgaacgcggccggggagaagatgtacatccagacgcgcatggcggagtacaaggaggagctgtgggagctgctcaagaaggacaacacctacgtctacatgtgcgggctcaagggcatggagaagggcatcgacgacatcatgctcgacctcgcagccaaggacgggatcaactggttggactacaagaagcagctcaagaagagcgagcaatggaacgtcgaagtctactgatgatgatccttcattgtattgttcagctcaagcaatctggtggtgatgagtttgcattgcattgtacgtagtattgcggagatcaatcgaatcgtttggctcgtcgtcattctatcgatgtacatacattatatatgatgaaagacatatataatcgtttctttcaggaatttgttgtctctctgcacgtgaatttgttgcgagaaagaaaggacacacattagccttttctttattagggcaattatgaattatacccttctctgattctgattttacttttttc

SEQ ID NO: 3300 - protein, 368 aa, Zea mays subsp. mays
  peptide (1)..(368): Ceres Seq. ID no. 13498802
  misc_feature (216)..(338): Pfam Name: Oxidoreductase NAD-binding domain Pfam Description: Oxidoreductase NAD-binding domain
  misc_feature (75)..(368): Homolog of NCBI NO: 16331051 NR Description: ferredoxin-NADP oxidoreductase [Synechocystis sp.
  misc_feature (1)..(368): Homolog of NCBI NO: 729479 NR Description: Ferredoxin--NADP reductase, chloroplast precursor
  misc_feature (1)..(368): Homolog of NCBI NO: 5730139 NR Description: ferredoxin-NADP+ reductase [Arabidopsis thaliana]
  misc_feature (1)..(368): Homolog of NCBI NO: 3913651 NR Description: Ferredoxin--NADP reductase, leaf-type isozyme,
  misc_feature (1)..(368): Homolog of NCBI NO: 20302471 NR Description: ferredoxin-NADP(H) oxidoreductase [Triticum
  misc_feature (1)..(368): Homolog of NCBI NO: 6899972 NR Description: chloroplast ferredoxin-NADP+ oxidoreductase
  misc_feature (1)..(368): Homolog of NCBI NO: 15239282 NR Description: ferredoxin--NADP(+) reductase (adrenodoxin
  misc_feature (1)..(368): Homolog of NCBI NO: 6561889 NR Description: ferredoxin [Zea mays]
  misc_feature (1)..(368): Homolog of NCBI NO: 20302473 NR Description: ferredoxin-NADP(H) oxidoreductase [Triticum
  misc_feature (1)..(368): Homolog of NCBI NO: 6561891 NR Description: ferredoxin [Zea mays]
MAAVTAAAVSLPSSSSSPAAAKAKASASASPSSPCGHLQFPRRHGGPRAVRLRVQVSTTETAEAEPVKKLEKVSKKQEEGLVTNKYKPKEPYVGRCLLNTRITGDQAPGETWHMVFSTEGEVPYREGQSIGVIADGEDKNGKPHKLRLYSIASSALGDFGDSKTVSLCVKRLVYTNDQGEVVKGVCSNFLCDLKPGAEVKITGPVGKEMLMPKDPNATIIMLATGTGIAPFRSFLWKMFFEEHEDYKYTGLAWLFLGVPTSDTLLYKEELEKMKEMAPDNFRLDFAVSREQTNAAGEKMYIQTRMAEYKEELWELLKKDNTYVYMCGLKGMEKGIDDIMLDLAAKDGINWLDYKKQLKKSEQWNVEVY

SEQ ID NO: 3301 - protein, 255 aa, Zea mays subsp. mays
  peptide (1)..(255): Ceres Seq. ID no. 13498803
  misc_feature (103)..(225): Pfam Name: Oxidoreductase NAD-binding domain Pfam Description: Oxidoreductase NAD-binding domain
  misc_feature (1)..(255): Homolog of NCBI NO: 6561891 NR Description: ferredoxin [Zea mays]
  misc_feature (1)..(255): Homolog of NCBI NO: 16331051 NR Description: ferredoxin-NADP oxidoreductase [Synechocystis sp.
  misc_feature (1)..(255): Homolog of NCBI NO: 729479 NR Description: Ferredoxin--NADP reductase, chloroplast precursor
  misc_feature (1)..(255): Homolog of NCBI NO: 5730139 NR Description: ferredoxin-NADP+ reductase [Arabidopsis thaliana]
  misc_feature (1)..(255): Homolog of NCBI NO: 3913651 NR Description: Ferredoxin--NADP reductase, leaf-type isozyme,
  misc_feature (1)..(255): Homolog of NCBI NO: 20302471 NR Description: ferredoxin-NADP(H) oxidoreductase [Triticum
  misc_feature (1)..(255): Homolog of NCBI NO: 6899972 NR Description: chloroplast ferredoxin-NADP+ oxidoreductase
  misc_feature (1)..(255): Homolog of NCBI NO: 15239282 NR Description: ferredoxin--NADP(+) reductase (adrenodoxin
  misc_feature (1)..(255): Homolog of NCBI NO: 6561889 NR Description: ferredoxin [Zea mays]
  misc_feature (1)..(255): Homolog of NCBI NO: 20302473 NR Description: ferredoxin-NADP(H) oxidoreductase [Triticum
MVFSTEGEVPYREGQSIGVIADGEDKNGKPHKLRLYSIASSALGDFGDSKTVSLCVKRLVYTNDQGEVVKGVCSNFLCDLKPGAEVKITGPVGKEMLMPKDPNATIIMLATGTGIAPFRSFLWKMFFEEHEDYKYTGLAWLFLGVPTSDTLLYKEELEKMKEMAPDNFRLDFAVSREQTNAAGEKMYIQTRMAEYKEELWELLKKDNTYVYMCGLKGMEKGIDDIMLDLAAKDGINWLDYKKQLKKSEQWNVEVY

SEQ ID NO: 3302 - DNA, 1181 bp, Zea mays subsp. mays
  misc_feature (1)..(1181): Ceres Seq. ID no. 12434843
  misc_feature: MA Experiment ID: 108504 Result: Down-regulated in Transcription
  misc_feature: MA Experiment 108504 PARAMETER Experiment Name: Zm_Drought_P Parameter: Age (day) Value: 8
  misc_feature: MA Experiment 108504 PARAMETER Experiment Name: Zm_Drought_P Parameter: Organism Value: Zea mays
  misc_feature: MA Experiment 108504 PARAMETER Experiment Name: Zm_Drought_P Parameter: Plant Line Value: 35A19
  misc_feature: MA Experiment 108504 PARAMETER Experiment Name: Zm_Drought_P Parameter: Timepoint (hr) Value: 12
  misc_feature: MA Experiment 108504 PARAMETER Experiment Name: Zm_Drought_P Parameter: Tissue Value: Aerial
  misc_feature: MA Experiment 108504 PARAMETER Experiment Name: Zm_Drought_P Parameter: Treatment Value: Drought vs. No Drought
  misc_feature: MA Experiment ID: 108522 Result: Up-regulated in Transcription
  misc_feature: MA Experiment 108522 PARAMETER Experiment Name: Zm_42deg_Heat_P Parameter: Age (day) Value: 8
  misc_feature: MA Experiment 108522 PARAMETER Experiment Name: Zm_42deg_Heat_P Parameter: Organism Value: Zea mays
  misc_feature: MA Experiment 108522 PARAMETER Experiment Name: Zm_42deg_Heat_P Parameter: Plant Line Value: 35A19
  misc_feature: MA Experiment 108522 PARAMETER Experiment Name: Zm_42deg_Heat_P Parameter: Temperature (deg C) Value: 42 vs. 22
  misc_feature: MA Experiment 108522 PARAMETER Experiment Name: Zm_42deg_Heat_P Parameter: Timepoint (hr) Value: 1
  misc_feature: MA Experiment 108522 PARAMETER Experiment Name: Zm_42deg_Heat_P Parameter: Tissue Value: Aerial
  misc_feature: MA Experiment ID: 108529 Result: Down-regulated in Transcription
  misc_feature: MA Experiment 108529 PARAMETER Experiment Name: Zm_Imbibed_Seeds_P Parameter: Age (day) Value: 5 vs. 2
  misc_feature: MA Experiment 108529 PARAMETER Experiment Name: Zm_Imbibed_Seeds_P Parameter: Organism Value: Zea mays
  misc_feature: MA Experiment 108529 PARAMETER Experiment Name: Zm_Imbibed_Seeds_P Parameter: Plant Line Value: 35A19
  misc_feature: MA Experiment 108529 PARAMETER Experiment Name: Zm_Imbibed_Seeds_P Parameter: Tissue Value: Roots vs. Embryo
  misc_feature: MA Experiment ID: 108544 Result: Down-regulated in Transcription
  misc_feature: MA Experiment ID: 108556 Result: Down-regulated in Transcription
  misc_feature: MA Experiment 108556 PARAMETER Experiment Name: Zm_Drought_P Parameter: Age (day) Value: 9
  misc_feature: MA Experiment 108556 PARAMETER Experiment Name: Zm_Drought_P Parameter: Organism Value: Zea mays
  misc_feature: MA Experiment 108556 PARAMETER Experiment Name: Zm_Drought_P Parameter: Plant Line Value: 35A19
  misc_feature: MA Experiment 108556 PARAMETER Experiment Name: Zm_Drought_P Parameter: Timepoint (hr) Value: 24
  misc_feature: MA Experiment 108556 PARAMETER Experiment Name: Zm_Drought_P Parameter: Tissue Value: Aerial
  misc_feature: MA Experiment 108556 PARAMETER Experiment Name: Zm_Drought_P Parameter: Treatment Value: Drought vs. No Drought
  misc_feature: MA Experiment ID: 108559 Result: Down-regulated in Transcription
  misc_feature: MA Experiment 108559 PARAMETER Experiment Name: Zm_5mM_NO_P Parameter: Age (day) Value: 8
  misc_feature: MA Experiment 108559 PARAMETER Experiment Name: Zm_5mM_NO_P Parameter: Organism Value: Zea mays
  misc_feature: MA Experiment 108559 PARAMETER Experiment Name: Zm_5mM_NO_P Parameter: Plant Line Value: 35A19
  misc_feature: MA Experiment 108559 PARAMETER Experiment Name: Zm_5mM_NO_P Parameter: Timepoint (hr) Value: 12
  misc_feature: MA Experiment 108559 PARAMETER Experiment Name: Zm_5mM_NO_P Parameter: Tissue Value: Aerial
  misc_feature: MA Experiment 108559 PARAMETER Experiment Name: Zm_5mM_NO_P Parameter: Treatment Value: 5mM NO vs. No Treatment
  misc_feature: MA Experiment ID: 20000477 Result: Down-regulated in Transcription
  misc_feature: MA Experiment 20000477 PARAMETER Experiment Name: Zm_5mM_SA_P Parameter: Age (day) Value: 10
  misc_feature: MA Experiment 20000477 PARAMETER Experiment Name: Zm_5mM_SA_P Parameter: Organism Value: Zea mays
  misc_feature: MA Experiment 20000477 PARAMETER Experiment Name: Zm_5mM_SA_P Parameter: Plant Line Value: 35A19
  misc_feature: MA Experiment 20000477 PARAMETER Experiment Name: Zm_5mM_SA_P Parameter: Timepoint (hr) Value: 48
  misc_feature: MA Experiment 20000477 PARAMETER Experiment Name: Zm_5mM_SA_P Parameter: Tissue Value: Aerial
  misc_feature: MA Experiment 20000477 PARAMETER Experiment Name: Zm_5mM_SA_P Parameter: Treatment Value: 5mM SA vs. No Treatment
  misc_feature: MA Experiment ID: 20000478 Result: Down-regulated in Transcription
  misc_feature: MA Experiment 20000478 PARAMETER Experiment Name: Zm_5mM_SA_P Parameter: Age (day) Value: 11
  misc_feature: MA Experiment 20000478 PARAMETER Experiment Name: Zm_5mM_SA_P Parameter: Organism Value: Zea mays
  misc_feature: MA Experiment 20000478 PARAMETER Experiment Name: Zm_5mM_SA_P Parameter: Plant Line Value: 35A19
  misc_feature: MA Experiment 20000478 PARAMETER Experiment Name: Zm_5mM_SA_P Parameter: Timepoint (hr) Value: 72
  misc_feature: MA Experiment 20000478 PARAMETER Experiment Name: Zm_5mM_SA_P Parameter: Tissue Value: Aerial
  misc_feature: MA Experiment 20000478 PARAMETER Experiment Name: Zm_5mM_SA_P Parameter: Treatment Value: 5mM SA vs. No Treatment
  misc_feature: MA Experiment ID: 20000479 Result: Down-regulated in Transcription
  misc_feature: MA Experiment 20000479 PARAMETER Experiment Name: Zm_Drought_P Parameter: Age (day) Value: 10
  misc_feature: MA Experiment 20000479 PARAMETER Experiment Name: Zm_Drought_P Parameter: Organism Value: Zea mays
  misc_feature: MA Experiment 20000479 PARAMETER Experiment Name: Zm_Drought_P Parameter: Plant Line Value: 35A19
  misc_feature: MA Experiment 20000479 PARAMETER Experiment Name: Zm_Drought_P Parameter: Timepoint (hr) Value: 48
  misc_feature: MA Experiment 20000479 PARAMETER Experiment Name: Zm_Drought_P Parameter: Tissue Value: Aerial
  misc_feature: MA Experiment 20000479 PARAMETER Experiment Name: Zm_Drought_P Parameter: Treatment Value: Drought vs. No Drought
  misc_feature: MA Experiment ID: 20000480 Result: Down-regulated in Transcription
  misc_feature: MA Experiment 20000480 PARAMETER Experiment Name: Zm_Drought_P Parameter: Age (day) Value: 11
  misc_feature: MA Experiment 20000480 PARAMETER Experiment Name: Zm_Drought_P Parameter: Organism Value: Zea mays
  misc_feature: MA Experiment 20000480 PARAMETER Experiment Name: Zm_Drought_P Parameter: Plant Line Value: 35A19
  misc_feature: MA Experiment 20000480 PARAMETER Experiment Name: Zm_Drought_P Parameter: Timepoint (hr) Value: 72
  misc_feature: MA Experiment 20000480 PARAMETER Experiment Name: Zm_Drought_P Parameter: Tissue Value: Aerial
  misc_feature: MA Experiment 20000480 PARAMETER Experiment Name: Zm_Drought_P Parameter: Treatment Value: Drought vs. No Drought
  misc_feature: MA Experiment ID: 20000535 Result: Up-regulated in Transcription
  misc_feature: MA Experiment 20000535 PARAMETER Experiment Name: Zm_Hybrid_Seed_Dev_P Parameter: DAP Value: 30 vs. 12
  misc_feature: MA Experiment 20000535 PARAMETER Experiment Name: Zm_Hybrid_Seed_Dev_P Parameter: Organism Value: Zea mays
  misc_feature: MA Experiment 20000535 PARAMETER Experiment Name: Zm_Hybrid_Seed_Dev_P Parameter: Plant Line Value: 35A19
  misc_feature: MA Experiment 20000535 PARAMETER Experiment Name: Zm_Hybrid_Seed_Dev_P Parameter: Tissue Value: Embryo vs. Unfert Floret
  misc_feature: MA Experiment ID: 20000629 Result: Up-regulated in Transcription
  misc_feature: MA Experiment 20000629 PARAMETER Experiment Name: Zm_Herbicide-Treatments_P Parameter: Timepoint (hr) Value: 12
  misc_feature: MA Experiment 20000629 PARAMETER Experiment Name: Zm_Herbicide-Treatments_P Parameter: Tissue Value: Aerial
  misc_feature: MA Experiment 20000629 PARAMETER Experiment Name: Zm_Herbicide-Treatments_P Parameter: Treatment Value: Trimec vs. No Treatment
atcccaacccactcacagtctcacgctactatcgctatctagagctccggccgtcacagacacgagctagagctagagctgcagggaagaagaagaaggaggaggaggagaagatgagggcgtccgcgctggtctgcttcgtggcggtgtcggcgtgcatagcgtgcatcgcgcatggcggcaacttctaccaggacacggagatgacctgggggcaggggcgcggcaaggtggtggacggcgggcgcgggctggacctgagcctggacagggcctccgggtccgggttccagtccaaggacgagtacctgttcggcaagatcgagatgcagatgaagctggtgcctggcaactcggcgggcaccgtgacgaccttgtacctgtcgtcgcagggcgacgcgcacgacgagatcgacctggagttcctgggcaacgtgtcgggcgagccctacacgctgcacacgaacgtgttcacgcgcgggcgggggcagcgggagcancagttccgcctctggttcgaccccaccgccgacttccacacctactccgtggtgtggaacccgcggcacgtcatcttcgcggtggacggcacgccggtgagggacttcgccaaccgcgaggcccgcggggtggcgttcccgcggacgcagcccatgcgggtgtacgccagcctctggaacgccgacgactgggccacgcagggcggccgcgtcaaggcggactgggcgcgggcgccgttcgtcgcctcgttccgcgggttcagcgccgacgcctgcgtctggtccggcggcaggtcgcagtgccccgtcggcaccatggaggaggcgggaggaggcggcggctggtggaaccagcagctcaccgacgccagctaccgccgcatgcgctgggtgcagaggaagttcatgatctacaactactgcaccgacgccaagcggttcccgcagggccggggcgtgcccgctgaatgcaggctccggcgataaaggtggctggatgagcgaacgcgaagccacctgcgtgcgtgcacgacgatcgatcccctcgtcgtcgttcacttcagaccagagatcggtggtctggcgaataatgtttgggtttttttttttgccatgggcgatggcaatgtaaatgtagcacgtgacgcacgtcgcagtgatattctttcatctgttttctgc

SEQ ID NO: 3303 - protein, 327 aa, Zea mays subsp. mays
  peptide (1)..(327): Ceres Seq. ID no. 12434844
  misc_feature (62)..(243): Pfam Name: Glycosyl hydrolases family 16 Pfam Description: Glycosyl hydrolases family 16
  misc_feature (60)..(323): Homolog of NCBI NO: 22947852 NR Description: xyloglucan endotransglycosylase [Malus x
  misc_feature (47)..(323): Homolog of NCBI NO: 17064792 NR Description: xyloglucan endo-1, 4-beta-D-glucanase (XTR-6)
  misc_feature (47)..(323): Homolog of NCBI NO: 15235997 NR Description: xyloglucan endotransglycosylase (XTR-6)
  misc_feature (61)..(323): Homolog of NCBI NO: 15242781 NR Description: xyloglucan endotransglycosylase (TCH4)
  misc_feature (39)..(325): Homolog of NCBI NO: 7447412 NR Description: xyloglucan endo-1,4-beta-D-glucanase (EC 3.2.1.-)
  misc_feature (38)..(325): Homolog of NCBI NO: 29500891 NR Description: putative xyloglucan endotransglycosylase [Cucumis
  misc_feature (46)..(324): Homolog of NCBI NO: 8886865 NR Description: xyloglucan endotransglycosylase XET1 [Asparagus
  misc_feature (40)..(323): Homolog of NCBI NO: 8886867 NR Description: xyloglucan endotransglycosylase XET2 [Asparagus
  misc_feature (39)..(326): Homolog of NCBI NO: 14330332 NR Description: Xet1 protein [Festuca pratensis]
  misc_feature (47)..(326): Homolog of NCBI NO: 7447413 NR Description: xyloglucan endo-1,4-beta-D-glucanase (EC 3.2.1.-)
  misc_feature (166)..(166): Xaa is any aa, unknown or other
PNPLTVSRYYRYLELRPSQTRARARAAGKKKKEEEEKMRASALVCFVAVSACIACIAHGGNFYQDTEMTWGQGRGKVVDGGRGLDLSLDRASGSGFQSKDEYLFGKIEMQMKLVPGNSAGTVTTLYLSSQGDAHDEIDLEFLGNVSGEPYTLHTNVFTRGRGQREXQFRLWFDPTADFHTYSVVWNPRHVIFAVDGTPVRDFANREARGVAFPRTQPMRVYASLWNADDWATQGGRVKADWARAPFVASFRGFSADACVWSGGRSQCPVGTMEEAGGGGGWWNQQLTDASYRRMRWVQRKFMIYNYCTDAKRFPQGRGVPAECRLRR

SEQ ID NO: 3304 - protein, 290 aa, Zea mays subsp. mays
  peptide (1)..(290): Ceres Seq. ID no. 12434845
  misc_feature (25)..(206): Pfam Name: Glycosyl hydrolases family 16 Pfam Description: Glycosyl hydrolases family 16
  misc_feature (23)..(286): Homolog of NCBI NO: 22947852 NR Description: xyloglucan endotransglycosylase [Malus x
  misc_feature (10)..(286): Homolog of NCBI NO: 17064792 NR Description: xyloglucan endo-1, 4-beta-D-glucanase (XTR-6)
  misc_feature (10)..(286): Homolog of NCBI NO: 15235997 NR Description: xyloglucan endotransglycosylase (XTR-6)
  misc_feature (24)..(286): Homolog of NCBI NO: 15242781 NR Description: xyloglucan endotransglycosylase (TCH4)
  misc_feature (2)..(288): Homolog of NCBI NO: 7447412 NR Description: xyloglucan endo-1,4-beta-D-glucanase (EC 3.2.1.-)
  misc_feature (1)..(288): Homolog of NCBI NO: 29500891 NR Description: putative xyloglucan endotransglycosylase [Cucumis
  misc_feature (9)..(287): Homolog of NCBI NO: 8886865 NR Description: xyloglucan endotransglycosylase XET1 [Asparagus
  misc_feature (3)..(286): Homolog of NCBI NO: 8886867 NR Description: xyloglucan endotransglycosylase XET2 [Asparagus
  misc_feature (2)..(289): Homolog of NCBI NO: 14330332 NR Description: Xet1 protein [Festuca pratensis]
  misc_feature (10)..(289): Homolog of NCBI NO: 7447413 NR Description: xyloglucan endo-1,4-beta-D-glucanase (EC 3.2.1.-)
  misc_feature (129)..(129): Xaa is any aa, unknown or other
MRASALVCFVAVSACIACIAHGGNFYQDTEMTWGQGRGKVVDGGRGLDLSLDRASGSGFQSKDEYLFGKIEMQMKLVPGNSAGTVTTLYLSSQGDAHDEIDLEFLGNVSGEPYTLHTNVFTRGRGQREXQFRLWFDPTADFHTYSVVWNPRHVIFAVDGTPVRDFANREARGVAFPRTQPMRVYASLWNADDWATQGGRVKADWARAPFVASFRGFSADACVWSGGRSQCPVGTMEEAGGGGGWWNQQLTDASYRRMRWVQRKFMIYNYCTDAKRFPQGRGVPAECRLRR

SEQ ID NO: 3305 - protein, 260 aa, Zea mays subsp. mays
  peptide (1)..(260): Ceres Seq. ID no. 12434846
  misc_feature (1)..(176): Pfam Name: Glycosyl hydrolases family 16 Pfam Description: Glycosyl hydrolases family 16
  misc_feature (1)..(256): Homolog of NCBI NO: 22947852 NR Description: xyloglucan endotransglycosylase [Malus x
  misc_feature (1)..(256): Homolog of NCBI NO: 17064792 NR Description: xyloglucan endo-1, 4-beta-D-glucanase (XTR-6)
  misc_feature (1)..(256): Homolog of NCBI NO: 15235997 NR Description: xyloglucan endotransglycosylase (XTR-6)
  misc_feature (1)..(256): Homolog of NCBI NO: 15242781 NR Description: xyloglucan endotransglycosylase (TCH4)
  misc_feature (1)..(258): Homolog of NCBI NO: 7447412 NR Description: xyloglucan endo-1,4-beta-D-glucanase (EC 3.2.1.-)
  misc_feature (1)..(258): Homolog of NCBI NO: 29500891 NR Description: putative xyloglucan endotransglycosylase [Cucumis
  misc_feature (1)..(257): Homolog of NCBI NO: 8886865 NR Description: xyloglucan endotransglycosylase XET1 [Asparagus
  misc_feature (1)..(256): Homolog of NCBI NO: 8886867 NR Description: xyloglucan endotransglycosylase XET2 [Asparagus
  misc_feature (1)..(259): Homolog of NCBI NO: 14330332 NR Description: Xet1 protein [Festuca pratensis]
  misc_feature (1)..(259): Homolog of NCBI NO: 7447413 NR Description: xyloglucan endo-1,4-beta-D-glucanase (EC 3.2.1.-)
  misc_feature (99)..(99): Xaa is any aa, unknown or other
MTWGQGRGKVVDGGRGLDLSLDRASGSGFQSKDEYLFGKIEMQMKLVPGNSAGTVTTLYLSSQGDAHDEIDLEFLGNVSGEPYTLHTNVFTRGRGQREXQFRLWFDPTADFHTYSVVWNPRHVIFAVDGTPVRDFANREARGVAFPRTQPMRVYASLWNADDWATQGGRVKADWARAPFVASFRGFSADACVWSGGRSQCPVGTMEEAGGGGGWWNQQLTDASYRRMRWVQRKFMIYNYCTDAKRFPQGRGVPAECRLRR

SEQ ID NO: 3306 - DNA, 1029 bp, Zea mays subsp. mays
  misc_feature (1)..(1029): Ceres Seq. ID no. 13496156
  misc_feature: MA Experiment ID: 108689 Result: Up-regulated in Transcription
  misc_feature: MA Experiment 108689 PARAMETER Experiment Name: Zm_Drought_Roots_P Parameter: Age (day) Value: 9
  misc_feature: MA Experiment 108689 PARAMETER Experiment Name: Zm_Drought_Roots_P Parameter: Organism Value: Zea mays
  misc_feature: MA Experiment 108689 PARAMETER Experiment Name: Zm_Drought_Roots_P Parameter: Plant Line Value: 35A19
  misc_feature: MA Experiment 108689 PARAMETER Experiment Name: Zm_Drought_Roots_P Parameter: Timepoint (hr) Value: 24
  misc_feature: MA Experiment 108689 PARAMETER Experiment Name: Zm_Drought_Roots_P Parameter: Tissue Value: Roots
  misc_feature: MA Experiment 108689 PARAMETER Experiment Name: Zm_Drought_Roots_P Parameter: Treatment Value: Drought vs. No Drought
  misc_feature: MA Experiment ID: 20000492 Result: Up-regulated in Transcription
  misc_feature: MA Experiment 20000492 PARAMETER Experiment Name: Zm_Hybrid_Seed_Dev_P Parameter: DAP Value: 12
  misc_feature: MA Experiment 20000492 PARAMETER Experiment Name: Zm_Hybrid_Seed_Dev_P Parameter: Organism Value: Zea mays
  misc_feature: MA Experiment 20000492 PARAMETER Experiment Name: Zm_Hybrid_Seed_Dev_P Parameter: Plant Line Value: 35A19
  misc_feature: MA Experiment 20000492 PARAMETER Experiment Name: Zm_Hybrid_Seed_Dev_P Parameter: Tissue Value: Fert Kernel vs. Unfert Floret
atgaattgctgctgggtgctggccgttgcgggcgaacccgaaaatcacgagcgcgagagatcggagcacggcatgtcggaggagcagttcctcgccgtggcggtggaagccgccaagagcgccggcgagattattcgcaagggattctaccagaccaagaacgtcgagcacaagggccaggtggatttggtgacggagacggacaaggcctgcgaggacctcatcttcaaccacctccggaagcacttcccggaccacaagttcatcggggaggaggagtccgcggcgctcggggccaccgctgacctcaccgacgaccccacctggatcgtcgatcccctcgacgggaccactaatttcgtccatggtttcccatttgtatgtgtctccgttggcctcaccattgggaaaattcccactgtcggagtcgtcttcaaccccatcatgaacgagcttttcacggcggttcgtggaaaaggggctttcctgaatggctctccaattaaagcatcatctcaagatgagttagtgaaggctcttctggtaacagaggctggaaccaatagagacaagaccactgtggatgatacaaccaacagaatcaacaggctactatacaagattcgatccatacggatgtgtggatcattggctttaaacatgtgtggagttgcctgtggtagactagatttgtgttatgagataggatttggtggtccatgggatgttgctgctggtgctgtaattcttcaggaagccggtggccttgtttttgacccaagcggcggagagtttgatttgatgtcgcgaagaatggcaggatcaaacagcttgctgaaggataagttcgtcaaggaactgggggatactaattgaaacaaatgttagtattattcgtggaacagattaagacaataaggttgccccgccgcatggtgattaacttattgtttgggcaacaaaattccatgtaattctgcacctgtacaactatgttggacgcagaacattttattgagttttgtgatt

SEQ ID NO: 3307 - protein, 291 aa, Zea mays subsp. mays
  peptide (1)..(291): Ceres Seq. ID no. 13496157
  misc_feature (12)..(277): Homolog of NCBI NO: 26449166 NR Description: inositol (myo)-1(or 4)-monophosphatase 2 [Rattus
  misc_feature (23)..(291): Homolog of NCBI NO: 21357329 NR Description: CG9391-PA [Drosophila melanogaster]
  misc_feature (28)..(290): Homolog of NCBI NO: 30143277 NR Description: myo inositol monophosphatase isoform 2
  misc_feature (28)..(290): Homolog of NCBI NO: 1709204 NR Description: Inositol-1(or 4)-monophosphatase 2 (IMPase 2)
  misc_feature (26)..(287): Homolog of NCBI NO: 30143275 NR Description: myo inositol monophosphatase isoform 1
  misc_feature (30)..(285): Homolog of NCBI NO: 3914097 NR Description: Inositol-1(or 4)-monophosphatase (IMPase) (IMP)
  misc_feature (26)..(287): Homolog of NCBI NO: 1709203 NR Description: Inositol-1(or 4)-monophosphatase 1 (IMPase 1)
  misc_feature (26)..(287): Homolog of NCBI NO: 21553679 NR Description: putative myo-inositol monophosphatase
  misc_feature (26)..(287): Homolog of NCBI NO: 15232993 NR Description: myo-inositol monophosphatase -related
  misc_feature (21)..(289): Homolog of NCBI NO: 1709205 NR Description: Inositol-1(or 4)-monophosphatase 3 (IMPase 3)
MNCCWVLAVAGEPENHERERSEHGMSEEQFLAVAVEAAKSAGEIIRKGFYQTKNVEHKGQVDLVTETDKACEDLIFNHLRKHFPDHKFIGEEESAALGATADLTDDPTWIVDPLDGTTNFVHGFPFVCVSVGLTIGKIPTVGVVFNPIMNELFTAVRGKGAFLNGSPIKASSQDELVKALLVTEAGTNRDKTTVDDTTNRINRLLYKIRSIRMCGSLALNMCGVACGRLDLCYEIGFGGPWDVAAGAVILQEAGGLVFDPSGGEFDLMSRRMAGSNSLLKDKFVKELGDTN

SEQ ID NO: 3308 - protein, 267 aa, Zea mays subsp. mays
  peptide (1)..(267): Ceres Seq. ID no. 13496158
  misc_feature (1)..(253): Homolog of NCBI NO: 26449166 NR Description: inositol (myo)-1(or 4)-monophosphatase 2 [Rattus
  misc_feature (1)..(267): Homolog of NCBI NO: 21357329 NR Description: CG9391-PA [Drosophila melanogaster]
  misc_feature (4)..(266): Homolog of NCBI NO: 30143277 NR Description: myo inositol monophosphatase isoform 2
  misc_feature (4)..(266): Homolog of NCBI NO: 1709204 NR Description: Inositol-1(or 4)-monophosphatase 2 (IMPase 2)
  misc_feature (2)..(263): Homolog of NCBI NO: 30143275 NR Description: myo inositol monophosphatase isoform 1
  misc_feature (6)..(261): Homolog of NCBI NO: 3914097 NR Description: Inositol-1(or 4)-monophosphatase (IMPase) (IMP)
  misc_feature (2)..(263): Homolog of NCBI NO: 1709203 NR Description: Inositol-1(or 4)-monophosphatase 1 (IMPase 1)
  misc_feature (2)..(263): Homolog of NCBI NO: 21553679 NR Description: putative myo-inositol monophosphatase
  misc_feature (2)..(263): Homolog of NCBI NO: 15232993 NR Description: myo-inositol monophosphatase -related
  misc_feature (1)..(265): Homolog of NCBI NO: 1709205 NR Description: Inositol-1(or 4)-monophosphatase 3 (IMPase 3)
MSEEQFLAVAVEAAKSAGEIIRKGFYQTKNVEHKGQVDLVTETDKACEDLIFNHLRKHFPDHKFIGEEESAALGATADLTDDPTWIVDPLDGTTNFVHGFPFVCVSVGLTIGKIPTVGVVFNPIMNELFTAVRGKGAFLNGSPIKASSQDELVKALLVTEAGTNRDKTTVDDTTNRINRLLYKIRSIRMCGSLALNMCGVACGRLDLCYEIGFGGPWDVAAGAVILQEAGGLVFDPSGGEFDLMSRRMAGSNSLLKDKFVKELGDTN

SEQ ID NO: 3309 - DNA, 1615 bp, Zea mays subsp. mays
  misc_feature (1)..(1615): Ceres Seq. ID no. 13498314
  misc_feature: MA Experiment ID: 108535 Result: Down-regulated in Transcription
  misc_feature: MA Experiment 108535 PARAMETER Experiment Name: Zm_Meristem_P Parameter: Age (day) Value: 8
  misc_feature: MA Experiment 108535 PARAMETER Experiment Name: Zm_Meristem_P Parameter: Organism Value: Zea mays
  misc_feature: MA Experiment 108535 PARAMETER Experiment Name: Zm_Meristem_P Parameter: Plant Line Value: 35A19
  misc_feature: MA Experiment 108535 PARAMETER Experiment Name: Zm_Meristem_P Parameter: Tissue Value: Root Meristem vs. Above Root Meristem
  misc_feature: MA Experiment ID: 20000478 Result: Down-regulated in Transcription
  misc_feature: MA Experiment 20000478 PARAMETER Experiment Name: Zm_5mM_SA_P Parameter: Age (day) Value: 11
  misc_feature: MA Experiment 20000478 PARAMETER Experiment Name: Zm_5mM_SA_P Parameter: Organism Value: Zea mays
  misc_feature: MA Experiment 20000478 PARAMETER Experiment Name: Zm_5mM_SA_P Parameter: Plant Line Value: 35A19
  misc_feature: MA Experiment 20000478 PARAMETER Experiment Name: Zm_5mM_SA_P Parameter: Timepoint (hr) Value: 72
  misc_feature: MA Experiment 20000478 PARAMETER Experiment Name: Zm_5mM_SA_P Parameter: Tissue Value: Aerial
  misc_feature: MA Experiment 20000478 PARAMETER Experiment Name: Zm_5mM_SA_P Parameter: Treatment Value: 5mM SA vs. No Treatment
  misc_feature: MA Experiment ID: 20000479 Result: Down-regulated in Transcription
  misc_feature: MA Experiment 20000479 PARAMETER Experiment Name: Zm_Drought_P Parameter: Age (day) Value: 10
  misc_feature: MA Experiment 20000479 PARAMETER Experiment Name: Zm_Drought_P Parameter: Organism Value: Zea mays
  misc_feature: MA Experiment 20000479 PARAMETER Experiment Name: Zm_Drought_P Parameter: Plant Line Value: 35A19
  misc_feature: MA Experiment 20000479 PARAMETER Experiment Name: Zm_Drought_P Parameter: Timepoint (hr) Value: 48
  misc_feature: MA Experiment 20000479 PARAMETER Experiment Name: Zm_Drought_P Parameter: Tissue Value: Aerial
  misc_feature: MA Experiment 20000479 PARAMETER Experiment Name: Zm_Drought_P Parameter: Treatment Value: Drought vs. No Drought
  misc_feature: MA Experiment ID: 20000480 Result: Down-regulated in Transcription
  misc_feature: MA Experiment 20000480 PARAMETER Experiment Name: Zm_Drought_P Parameter: Age (day) Value: 11
  misc_feature: MA Experiment 20000480 PARAMETER Experiment Name: Zm_Drought_P Parameter: Organism Value: Zea mays
  misc_feature: MA Experiment 20000480 PARAMETER Experiment Name: Zm_Drought_P Parameter: Plant Line Value: 35A19
  misc_feature: MA Experiment 20000480 PARAMETER Experiment Name: Zm_Drought_P Parameter: Timepoint (hr) Value: 72
  misc_feature: MA Experiment 20000480 PARAMETER Experiment Name: Zm_Drought_P Parameter: Tissue Value: Aerial
  misc_feature: MA Experiment 20000480 PARAMETER Experiment Name: Zm_Drought_P Parameter: Treatment Value: Drought vs. No Drought
gtcccttagttgtaccatcgtgtccttttcctcctacctcctccttggctggccctcttccccgtcttcctccctcttccttcgtctctccgtttcaagccctaccgacaggcatttgcttctgctccagtgatcagccccctcccctcctggcctcctctccacccggccaaaaactgatctttttttttcggttctggtaccatagctattagtagtcgtagcggctaacttgcaagccgattgtctctagcacgcaagtgtttttccctcccctgagattggtgggtgatcgagagttcgagacagtgtacacatacatactctgctcgtctgctgaggatcgatcgcttggtctcgttgttgcgtagataggtactagaggactatagctactagtaggactaggagaggatccgagggagagagagcaaggccaagatgatgcgcgcgaaccgggagcagagagtggccttctcgtcgacgaaggaggccgccgcggtgcccaaggaggaggtgtgggaggtccggcccggcgggatgctggtgcagaagcggagccccgacgcggacccgccccccggcggcgcgcccgtgcccaccatccgcgtcaaggtcaagttcaacggcgtctaccacgagatctacatcaactcccaggcatccttcggcgagctcaagaagctgctgtcggagaagacgggcctgcacccggacgaccagaaggtggtgtacaaggacaaggagagggactccaaggcgttcctggacatggccggcgtcaaggaccgctccaagatggtcatgctcgaggaccccgccgccaaggccaagcgcctcctcgaggagcgccggaccggcaaggccgagcgcgccgccaaggccatcgcccgcgccgccctcgacgtcgacaagctcgcaaccaaggtgtcggcgctggagacgatcgtgagcaagggcggcaaggtcgtggacncggacgtggtgacgctgaccgaggcgctgatgaacgagctggtgaagctggactccgtcnncgnngaaggggaggtgaaggcggcgcggcgggcgcaggagaagcgggtgcagaagtacgtggagacgctggacgccatccgcgccaagaacaaggcggcggcggcggcggngccggccaaggcccgctagcggcannaacaaggcgcggccgccgcgcccgcccccggcttcggcgcacgcgcatcagagccagcagcagcgccggcagttccagccgccggcgccggtgtcgcagacccagacggcgagctgggagacgttcgacctcctgtcgtcagtgccgtcgacgtcggcggcccccgtgacgaccatggcccccgcgaccagcaccacgccgtccccgcgcttcgactgggagctcttctagatggctcctcaaggcgccagcctgccacacccccctggcctggcccccatctctcgccacttgtgtgcctgtccattggctcggccagtaccttctcctgttcgccttggccatggtgcatgtcaatcgccattgtttctttctttctttccttcccgctctctttattctgtcattcttgctgtcctttgagcgattgaaagtctgtgt

SEQ ID NO: 3310 - protein, 241 aa, Zea mays subsp. mays
  peptide (1)..(241): Ceres Seq. ID no. 13498315
  misc_feature (53)..(126): Pfam Name: Ubiquitin family Pfam Description: Ubiquitin family
  misc_feature (28)..(237): Homolog of NCBI NO: 10176928 NR Description: contains similarity to unknown
  misc_feature (12)..(229): Homolog of NCBI NO: 38344334 NR Description: OSJNBa0058K23.16 [Oryza sativa (japonica
  misc_feature (28)..(237): Homolog of NCBI NO: 30697627 NR Description: BAG domain containing protein [Arabidopsis
  misc_feature (28)..(237): Homolog of NCBI NO: 21553443 NR Description: unknown [Arabidopsis thaliana]
  misc_feature (28)..(237): Homolog of NCBI NO: 30697630 NR Description: BAG domain containing protein [Arabidopsis
  misc_feature (27)..(231): Homolog of NCBI NO: 15240726 NR Description: BAG domain containing protein [Arabidopsis
  misc_feature (27)..(231): Homolog of NCBI NO: 21537107 NR Description: unknown [Arabidopsis thaliana]
  misc_feature (28)..(232): Homolog of NCBI NO: 15242267 NR Description: BAG domain containing protein [Arabidopsis
  misc_feature (21)..(231): Homolog of NCBI NO: 34898024 NR Description: ESTs AU082174(S13676),AU032395(R3986) correspond a region of the predicted gene.~Similar to Arabidopsis thaliana
  misc_feature (21)..(231): Homolog of NCBI NO: 25553557 NR Description: OSJNBa0038F22.4 [Oryza sativa (japonica
  misc_feature (179)..(179): Xaa is any aa, unknown or other
  misc_feature (199)..(199): Xaa is any aa, unknown or other
  misc_feature (200)..(200): Xaa is any aa, unknown or other
  misc_feature (236)..(236): Xaa is any aa, unknown or other
MMRANREQRVAFSSTKEAAAVPKEEVWEVRPGGMLVQKRSPDADPPPGGAPVPTIRVKVKFNGVYHEIYINSQASFGELKKLLSEKTGLHPDDQKVVYKDKERDSKAFLDMAGVKDRSKMVMLEDPAAKAKRLLEERRTGKAERAAKAIARAALDVDKLATKVSALETIVSKGGKVVDXDVVTLTEALMNELVKLDSVXXEGEVKAARRAQEKRVQKYVETLDAIRAKNKAAAAAXPAKAR

SEQ ID NO: 3311 - protein, 240 aa, Zea mays subsp. mays
  peptide (1)..(240): Ceres Seq. ID no. 13498316
  misc_feature (52)..(125): Pfam Name: Ubiquitin family Pfam Description: Ubiquitin family
  misc_feature (27)..(236): Homolog of NCBI NO: 10176928 NR Description: contains similarity to unknown
  misc_feature (11)..(228): Homolog of NCBI NO: 38344334 NR Description: OSJNBa0058K23.16 [Oryza sativa (japonica
  misc_feature (27)..(236): Homolog of NCBI NO: 30697627 NR Description: BAG domain containing protein [Arabidopsis
  misc_feature (27)..(236): Homolog of NCBI NO: 21553443 NR Description: unknown [Arabidopsis thaliana]
  misc_feature (27)..(236): Homolog of NCBI NO: 30697630 NR Description: BAG domain containing protein [Arabidopsis
  misc_feature (26)..(230): Homolog of NCBI NO: 15240726 NR Description: BAG domain containing protein [Arabidopsis
  misc_feature (26)..(230): Homolog of NCBI NO: 21537107 NR Description: unknown [Arabidopsis thaliana]
  misc_feature (27)..(231): Homolog of NCBI NO: 15242267 NR Description: BAG domain containing protein [Arabidopsis
  misc_feature (20)..(230): Homolog of NCBI NO: 34898024 NR Description: ESTs AU082174(S13676),AU032395(R3986) correspond a region of the predicted gene.~Similar to Arabidopsis thaliana
  misc_feature (20)..(230): Homolog of NCBI NO: 25553557 NR Description: OSJNBa0038F22.4 [Oryza sativa (japonica
  misc_feature (178)..(178): Xaa is any aa, unknown or other
  misc_feature (198)..(198): Xaa is any aa, unknown or other
  misc_feature (199)..(199): Xaa is any aa, unknown or other
  misc_feature (235)..(235): Xaa is any aa, unknown or other
MRANREQRVAFSSTKEAAAVPKEEVWEVRPGGMLVQKRSPDADPPPGGAPVPTIRVKVKFNGVYHEIYINSQASFGELKKLLSEKTGLHPDDQKVVYKDKERDSKAFLDMAGVKDRSKMVMLEDPAAKAKRLLEERRTGKAERAAKAIARAALDVDKLATKVSALETIVSKGGKVVDXDVVTLTEALMNELVKLDSVXXEGEVKAARRAQEKRVQKYVETLDAIRAKNKAAAAAXPAKAR

SEQ ID NO: 3312 - protein, 208 aa, Zea mays subsp. mays
  peptide (1)..(208): Ceres Seq. ID no. 13498317
  misc_feature (20)..(93): Pfam Name: Ubiquitin family Pfam Description: Ubiquitin family
  misc_feature (1)..(204): Homolog of NCBI NO: 21553443 NR Description: unknown [Arabidopsis thaliana]
  misc_feature (1)..(204): Homolog of NCBI NO: 30697630 NR Description: BAG domain containing protein [Arabidopsis
  misc_feature (1)..(198): Homolog of NCBI NO: 15240726 NR Description: BAG domain containing protein [Arabidopsis
  misc_feature (1)..(198): Homolog of NCBI NO: 21537107 NR Description: unknown [Arabidopsis thaliana]
  misc_feature (1)..(196): Homolog of NCBI NO: 38344334 NR Description: OSJNBa0058K23.16 [Oryza sativa (japonica
  misc_feature (1)..(204): Homolog of NCBI NO: 30697627 NR Description: BAG domain containing protein [Arabidopsis
  misc_feature (1)..(204): Homolog of NCBI NO: 10176928 NR Description: contains similarity to unknown
  misc_feature (1)..(199): Homolog of NCBI NO: 15242267 NR Description: BAG domain containing protein [Arabidopsis
  misc_feature (1)..(198): Homolog of NCBI NO: 34898024 NR Description: ESTs AU082174(S13676),AU032395(R3986) correspond a region of the predicted gene.~Similar to Arabidopsis thaliana
  misc_feature (1)..(198): Homolog of NCBI NO: 25553557 NR Description: OSJNBa0038F22.4 [Oryza sativa (japonica
  misc_feature (146)..(146): Xaa is any aa, unknown or other
  misc_feature (166)..(166): Xaa is any aa, unknown or other
  misc_feature (167)..(167): Xaa is any aa, unknown or other
  misc_feature (203)..(203): Xaa is any aa, unknown or other
MLVQKRSPDADPPPGGAPVPTIRVKVKFNGVYHEIYINSQASFGELKKLLSEKTGLHPDDQKVVYKDKERDSKAFLDMAGVKDRSKMVMLEDPAAKAKRLLEERRTGKAERAAKAIARAALDVDKLATKVSALETIVSKGGKVVDXDVVTLTEALMNELVKLDSVXXEGEVKAARRAQEKRVQKYVETLDAIRAKNKAAAAAXPAKAR

SEQ ID NO: 3313 - DNA, 1884 bp, Zea mays subsp. mays
  misc_feature (1)..(1884): Ceres Seq. ID no. 12379414
  misc_feature: MA Experiment ID: 108504 Result: Down-regulated in Transcription
  misc_feature: MA Experiment 108504 PARAMETER Experiment Name: Zm_Drought_P Parameter: Age (day) Value: 8
  misc_feature: MA Experiment 108504 PARAMETER Experiment Name: Zm_Drought_P Parameter: Organism Value: Zea mays
  misc_feature: MA Experiment 108504 PARAMETER Experiment Name: Zm_Drought_P Parameter: Plant Line Value: 35A19
  misc_feature: MA Experiment 108504 PARAMETER Experiment Name: Zm_Drought_P Parameter: Timepoint (hr) Value: 12
  misc_feature: MA Experiment 108504 PARAMETER Experiment Name: Zm_Drought_P Parameter: Tissue Value: Aerial
  misc_feature: MA Experiment 108504 PARAMETER Experiment Name: Zm_Drought_P Parameter: Treatment Value: Drought vs. No Drought
  misc_feature: MA Experiment ID: 108515 Result: Down-regulated in Transcription
  misc_feature: MA Experiment 108515 PARAMETER Experiment Name: Zm_2mM_SA_P Parameter: Age (day) Value: 8
  misc_feature: MA Experiment 108515 PARAMETER Experiment Name: Zm_2mM_SA_P Parameter: Organism Value: Zea mays
  misc_feature: MA Experiment 108515 PARAMETER Experiment Name: Zm_2mM_SA_P Parameter: Plant Line Value: 35A19
  misc_feature: MA Experiment 108515 PARAMETER Experiment Name: Zm_2mM_SA_P Parameter: Timepoint (hr) Value: 12
  misc_feature: MA Experiment 108515 PARAMETER Experiment Name: Zm_2mM_SA_P Parameter: Tissue Value: Aerial
  misc_feature: MA Experiment 108515 PARAMETER Experiment Name: Zm_2mM_SA_P Parameter: Treatment Value: 2mM SA vs. No Treatment
  misc_feature: MA Experiment ID: 108527 Result: Down-regulated in Transcription
  misc_feature: MA Experiment 108527 PARAMETER Experiment Name: Zm_5mM_NO_P Parameter: Age (day) Value: 8
  misc_feature: MA Experiment 108527 PARAMETER Experiment Name: Zm_5mM_NO_P Parameter: Organism Value: Zea mays
  misc_feature: MA Experiment 108527 PARAMETER Experiment Name: Zm_5mM_NO_P Parameter: Plant Line Value: 35A19
  misc_feature: MA Experiment 108527 PARAMETER Experiment Name: Zm_5mM_NO_P Parameter: Timepoint (hr) Value: 6
  misc_feature: MA Experiment 108527 PARAMETER Experiment Name: Zm_5mM_NO_P Parameter: Tissue Value: Aerial
  misc_feature: MA Experiment 108527 PARAMETER Experiment Name: Zm_5mM_NO_P Parameter: Treatment Value: 5mM NO vs. No Treatment
  misc_feature: MA Experiment ID: 108528 Result: Up-regulated in Transcription
  misc_feature: MA Experiment 108528 PARAMETER Experiment Name: Zm_Imbibed_Seeds_P Parameter: Age (day) Value: 5 vs. 2
  misc_feature: MA Experiment 108528 PARAMETER Experiment Name: Zm_Imbibed_Seeds_P Parameter: Organism Value: Zea mays
  misc_feature: MA Experiment 108528 PARAMETER Experiment Name: Zm_Imbibed_Seeds_P Parameter: Plant Line Value: 35A19
  misc_feature: MA Experiment 108528 PARAMETER Experiment Name: Zm_Imbibed_Seeds_P Parameter: Tissue Value: Aerial vs. Embryo
  misc_feature: MA Experiment ID: 108529 Result: Up-regulated in Transcription
  misc_feature: MA Experiment 108529 PARAMETER Experiment Name: Zm_Imbibed_Seeds_P Parameter: Age (day) Value: 5 vs. 2
  misc_feature: MA Experiment 108529 PARAMETER Experiment Name: Zm_Imbibed_Seeds_P Parameter: Organism Value: Zea mays
  misc_feature: MA Experiment 108529 PARAMETER Experiment Name: Zm_Imbibed_Seeds_P Parameter: Plant Line Value: 35A19
  misc_feature: MA Experiment 108529 PARAMETER Experiment Name: Zm_Imbibed_Seeds_P Parameter: Tissue Value: Roots vs. Embryo
  misc_feature: MA Experiment ID: 108530 Result: Up-regulated in Transcription
  misc_feature: MA Experiment 108530 PARAMETER Experiment Name: Zm_Imbibed_Seeds_P Parameter: Age (day) Value: 6 vs. 2
  misc_feature: MA Experiment 108530 PARAMETER Experiment Name: Zm_Imbibed_Seeds_P Parameter: Organism Value: Zea mays
  misc_feature: MA Experiment 108530 PARAMETER Experiment Name: Zm_Imbibed_Seeds_P Parameter: Plant Line Value: 35A19
  misc_feature: MA Experiment 108530 PARAMETER Experiment Name: Zm_Imbibed_Seeds_P Parameter: Tissue Value: Aerial vs. Embryo
  misc_feature: MA Experiment ID: 108535 Result: Down-regulated in Transcription
  misc_feature: MA Experiment 108535 PARAMETER Experiment Name: Zm_Meristem_P Parameter: Age (day) Value: 8
  misc_feature: MA Experiment 108535 PARAMETER Experiment Name: Zm_Meristem_P Parameter: Organism Value: Zea mays
  misc_feature: MA Experiment 108535 PARAMETER Experiment Name: Zm_Meristem_P Parameter: Plant Line Value: 35A19
  misc_feature: MA Experiment 108535 PARAMETER Experiment Name: Zm_Meristem_P Parameter: Tissue Value: Root Meristem vs. Above Root Meristem
  misc_feature: MA Experiment ID: 108540 Result: Down-regulated in Transcription
  misc_feature: MA Experiment 108540 PARAMETER Experiment Name: Zm_20percent_PEG_P Parameter: Age (day) Value: 8
  misc_feature: MA Experiment 108540 PARAMETER Experiment Name: Zm_20percent_PEG_P Parameter: Organism Value: Zea mays
  misc_feature: MA Experiment 108540 PARAMETER Experiment Name: Zm_20percent_PEG_P Parameter: Plant Line Value: 35A19
  misc_feature: MA Experiment 108540 PARAMETER Experiment Name: Zm_20percent_PEG_P Parameter: Timepoint (hr) Value: 6
  misc_feature: MA Experiment 108540 PARAMETER Experiment Name: Zm_20percent_PEG_P Parameter: Tissue Value: Aerial
  misc_feature: MA Experiment 108540 PARAMETER Experiment Name: Zm_20percent_PEG_P Parameter: Treatment Value: 20percent PEG vs. No Treatment
  misc_feature: MA Experiment ID: 108542 Result: Down-regulated in Transcription
  misc_feature: MA Experiment 108542 PARAMETER Experiment Name: Zm_150mM_NaCl_P Parameter: Age (day) Value: 8
  misc_feature: MA Experiment 108542 PARAMETER Experiment Name: Zm_150mM_NaCl_P Parameter: Organism Value: Zea mays
  misc_feature: MA Experiment 108542 PARAMETER Experiment Name: Zm_150mM_NaCl_P Parameter: Plant Line Value: 35A19
  misc_feature: MA Experiment 108542 PARAMETER Experiment Name: Zm_150mM_NaCl_P Parameter: Timepoint (hr) Value: 6
  misc_feature: MA Experiment 108542 PARAMETER Experiment Name: Zm_150mM_NaCl_P Parameter: Tissue Value: Aerial
  misc_feature: MA Experiment 108542 PARAMETER Experiment Name: Zm_150mM_NaCl_P Parameter: Treatment Value: 150mM NaCl vs. No Treatment
  misc_feature: MA Experiment ID: 108543 Result: Up-regulated in Transcription
  misc_feature: MA Experiment ID: 108544 Result: Up-regulated in Transcription
  misc_feature: MA Experiment ID: 108546 Result: Up-regulated in Transcription
  misc_feature: MA Experiment 108546 PARAMETER Experiment Name: Zm_Imbibed_Seeds_P Parameter: Age (day) Value: 3 vs. 2
  misc_feature: MA Experiment 108546 PARAMETER Experiment Name: Zm_Imbibed_Seeds_P Parameter: Organism Value: Zea mays
  misc_feature: MA Experiment 108546 PARAMETER Experiment Name: Zm_Imbibed_Seeds_P Parameter: Plant Line Value: 35A19
  misc_feature: MA Experiment 108546 PARAMETER Experiment Name: Zm_Imbibed_Seeds_P Parameter: Tissue Value: Roots vs. Embryo
  misc_feature: MA Experiment ID: 108547 Result: Up-regulated in Transcription
  misc_feature: MA Experiment 108547 PARAMETER Experiment Name: Zm_Imbibed_Seeds_P Parameter: Age (day) Value: 4 vs. 2
  misc_feature: MA Experiment 108547 PARAMETER Experiment Name: Zm_Imbibed_Seeds_P Parameter: Organism Value: Zea mays
  misc_feature: MA Experiment 108547 PARAMETER Experiment Name: Zm_Imbibed_Seeds_P Parameter: Plant Line Value: 35A19
  misc_feature: MA Experiment 108547 PARAMETER Experiment Name: Zm_Imbibed_Seeds_P Parameter: Tissue Value: Aerial vs. Embryo
  misc_feature: MA Experiment ID: 108556 Result: Down-regulated in Transcription
  misc_feature: MA Experiment 108556 PARAMETER Experiment Name: Zm_Drought_P Parameter: Age (day) Value: 9
  misc_feature: MA Experiment 108556 PARAMETER Experiment Name: Zm_Drought_P Parameter: Organism Value: Zea mays
  misc_feature: MA Experiment 108556 PARAMETER Experiment Name: Zm_Drought_P Parameter: Plant Line Value: 35A19
  misc_feature: MA Experiment 108556 PARAMETER Experiment Name: Zm_Drought_P Parameter: Timepoint (hr) Value: 24
  misc_feature: MA Experiment 108556 PARAMETER Experiment Name: Zm_Drought_P Parameter: Tissue Value: Aerial
  misc_feature: MA Experiment 108556 PARAMETER Experiment Name: Zm_Drought_P Parameter: Treatment Value: Drought vs. No Drought
  misc_feature: MA Experiment ID: 108559 Result: Down-regulated in Transcription
  misc_feature: MA Experiment 108559 PARAMETER Experiment Name: Zm_5mM_NO_P Parameter: Age (day) Value: 8
  misc_feature: MA Experiment 108559 PARAMETER Experiment Name: Zm_5mM_NO_P Parameter: Organism Value: Zea mays
  misc_feature: MA Experiment 108559 PARAMETER Experiment Name: Zm_5mM_NO_P Parameter: Plant Line Value: 35A19
  misc_feature: MA Experiment 108559 PARAMETER Experiment Name: Zm_5mM_NO_P Parameter: Timepoint (hr) Value: 12
  misc_feature: MA Experiment 108559 PARAMETER Experiment Name: Zm_5mM_NO_P Parameter: Tissue Value: Aerial
  misc_feature: MA Experiment 108559 PARAMETER Experiment Name: Zm_5mM_NO_P Parameter: Treatment Value: 5mM NO vs. No Treatment
  misc_feature: MA Experiment ID: 108597 Result: Down-regulated in Transcription
  misc_feature: MA Experiment 108597 PARAMETER Experiment Name: Zm_100uM_ABA_P Parameter: Age (day) Value: 9
  misc_feature: MA Experiment 108597 PARAMETER Experiment Name: Zm_100uM_ABA_P Parameter: Organism Value: Zea mays
  misc_feature: MA Experiment 108597 PARAMETER Experiment Name: Zm_100uM_ABA_P Parameter: Plant Line Value: 35A19
  misc_feature: MA Experiment 108597 PARAMETER Experiment Name: Zm_100uM_ABA_P Parameter: Timepoint (hr) Value: 24
  misc_feature: MA Experiment 108597 PARAMETER Experiment Name: Zm_100uM_ABA_P Parameter: Tissue Value: Aerial
  misc_feature: MA Experiment 108597 PARAMETER Experiment Name: Zm_100uM_ABA_P Parameter: Treatment Value: 100uM ABA vs. No Treatment
  misc_feature: MA Experiment ID: 108687 Result: Down-regulated in Transcription
  misc_feature: MA Experiment 108687 PARAMETER Experiment Name: Zm_Embryos-Flowers__P Parameter: Tissue Value: Embryo vs. Aerial+
  misc_feature: MA Experiment ID: 108689 Result: Down-regulated in Transcription
  misc_feature: MA Experiment 108689 PARAMETER Experiment Name: Zm_Drought_Roots_P Parameter: Age (day) Value: 9
  misc_feature: MA Experiment 108689 PARAMETER Experiment Name: Zm_Drought_Roots_P Parameter: Organism Value: Zea mays
  misc_feature: MA Experiment 108689 PARAMETER Experiment Name: Zm_Drought_Roots_P Parameter: Plant Line Value: 35A19
  misc_feature: MA Experiment 108689 PARAMETER Experiment Name: Zm_Drought_Roots_P Parameter: Timepoint (hr) Value: 24
  misc_feature: MA Experiment 108689 PARAMETER Experiment Name: Zm_Drought_Roots_P Parameter: Tissue Value: Roots
  misc_feature: MA Experiment 108689 PARAMETER Experiment Name: Zm_Drought_Roots_P Parameter: Treatment Value: Drought vs. No Drought
  misc_feature: MA Experiment ID: 20000477 Result: Down-regulated in Transcription
  misc_feature: MA Experiment 20000477 PARAMETER Experiment Name: Zm_5mM_SA_P Parameter: Age (day) Value: 10
  misc_feature: MA Experiment 20000477 PARAMETER Experiment Name: Zm_5mM_SA_P Parameter: Organism Value: Zea mays
  misc_feature: MA Experiment 20000477 PARAMETER Experiment Name: Zm_5mM_SA_P Parameter: Plant Line Value: 35A19
  misc_feature: MA Experiment 20000477 PARAMETER Experiment Name: Zm_5mM_SA_P Parameter: Timepoint (hr) Value: 48
  misc_feature: MA Experiment 20000477 PARAMETER Experiment Name: Zm_5mM_SA_P Parameter: Tissue Value: Aerial
  misc_feature: MA Experiment 20000477 PARAMETER Experiment Name: Zm_5mM_SA_P Parameter: Treatment Value: 5mM SA vs. No Treatment
  misc_feature: MA Experiment ID: 20000478 Result: Down-regulated in Transcription
  misc_feature: MA Experiment 20000478 PARAMETER Experiment Name: Zm_5mM_SA_P Parameter: Age (day) Value: 11
  misc_feature: MA Experiment 20000478 PARAMETER Experiment Name: Zm_5mM_SA_P Parameter: Organism Value: Zea mays
  misc_feature: MA Experiment 20000478 PARAMETER Experiment Name: Zm_5mM_SA_P Parameter: Plant Line Value: 35A19
  misc_feature: MA Experiment 20000478 PARAMETER Experiment Name: Zm_5mM_SA_P Parameter: Timepoint (hr) Value: 72
  misc_feature: MA Experiment 20000478 PARAMETER Experiment Name: Zm_5mM_SA_P Parameter: Tissue Value: Aerial
  misc_feature: MA Experiment 20000478 PARAMETER Experiment Name: Zm_5mM_SA_P Parameter: Treatment Value: 5mM SA vs. No Treatment
  misc_feature: MA Experiment ID: 20000479 Result: Down-regulated in Transcription
  misc_feature: MA Experiment 20000479 PARAMETER Experiment Name: Zm_Drought_P Parameter: Age (day) Value: 10
  misc_feature: MA Experiment 20000479 PARAMETER Experiment Name: Zm_Drought_P Parameter: Organism Value: Zea mays
  misc_feature: MA Experiment 20000479 PARAMETER Experiment Name: Zm_Drought_P Parameter: Plant Line Value: 35A19
  misc_feature: MA Experiment 20000479 PARAMETER Experiment Name: Zm_Drought_P Parameter: Timepoint (hr) Value: 48
  misc_feature: MA Experiment 20000479 PARAMETER Experiment Name: Zm_Drought_P Parameter: Tissue Value: Aerial
  misc_feature: MA Experiment 20000479 PARAMETER Experiment Name: Zm_Drought_P Parameter: Treatment Value: Drought vs. No Drought
  misc_feature: MA Experiment ID: 20000480 Result: Down-regulated in Transcription
  misc_feature: MA Experiment 20000480 PARAMETER Experiment Name: Zm_Drought_P Parameter: Age (day) Value: 11
  misc_feature: MA Experiment 20000480 PARAMETER Experiment Name: Zm_Drought_P Parameter: Organism Value: Zea mays
  misc_feature: MA Experiment 20000480 PARAMETER Experiment Name: Zm_Drought_P Parameter: Plant Line Value: 35A19
  misc_feature: MA Experiment 20000480 PARAMETER Experiment Name: Zm_Drought_P Parameter: Timepoint (hr) Value: 72
  misc_feature: MA Experiment 20000480 PARAMETER Experiment Name: Zm_Drought_P Parameter: Tissue Value: Aerial
  misc_feature: MA Experiment 20000480 PARAMETER Experiment Name: Zm_Drought_P Parameter: Treatment Value: Drought vs. No Drought
  misc_feature: MA Experiment ID: 20000492 Result: Down-regulated in Transcription
  misc_feature: MA Experiment 20000492 PARAMETER Experiment Name: Zm_Hybrid_Seed_Dev_P Parameter: DAP Value: 12
  misc_feature: MA Experiment 20000492 PARAMETER Experiment Name: Zm_Hybrid_Seed_Dev_P Parameter: Organism Value: Zea mays
  misc_feature: MA Experiment 20000492 PARAMETER Experiment Name: Zm_Hybrid_Seed_Dev_P Parameter: Plant Line Value: 35A19
  misc_feature: MA Experiment 20000492 PARAMETER Experiment Name: Zm_Hybrid_Seed_Dev_P Parameter: Tissue Value: Fert Kernel vs. Unfert Floret
  misc_feature: MA Experiment ID: 20000535 Result: Down-regulated in Transcription
  misc_feature: MA Experiment 20000535 PARAMETER Experiment Name: Zm_Hybrid_Seed_Dev_P Parameter: DAP Value: 30 vs. 12
  misc_feature: MA Experiment 20000535 PARAMETER Experiment Name: Zm_Hybrid_Seed_Dev_P Parameter: Organism Value: Zea mays
  misc_feature: MA Experiment 20000535 PARAMETER Experiment Name: Zm_Hybrid_Seed_Dev_P Parameter: Plant Line Value: 35A19
  misc_feature: MA Experiment 20000535 PARAMETER Experiment Name: Zm_Hybrid_Seed_Dev_P Parameter: Tissue Value: Embryo vs. Unfert Floret
  misc_feature: MA Experiment ID: 20001608 Result: Down-regulated in Transcription
  misc_feature: MA Experiment 20001608 PARAMETER Experiment Name: Zm_50ppm_KNO3_L-to-H_P Parameter: Age (day) Value: 21
  misc_feature: MA Experiment 20001608 PARAMETER Experiment Name: Zm_50ppm_KNO3_L-to-H_P Parameter: Organism Value: Zea mays
  misc_feature: MA Experiment 20001608 PARAMETER Experiment Name: Zm_50ppm_KNO3_L-to-H_P Parameter: Plant Line Value: 35A19
  misc_feature: MA Experiment 20001608 PARAMETER Experiment Name: Zm_50ppm_KNO3_L-to-H_P Parameter: Timepoint (hr) Value: 48
  misc_feature: MA Experiment 20001608 PARAMETER Experiment Name: Zm_50ppm_KNO3_L-to-H_P Parameter: Tissue Value: Shoots
  misc_feature: MA Experiment 20001608 PARAMETER Experiment Name: Zm_50ppm_KNO3_L-to-H_P Parameter: Treatment Value: 50ppm KNO3 vs. 50ppm KCl
  misc_feature: MA Experiment ID: 20001612 Result: Down-regulated in Transcription
  misc_feature: MA Experiment 20001612 PARAMETER Experiment Name: Zm_50ppm_KNO3_L-to-H_P Parameter: Age (day) Value: 19
  misc_feature: MA Experiment 20001612 PARAMETER Experiment Name: Zm_50ppm_KNO3_L-to-H_P Parameter: Organism Value: Zea mays
  misc_feature: MA Experiment 20001612 PARAMETER Experiment Name: Zm_50ppm_KNO3_L-to-H_P Parameter: Plant Line Value: 35A19
  misc_feature: MA Experiment 20001612 PARAMETER Experiment Name: Zm_50ppm_KNO3_L-to-H_P Parameter: Timepoint (hr) Value: 8
  misc_feature: MA Experiment 20001612 PARAMETER Experiment Name: Zm_50ppm_KNO3_L-to-H_P Parameter: Tissue Value: Roots
  misc_feature: MA Experiment 20001612 PARAMETER Experiment Name: Zm_50ppm_KNO3_L-to-H_P Parameter: Treatment Value: 50ppm KNO3 vs. 50ppm KCl
gcacgagaccattacctagaacatcctaatcaaaaagagctgttcggtgacgatggtagctagctagctactactgtagtaggtaaagcctgcggcgctcgagcgagcaggaagacaaaggcaagcatggccgggggtggcttcgccgtggccgatggcccgtccgtcgactacggcggccgggtgaccttctcggtcgtcgtgacctgcctcatggcggcctccggcggcctcatcttcggttacgacatcggcatctcggggggcgtgacggcgatggagtcgttcctgtcggccttcttcccgggggtgctgcgcaggatggccgcggcgcggcgggacgagtactgcgtctacgacagccacgtcctcacggcgttcacctcgtcgctgtacctggccgggctggccgcctctctcgtcgccagccgcgtcaccagggcgatcggcaggcaggccgtcatgctcgcgggcggcgcgctcttcttcgccggcgccgccgtcaacgccgccgccgtcaacgtcgctatgctcatcgtcggacgcatgctgctgggcttcggcatcggctttaccaaccaggcggcgccggtgtacctggcggagacggcgccggccaagtggcggggcgccttcacgacggggttccagctcttcctcagcatcggcaacctggcggcgaacctggtgaactacggcacctcgcgcatcccggcgtgggggtggcgcctctcgctgggcctggccgcggcgcccgccgccgtcatcctcgcgggggcgctgctcatcccggacacgcccagcagcctcctcgtgcgcgggcgcgcggaggaggcccgcgccgcgctgcggcgcgtcaggggcgccaaggcggacgtggacgcggagctggaggacgtggcccgcgccgtggaggccgcgcgcgcccacgagcagggcgcgttccgcaggatcctccggcgggagcaccggcaccacctggccgtggccgtggcggtcccgctgttccagcagctcacgggggtcatcgtcatcgccttcttctcgcccgtgctgttccagacggccgggttcggcagcaacgccgcgctcatgggcgccgtcatcctcggcgccgtcaacctcgcctccacgctcttgtccatcgtcacggtcgaccggtacggccggcggccgctgttcctcaccggcggcttcgtcatgatcgtttgccaggtcgcggtcgcgtggatcatggggtcccagatcggggccgacggcgggtccgcgatggccaggccctactccctcgcggtgctggcgctgacgtgcgtcttctcggcggcgttcggctggtcgtggggcccgctgacctgggtgatcccaggcgagatattccccgtggagatccggtcggcggggcagggcatcagcgtggccgtcaacctgggcgccacgttcctgctcacgcagacgttcctctccatgctgtgcacgctcaagtacgccaccttcatctactacgcggcctgggtagccgtcatgaccgccttcgtcgtggcgttcctgccggagaccaagggggtgccgctcgaggccatgggcgccatctgggagcgccactggtactggagacggttcgtgcagccttctgttgcggaggacccctgatgagtgactgatgcggccttctgttgtggacgtgacacgcttccggacgttgtgtgtgtcaatggttgcagtttgtctgctgtggtcgtcgtctgaggaagagttgtctgtggacgaaggctggaaatcaatgcgtgtgccctgtccgtggtttttctaatacaggagtacgtcatgcaaggttgttaatgttaagcgaacgttcgcagtgatatagacgttatattttaagtt

SEQ ID NO: 3314 - protein, 507 aa, Zea mays subsp. mays
  peptide (1)..(507): Ceres Seq. ID no. 12379415
  misc_feature (27)..(489): Pfam Name: Sugar (and other) transporter Pfam Description: Sugar (and other) transporter
  misc_feature (1)..(499): Homolog of NCBI NO: 34914246 NR Description: putative monosaccharide transporter 3
  misc_feature (1)..(500): Homolog of NCBI NO: 15220330 NR Description: glucose transporter
  misc_feature (2)..(499): Homolog of NCBI NO: 3915039 NR Description: Sugar carrier protein C
  misc_feature (1)..(499): Homolog of NCBI NO: 34915514 NR Description: monosaccharide transporter 3
  misc_feature (1)..(501): Homolog of NCBI NO: 347855 NR Description: glucose transporter [Saccharum hybrid cultivar
  misc_feature (1)..(502): Homolog of NCBI NO: 15218693 NR Description: monosaccharide transporter, putative; protein id:
  misc_feature (15)..(498): Homolog of NCBI NO: 21741620 NR Description: OSJNBa0027G07.12 [Oryza sativa (japonica
  misc_feature (1)..(499): Homolog of NCBI NO: 21740734 NR Description: OSJNBa0086B14.28 [Oryza sativa (japonica
  misc_feature (1)..(506): Homolog of NCBI NO: 11991110 NR Description: monosaccharide transporter 1 [Oryza sativa]
  misc_feature (1)..(504): Homolog of NCBI NO: 32489200 NR Description: OSJNBa0027G07.27 [Oryza sativa (japonica
MAGGGFAVADGPSVDYGGRVTFSVVVTCLMAASGGLIFGYDIGISGGVTAMESFLSAFFPGVLRRMAAARRDEYCVYDSHVLTAFTSSLYLAGLAASLVASRVTRAIGRQAVMLAGGALFFAGAAVNAAAVNVAMLIVGRMLLGFGIGFTNQAAPVYLAETAPAKWRGAFTTGFQLFLSIGNLAANLVNYGTSRIPAWGWRLSLGLAAAPAAVILAGALLIPDTPSSLLVRGRAEEARAALRRVRGAKADVDAELEDVARAVEAARAHEQGAFRRILRREHRHHLAVAVAVPLFQQLTGVIVIAFFSPVLFQTAGFGSNAALMGAVILGAVNLASTLLSIVTVDRYGRRPLFLTGGFVMIVCQVAVAWIMGSQIGADGGSAMARPYSLAVLALTCVFSAAFGWSWGPLTWVIPGEIFPVEIRSAGQGISVAVNLGATFLLTQTFLSMLCTLKYATFIYYAAWVAVMTAFVVAFLPETKGVPLEAMGAIWERHWYWRRFVQPSVAEDP

SEQ ID NO: 3315 - protein, 478 aa, Zea mays subsp. mays
  peptide (1)..(478): Ceres Seq. ID no. 12379416
  misc_feature (1)..(460): Pfam Name: Sugar (and other) transporter Pfam Description: Sugar (and other) transporter
  misc_feature (1)..(470): Homolog of NCBI NO: 34914246 NR Description: putative monosaccharide transporter 3
  misc_feature (1)..(471): Homolog of NCBI NO: 15220330 NR Description: glucose transporter
  misc_feature (1)..(470): Homolog of NCBI NO: 3915039 NR Description: Sugar carrier protein C
  misc_feature (1)..(470): Homolog of NCBI NO: 34915514 NR Description: monosaccharide transporter 3
  misc_feature (1)..(472): Homolog of NCBI NO: 347855 NR Description: glucose transporter [Saccharum hybrid cultivar
  misc_feature (1)..(473): Homolog of NCBI NO: 15218693 NR Description: monosaccharide transporter, putative; protein id:
  misc_feature (1)..(469): Homolog of NCBI NO: 21741620 NR Description: OSJNBa0027G07.12 [Oryza sativa (japonica
  misc_feature (1)..(470): Homolog of NCBI NO: 21740734 NR Description: OSJNBa0086B14.28 [Oryza sativa (japonica
  misc_feature (1)..(477): Homolog of NCBI NO: 11991110 NR Description: monosaccharide transporter 1 [Oryza sativa]
  misc_feature (1)..(475): Homolog of NCBI NO: 32489200 NR Description: OSJNBa0027G07.27 [Oryza sativa (japonica
MAASGGLIFGYDIGISGGVTAMESFLSAFFPGVLRRMAAARRDEYCVYDSHVLTAFTSSLYLAGLAASLVASRVTRAIGRQAVMLAGGALFFAGAAVNAAAVNVAMLIVGRMLLGFGIGFTNQAAPVYLAETAPAKWRGAFTTGFQLFLSIGNLAANLVNYGTSRIPAWGWRLSLGLAAAPAAVILAGALLIPDTPSSLLVRGRAEEARAALRRVRGAKADVDAELEDVARAVEAARAHEQGAFRRILRREHRHHLAVAVAVPLFQQLTGVIVIAFFSPVLFQTAGFGSNAALMGAVILGAVNLASTLLSIVTVDRYGRRPLFLTGGFVMIVCQVAVAWIMGSQIGADGGSAMARPYSLAVLALTCVFSAAFGWSWGPLTWVIPGEIFPVEIRSAGQGISVAVNLGATFLLTQTFLSMLCTLKYATFIYYAAWVAVMTAFVVAFLPETKGVPLEAMGAIWERHWYWRRFVQPSVAEDP

SEQ ID NO: 3316 - protein, 457 aa, Zea mays subsp. mays
  peptide (1)..(457): Ceres Seq. ID no. 12379417
  misc_feature (1)..(439): Pfam Name: Sugar (and other) transporter Pfam Description: Sugar (and other) transporter
  misc_feature (1)..(449): Homolog of NCBI NO: 34914246 NR Description: putative monosaccharide transporter 3
  misc_feature (1)..(450): Homolog of NCBI NO: 15220330 NR Description: glucose transporter
  misc_feature (1)..(449): Homolog of NCBI NO: 3915039 NR Description: Sugar carrier protein C
  misc_feature (1)..(449): Homolog of NCBI NO: 34915514 NR Description: monosaccharide transporter 3
  misc_feature (1)..(451): Homolog of NCBI NO: 347855 NR Description: glucose transporter [Saccharum hybrid cultivar
  misc_feature (1)..(452): Homolog of NCBI NO: 15218693 NR Description: monosaccharide transporter, putative; protein id:
  misc_feature (1)..(448): Homolog of NCBI NO: 21741620 NR Description: OSJNBa0027G07.12 [Oryza sativa (japonica
  misc_feature (1)..(449): Homolog of NCBI NO: 21740734 NR Description: OSJNBa0086B14.28 [Oryza sativa (japonica
  misc_feature (1)..(456): Homolog of NCBI NO: 11991110 NR Description: monosaccharide transporter 1 [Oryza sativa]
  misc_feature (1)..(454): Homolog of NCBI NO: 32489200 NR Description: OSJNBa0027G07.27 [Oryza sativa (japonica
MESFLSAFFPGVLRRMAAARRDEYCVYDSHVLTAFTSSLYLAGLAASLVASRVTRAIGRQAVMLAGGALFFAGAAVNAAAVNVAMLIVGRMLLGFGIGFTNQAAPVYLAETAPAKWRGAFTTGFQLFLSIGNLAANLVNYGTSRIPAWGWRLSLGLAAAPAAVILAGALLIPDTPSSLLVRGRAEEARAALRRVRGAKADVDAELEDVARAVEAARAHEQGAFRRILRREHRHHLAVAVAVPLFQQLTGVIVIAFFSPVLFQTAGFGSNAALMGAVILGAVNLASTLLSIVTVDRYGRRPLFLTGGFVMIVCQVAVAWIMGSQIGADGGSAMARPYSLAVLALTCVFSAAFGWSWGPLTWVIPGEIFPVEIRSAGQGISVAVNLGATFLLTQTFLSMLCTLKYATFIYYAAWVAVMTAFVVAFLPETKGVPLEAMGAIWERHWYWRRFVQPSVAEDP

SEQ ID NO: 3317 - DNA, 1439 bp, Zea mays subsp. mays
  misc_feature (1)..(1439): Ceres Seq. ID no. 12343992
  misc_feature: MA Experiment ID: 108535 Result: Down-regulated in Transcription
  misc_feature: MA Experiment 108535 PARAMETER Experiment Name: Zm_Meristem_P Parameter: Age (day) Value: 8
  misc_feature: MA Experiment 108535 PARAMETER Experiment Name: Zm_Meristem_P Parameter: Organism Value: Zea mays
  misc_feature: MA Experiment 108535 PARAMETER Experiment Name: Zm_Meristem_P Parameter: Plant Line Value: 35A19
  misc_feature: MA Experiment 108535 PARAMETER Experiment Name: Zm_Meristem_P Parameter: Tissue Value: Root Meristem vs. Above Root Meristem
  misc_feature: MA Experiment ID: 108543 Result: Down-regulated in Transcription
  misc_feature: MA Experiment ID: 108556 Result: Down-regulated in Transcription
  misc_feature: MA Experiment 108556 PARAMETER Experiment Name: Zm_Drought_P Parameter: Age (day) Value: 9
  misc_feature: MA Experiment 108556 PARAMETER Experiment Name: Zm_Drought_P Parameter: Organism Value: Zea mays
  misc_feature: MA Experiment 108556 PARAMETER Experiment Name: Zm_Drought_P Parameter: Plant Line Value: 35A19
  misc_feature: MA Experiment 108556 PARAMETER Experiment Name: Zm_Drought_P Parameter: Timepoint (hr) Value: 24
  misc_feature: MA Experiment 108556 PARAMETER Experiment Name: Zm_Drought_P Parameter: Tissue Value: Aerial
  misc_feature: MA Experiment 108556 PARAMETER Experiment Name: Zm_Drought_P Parameter: Treatment Value: Drought vs. No Drought
  misc_feature: MA Experiment ID: 20000480 Result: Down-regulated in Transcription
  misc_feature: MA Experiment 20000480 PARAMETER Experiment Name: Zm_Drought_P Parameter: Age (day) Value: 11
  misc_feature: MA Experiment 20000480 PARAMETER Experiment Name: Zm_Drought_P Parameter: Organism Value: Zea mays
  misc_feature: MA Experiment 20000480 PARAMETER Experiment Name: Zm_Drought_P Parameter: Plant Line Value: 35A19
  misc_feature: MA Experiment 20000480 PARAMETER Experiment Name: Zm_Drought_P Parameter: Timepoint (hr) Value: 72
  misc_feature: MA Experiment 20000480 PARAMETER Experiment Name: Zm_Drought_P Parameter: Tissue Value: Aerial
  misc_feature: MA Experiment 20000480 PARAMETER Experiment Name: Zm_Drought_P Parameter: Treatment Value: Drought vs. No Drought
  misc_feature: MA Experiment ID: 20000534 Result: Down-regulated in Transcription
  misc_feature: MA Experiment 20000534 PARAMETER Experiment Name: Zm_Hybrid_Pollen_P Parameter: Age (day) Value: 8
  misc_feature: MA Experiment 20000534 PARAMETER Experiment Name: Zm_Hybrid_Pollen_P Parameter: Organism Value: Zea mays
  misc_feature: MA Experiment 20000534 PARAMETER Experiment Name: Zm_Hybrid_Pollen_P Parameter: Plant Line Value: 35A19
  misc_feature: MA Experiment 20000534 PARAMETER Experiment Name: Zm_Hybrid_Pollen_P Parameter: Tissue Value: Pollen vs. Aerial
  misc_feature: MA Experiment ID: 20000535 Result: Down-regulated in Transcription
  misc_feature: MA Experiment 20000535 PARAMETER Experiment Name: Zm_Hybrid_Seed_Dev_P Parameter: DAP Value: 30 vs. 12
  misc_feature: MA Experiment 20000535 PARAMETER Experiment Name: Zm_Hybrid_Seed_Dev_P Parameter: Organism Value: Zea mays
  misc_feature: MA Experiment 20000535 PARAMETER Experiment Name: Zm_Hybrid_Seed_Dev_P Parameter: Plant Line Value: 35A19
  misc_feature: MA Experiment 20000535 PARAMETER Experiment Name: Zm_Hybrid_Seed_Dev_P Parameter: Tissue Value: Embryo vs. Unfert Floret
atctttgcgcttggggcaatgacgcagcttatgaggtcataccgaggcgcgtcaattgctggttgaaaactatttccaaaccccctctttggcccactgggccactgagaatttctggaagggctccttttcctcggataagcaatcttgagtcctgggtcttcgctgccagtgccagcacgcttgtggccaagaaacgttgggggcagtttggacctcggagcagcatcatccatggcgggagaggaggccgggaggaggggcgttccctctctgctgaacccgccgtccgcttccagcgaggggcagcaagagcacatcgcctctgatgtcacacagctcatcggatggacacctctggtcgagctcaagcgaatcgccgccaaggaaggggtatgcgcgcgcatcgtcggcaaggtggaggcgtaccagcctctgtgctccgtcaaggatcgcagcgctctgagaatgatcgaagacgcagaggagagggggctgatctcgcccggcaccacgacgctcgtggagccgacgagcggcaacctggggctgggcctggtcctcgtcgccctccgcaagggctacaggttcgtcgcggtcatgccaggccagtactcgctcgacaagcagatcctgctgacatacatgggcgcagagctgtacgtaacagatccatccctcgggttcccgggcataaccgccaaggtcgaggagctcaagaaggagctgcccaacgtgcacgtcctcgaccagttctccaacagagcgaatcctgaagcgcatgttagatggactgggcctgagatctggaaggacaccgccggcaaggtggacgtattcgtggccggttcaggctcgggaggcacggtgtctggcgtcggcaagtacctcaagacgcagaaccccagcgtcaaggtcatctgcgttgagcctgccgagagcccagttgtttcaggcggggaaccaggcagccacaagatccagggaatagggccgggattcataccggaagtgctggacacctccgtcatcgacgaggccgtcacggtgaccaccgaggaggcgatggcgggcgcccggaggctggccagggaggagggcctgctcgtcggcatctcttccggagccaacctggcggcctgcttgaaggtcgcggcgcgagaagagagcaaggggaagatgatcgtcaccgtgtttccgagcgggggcgagaggtacatgacctccgacctgttcgccgccgccagagaggagtgtattgccatgacgttttgatcttcccccccaccccacagaaacatgtacggattaactggaggataaaaggacaaccgatatgttactccctcagttattgaaatagtattcgttttggccttgtaaccttttgttttgcaatcagctaaagttggttacaagaattgatgtgctctaacttt

SEQ ID NO: 3318 - protein, 346 aa, Zea mays subsp. mays
  peptide (1)..(346): Ceres Seq. ID no. 12343993
  misc_feature (33)..(324): Pfam Name: Pyridoxal-phosphate dependent enzyme Pfam Description: Pyridoxal-phosphate dependent enzyme
  misc_feature (17)..(344): Homolog of NCBI NO: 12081919 NR Description: plastidic cysteine synthase 1 [Solanum tuberosum]
  misc_feature (17)..(344): Homolog of NCBI NO: 11131628 NR Description: Cysteine synthase, chloroplast precursor sulfhydrylase) (O-acetylserine (Thiol)-lyase) (CSase B) (CS-B)
  misc_feature (15)..(341): Homolog of NCBI NO: 421795 NR Description: cysteine synthase (EC 4.2.99.8) B precursor,
  misc_feature (15)..(341): Homolog of NCBI NO: 12644209 NR Description: CYSTEINE SYNTHASE, CHLOROPLAST PRECURSOR SULFHYDRYLASE) (O-ACETYLSERINE (THIOL)-LYASE) (CSASE B) (CS-B)
  misc_feature (15)..(341): Homolog of NCBI NO: 303902 NR Description: cysteine synthase [Spinacia oleracea]
  misc_feature (1)..(346): Homolog of NCBI NO: 4574137 NR Description: cysteine synthase [Oryza sativa]
  misc_feature (4)..(346): Homolog of NCBI NO: 4574141 NR Description: cysteine synthase [Oryza sativa]
MAGEEAGRRGVPSLLNPPSASSEGQQEHIASDVTQLIGWTPLVELKRIAAKEGVCARIVGKVEAYQPLCSVKDRSALRMIEDAEERGLISPGTTTLVEPTSGNLGLGLVLVALRKGYRFVAVMPGQYSLDKQILLTYMGAELYVTDPSLGFPGITAKVEELKKELPNVHVLDQFSNRANPEAHVRWTGPEIWKDTAGKVDVFVAGSGSGGTVSGVGKYLKTQNPSVKVICVEPAESPVVSGGEPGSHKIQGIGPGFIPEVLDTSVIDEAVTVTTEEAMAGARRLAREEGLLVGISSGANLAACLKVAAREESKGKMIVTVFPSGGERYMTSDLFAAAREECIAMTF

SEQ ID NO: 3319 - protein, 268 aa, Zea mays subsp. mays
  peptide (1)..(268): Ceres Seq. ID no. 12343994
  misc_feature (1)..(246): Pfam Name: Pyridoxal-phosphate dependent enzyme Pfam Description: Pyridoxal-phosphate dependent enzyme
  misc_feature (1)..(266): Homolog of NCBI NO: 12081919 NR Description: plastidic cysteine synthase 1 [Solanum tuberosum]
  misc_feature (1)..(266): Homolog of NCBI NO: 11131628 NR Description: Cysteine synthase, chloroplast precursor sulfhydrylase) (O-acetylserine (Thiol)-lyase) (CSase B) (CS-B)
  misc_feature (1)..(263): Homolog of NCBI NO: 421795 NR Description: cysteine synthase (EC 4.2.99.8) B precursor,
  misc_feature (1)..(263): Homolog of NCBI NO: 12644209 NR Description: CYSTEINE SYNTHASE, CHLOROPLAST PRECURSOR SULFHYDRYLASE) (O-ACETYLSERINE (THIOL)-LYASE) (CSASE B) (CS-B)
  misc_feature (1)..(263): Homolog of NCBI NO: 303902 NR Description: cysteine synthase [Spinacia oleracea]
  misc_feature (1)..(268): Homolog of NCBI NO: 4574137 NR Description: cysteine synthase [Oryza sativa]
  misc_feature (1)..(268): Homolog of NCBI NO: 4574141 NR Description: cysteine synthase [Oryza sativa]
MIEDAEERGLISPGTTTLVEPTSGNLGLGLVLVALRKGYRFVAVMPGQYSLDKQILLTYMGAELYVTDPSLGFPGITAKVEELKKELPNVHVLDQFSNRANPEAHVRWTGPEIWKDTAGKVDVFVAGSGSGGTVSGVGKYLKTQNPSVKVICVEPAESPVVSGGEPGSHKIQGIGPGFIPEVLDTSVIDEAVTVTTEEAMAGARRLAREEGLLVGISSGANLAACLKVAAREESKGKMIVTVFPSGGERYMTSDLFAAAREECIAMTF

SEQ ID NO: 3320 - protein, 224 aa, Zea mays subsp. mays
  peptide (1)..(224): Ceres Seq. ID no. 12343995
  misc_feature (1)..(202): Pfam Name: Pyridoxal-phosphate dependent enzyme Pfam Description: Pyridoxal-phosphate dependent enzyme
  misc_feature (1)..(222): Homolog of NCBI NO: 12081919 NR Description: plastidic cysteine synthase 1 [Solanum tuberosum]
  misc_feature (1)..(222): Homolog of NCBI NO: 11131628 NR Description: Cysteine synthase, chloroplast precursor sulfhydrylase) (O-acetylserine (Thiol)-lyase) (CSase B) (CS-B)
  misc_feature (1)..(219): Homolog of NCBI NO: 421795 NR Description: cysteine synthase (EC 4.2.99.8) B precursor,
  misc_feature (1)..(219): Homolog of NCBI NO: 12644209 NR Description: CYSTEINE SYNTHASE, CHLOROPLAST PRECURSOR SULFHYDRYLASE) (O-ACETYLSERINE (THIOL)-LYASE) (CSASE B) (CS-B)
  misc_feature (1)..(219): Homolog of NCBI NO: 303902 NR Description: cysteine synthase [Spinacia oleracea]
  misc_feature (1)..(224): Homolog of NCBI NO: 4574137 NR Description: cysteine synthase [Oryza sativa]
  misc_feature (1)..(224): Homolog of NCBI NO: 4574141 NR Description: cysteine synthase [Oryza sativa]
MPGQYSLDKQILLTYMGAELYVTDPSLGFPGITAKVEELKKELPNVHVLDQFSNRANPEAHVRWTGPEIWKDTAGKVDVFVAGSGSGGTVSGVGKYLKTQNPSVKVICVEPAESPVVSGGEPGSHKIQGIGPGFIPEVLDTSVIDEAVTVTTEEAMAGARRLAREEGLLVGISSGANLAACLKVAAREESKGKMIVTVFPSGGERYMTSDLFAAAREECIAMTF

SEQ ID NO: 3321 - DNA, 1104 bp, Zea mays subsp. mays
  misc_feature (1)..(1104): Ceres Seq. ID no. 12410301
  misc_feature: MA Experiment ID: 108528 Result: Up-regulated in Transcription
  misc_feature: MA Experiment 108528 PARAMETER Experiment Name: Zm_Imbibed_Seeds_P Parameter: Age (day) Value: 5 vs. 2
  misc_feature: MA Experiment 108528 PARAMETER Experiment Name: Zm_Imbibed_Seeds_P Parameter: Organism Value: Zea mays
  misc_feature: MA Experiment 108528 PARAMETER Experiment Name: Zm_Imbibed_Seeds_P Parameter: Plant Line Value: 35A19
  misc_feature: MA Experiment 108528 PARAMETER Experiment Name: Zm_Imbibed_Seeds_P Parameter: Tissue Value: Aerial vs. Embryo
  misc_feature: MA Experiment ID: 108530 Result: Up-regulated in Transcription
  misc_feature: MA Experiment 108530 PARAMETER Experiment Name: Zm_Imbibed_Seeds_P Parameter: Age (day) Value: 6 vs. 2
  misc_feature: MA Experiment 108530 PARAMETER Experiment Name: Zm_Imbibed_Seeds_P Parameter: Organism Value: Zea mays
  misc_feature: MA Experiment 108530 PARAMETER Experiment Name: Zm_Imbibed_Seeds_P Parameter: Plant Line Value: 35A19
  misc_feature: MA Experiment 108530 PARAMETER Experiment Name: Zm_Imbibed_Seeds_P Parameter: Tissue Value: Aerial vs. Embryo
  misc_feature: MA Experiment ID: 108545 Result: Up-regulated in Transcription
  misc_feature: MA Experiment 108545 PARAMETER Experiment Name: Zm_Imbibed_Seeds_P Parameter: Age (day) Value: 3 vs. 2
  misc_feature: MA Experiment 108545 PARAMETER Experiment Name: Zm_Imbibed_Seeds_P Parameter: Organism Value: Zea mays
  misc_feature: MA Experiment 108545 PARAMETER Experiment Name: Zm_Imbibed_Seeds_P Parameter: Plant Line Value: 35A19
  misc_feature: MA Experiment 108545 PARAMETER Experiment Name: Zm_Imbibed_Seeds_P Parameter: Tissue Value: Aerial vs. Embryo
  misc_feature: MA Experiment ID: 108559 Result: Down-regulated in Transcription
  misc_feature: MA Experiment 108559 PARAMETER Experiment Name: Zm_5mM_NO_P Parameter: Age (day) Value: 8
  misc_feature: MA Experiment 108559 PARAMETER Experiment Name: Zm_5mM_NO_P Parameter: Organism Value: Zea mays
  misc_feature: MA Experiment 108559 PARAMETER Experiment Name: Zm_5mM_NO_P Parameter: Plant Line Value: 35A19
  misc_feature: MA Experiment 108559 PARAMETER Experiment Name: Zm_5mM_NO_P Parameter: Timepoint (hr) Value: 12
  misc_feature: MA Experiment 108559 PARAMETER Experiment Name: Zm_5mM_NO_P Parameter: Tissue Value: Aerial
  misc_feature: MA Experiment 108559 PARAMETER Experiment Name: Zm_5mM_NO_P Parameter: Treatment Value: 5mM NO vs. No Treatment
atccgccccgatccgaacccattcaattccaaattcacaaccctgccagtggttggcccgccgctgccaaatcgaatcggactccgatccgtgcagcccaccggcgagacggcgagacgccgaagctagcacacttcatgccatctgtctgacgtgatgcgtgtggcctctctgcttttactggatccctagccagctcaggagaaactcagaatagtactatagccaagtccatccagtcctttcgcggcgtcttccttgctcaccgcggctccggcgatgtcggccgccggctcggcggctctacctctccgtctacaactgggtcgtcttctccgtctacaacagccgccatcatggagattcttcatgggcttgtagggttggtgagttctccagcgtccacaactcttccagaaattggatccagattattccttatgtgaggtatcttctggagttttcccgagacccagtcacatcttcttgctactgccctgatcataagctggtctgtcactgagatcatcaggtactctttctttgcaatgaaggaggcatttggctctgcaccttcctggctatcatggcttaggtacaccgatcctactagaaaaccgaagaggtataggtatgcatgctgttcacatctcataactaccattttatttatgttccgggtaagcctttccgtcctcgaccgccctccatttttttttttctgttcgcttcagtgccttagactatctccagcagtttatttatactcgtacttgtattcaaactttactctacaaacagtgtgttaccgtgcttatagataaactttaagtaaactgctggaccaccgccgcatgcaggaagtccgcacatgtactgttacatgctctcccagaggaagaaggcactgtcaaaggccaaagcagcataattctgctcaagagctgtagaatggtagaatcaagttctcgacatttcaggtagaatctagtggttcacatgaattgcgccataggtgttgtacccggatttgtattggctatcagctgtgttcgatggttaaattgtaatttgctctgaatcacccccagttgtatcagggcc

SEQ ID NO: 3322 - protein, 91 aa, Zea mays subsp. mays
  peptide (1)..(91): Ceres Seq. ID no. 12410302
  misc_feature (1)..(18): Homolog of NCBI NO: 39594383 NR Description: Hypothetical protein CBG19031 [Caenorhabditis
  misc_feature (1)..(17): Homolog of NCBI NO: 19112492 NR Description: hypothetical protein [Schizosaccharomyces pombe]
  misc_feature (1)..(18): Homolog of NCBI NO: 6179406 NR Description: hypothetical membrane protein [Candida albicans]
  misc_feature (1)..(18): Homolog of NCBI NO: 34895862 NR Description: P0009G03.11 [Oryza sativa (japonica
  misc_feature (1)..(18): Homolog of NCBI NO: 34895856 NR Description: P0009G03.7 [Oryza sativa (japonica
  misc_feature (1)..(18): Homolog of NCBI NO: 34895854 NR Description: P0009G03.6 [Oryza sativa (japonica
  misc_feature (1)..(18): Homolog of NCBI NO: 34895864 NR Description: P0009G03.12 [Oryza sativa (japonica
  misc_feature (1)..(73): Homolog of NCBI NO: 22326707 NR Description: putative protein phosphatase
  misc_feature (1)..(18): Homolog of NCBI NO: 34895852 NR Description: P0009G03.5 [Oryza sativa (japonica
  misc_feature (1)..(18): Homolog of NCBI NO: 38344078 NR Description: OSJNBb0056F09.1 [Oryza sativa (japonica
MKEAFGSAPSWLSWLRYTDPTRKPKRYRYACCSHLITTILFMFRVSLSVLDRPPFFFFCSLQCLRLSPAVYLYSYLYSNFTLQTVCYRAYR

SEQ ID NO: 3323 - protein, 51 aa, Zea mays subsp. mays
  peptide (1)..(51): Ceres Seq. ID no. 12410303
SAPIRTHSIPNSQPCQWLARRCQIESDSDPCSPPARRRDAEASTLHAICLT

SEQ ID NO: 3324 - protein, 50 aa, Zea mays subsp. mays
  peptide (1)..(50): Ceres Seq. ID no. 12410304
  misc_feature (1)..(25): Homolog of NCBI NO: 11358666 NR Description: probable protein phosphatase - Arabidopsis
  misc_feature (1)..(40): Homolog of NCBI NO: 6179407 NR Description: hypothetical membrane protein [Candida albicans]
  misc_feature (1)..(32): Homolog of NCBI NO: 22326707 NR Description: putative protein phosphatase
MFRVSLSVLDRPPFFFFCSLQCLRLSPAVYLYSYLYSNFTLQTVCYRAYR

SEQ ID NO: 3325 - DNA, 1631 bp, Zea mays subsp. mays
  misc_feature (1)..(1631): Ceres Seq. ID no. 12410297
  misc_feature: MA Experiment ID: 108528 Result: Up-regulated in Transcription
  misc_feature: MA Experiment 108528 PARAMETER Experiment Name: Zm_Imbibed_Seeds_P Parameter: Age (day) Value: 5 vs. 2
  misc_feature: MA Experiment 108528 PARAMETER Experiment Name: Zm_Imbibed_Seeds_P Parameter: Organism Value: Zea mays
  misc_feature: MA Experiment 108528 PARAMETER Experiment Name: Zm_Imbibed_Seeds_P Parameter: Plant Line Value: 35A19
  misc_feature: MA Experiment 108528 PARAMETER Experiment Name: Zm_Imbibed_Seeds_P Parameter: Tissue Value: Aerial vs. Embryo
  misc_feature: MA Experiment ID: 108530 Result: Up-regulated in Transcription
  misc_feature: MA Experiment 108530 PARAMETER Experiment Name: Zm_Imbibed_Seeds_P Parameter: Age (day) Value: 6 vs. 2
  misc_feature: MA Experiment 108530 PARAMETER Experiment Name: Zm_Imbibed_Seeds_P Parameter: Organism Value: Zea mays
  misc_feature: MA Experiment 108530 PARAMETER Experiment Name: Zm_Imbibed_Seeds_P Parameter: Plant Line Value: 35A19
  misc_feature: MA Experiment 108530 PARAMETER Experiment Name: Zm_Imbibed_Seeds_P Parameter: Tissue Value: Aerial vs. Embryo
  misc_feature: MA Experiment ID: 108545 Result: Up-regulated in Transcription
  misc_feature: MA Experiment 108545 PARAMETER Experiment Name: Zm_Imbibed_Seeds_P Parameter: Age (day) Value: 3 vs. 2
  misc_feature: MA Experiment 108545 PARAMETER Experiment Name: Zm_Imbibed_Seeds_P Parameter: Organism Value: Zea mays
  misc_feature: MA Experiment 108545 PARAMETER Experiment Name: Zm_Imbibed_Seeds_P Parameter: Plant Line Value: 35A19
  misc_feature: MA Experiment 108545 PARAMETER Experiment Name: Zm_Imbibed_Seeds_P Parameter: Tissue Value: Aerial vs. Embryo
  misc_feature: MA Experiment ID: 108546 Result: Down-regulated in Transcription
  misc_feature: MA Experiment 108546 PARAMETER Experiment Name: Zm_Imbibed_Seeds_P Parameter: Age (day) Value: 3 vs. 2
  misc_feature: MA Experiment 108546 PARAMETER Experiment Name: Zm_Imbibed_Seeds_P Parameter: Organism Value: Zea mays
  misc_feature: MA Experiment 108546 PARAMETER Experiment Name: Zm_Imbibed_Seeds_P Parameter: Plant Line Value: 35A19
  misc_feature: MA Experiment 108546 PARAMETER Experiment Name: Zm_Imbibed_Seeds_P Parameter: Tissue Value: Roots vs. Embryo
  misc_feature: MA Experiment ID: 108547 Result: Up-regulated in Transcription
  misc_feature: MA Experiment 108547 PARAMETER Experiment Name: Zm_Imbibed_Seeds_P Parameter: Age (day) Value: 4 vs. 2
  misc_feature: MA Experiment 108547 PARAMETER Experiment Name: Zm_Imbibed_Seeds_P Parameter: Organism Value: Zea mays
  misc_feature: MA Experiment 108547 PARAMETER Experiment Name: Zm_Imbibed_Seeds_P Parameter: Plant Line Value: 35A19
  misc_feature: MA Experiment 108547 PARAMETER Experiment Name: Zm_Imbibed_Seeds_P Parameter: Tissue Value: Aerial vs. Embryo
  misc_feature: MA Experiment ID: 108687 Result: Down-regulated in Transcription
  misc_feature: MA Experiment 108687 PARAMETER Experiment Name: Zm_Embryos-Flowers__P Parameter: Tissue Value: Embryo vs. Aerial+
  misc_feature: MA Experiment ID: 108689 Result: Up-regulated in Transcription
  misc_feature: MA Experiment 108689 PARAMETER Experiment Name: Zm_Drought_Roots_P Parameter: Age (day) Value: 9
  misc_feature: MA Experiment 108689 PARAMETER Experiment Name: Zm_Drought_Roots_P Parameter: Organism Value: Zea mays
  misc_feature: MA Experiment 108689 PARAMETER Experiment Name: Zm_Drought_Roots_P Parameter: Plant Line Value: 35A19
  misc_feature: MA Experiment 108689 PARAMETER Experiment Name: Zm_Drought_Roots_P Parameter: Timepoint (hr) Value: 24
  misc_feature: MA Experiment 108689 PARAMETER Experiment Name: Zm_Drought_Roots_P Parameter: Tissue Value: Roots
  misc_feature: MA Experiment 108689 PARAMETER Experiment Name: Zm_Drought_Roots_P Parameter: Treatment Value: Drought vs. No Drought
  misc_feature: MA Experiment ID: 20000492 Result: Down-regulated in Transcription
  misc_feature: MA Experiment 20000492 PARAMETER Experiment Name: Zm_Hybrid_Seed_Dev_P Parameter: DAP Value: 12
  misc_feature: MA Experiment 20000492 PARAMETER Experiment Name: Zm_Hybrid_Seed_Dev_P Parameter: Organism Value: Zea mays
  misc_feature: MA Experiment 20000492 PARAMETER Experiment Name: Zm_Hybrid_Seed_Dev_P Parameter: Plant Line Value: 35A19
  misc_feature: MA Experiment 20000492 PARAMETER Experiment Name: Zm_Hybrid_Seed_Dev_P Parameter: Tissue Value: Fert Kernel vs. Unfert Floret
  misc_feature: MA Experiment ID: 20000535 Result: Down-regulated in Transcription
  misc_feature: MA Experiment 20000535 PARAMETER Experiment Name: Zm_Hybrid_Seed_Dev_P Parameter: DAP Value: 30 vs. 12
  misc_feature: MA Experiment 20000535 PARAMETER Experiment Name: Zm_Hybrid_Seed_Dev_P Parameter: Organism Value: Zea mays
  misc_feature: MA Experiment 20000535 PARAMETER Experiment Name: Zm_Hybrid_Seed_Dev_P Parameter: Plant Line Value: 35A19
  misc_feature: MA Experiment 20000535 PARAMETER Experiment Name: Zm_Hybrid_Seed_Dev_P Parameter: Tissue Value: Embryo vs. Unfert Floret
gcgcagcaatcctgcctcgcttccctccaaattcccaaagctctcgcgcgcggtgccatggcggagcgcctcgccgcctccctcctccctgccgcctcgccgtccccgtccgcccgccgcgcaacggtcgcagccgcagccgccgcctctttcccctccccatgctccgcccgcgcggggctgcgcctacgctcccgcccgcccctcttctcgcagaaggcggccgggcgcgggtgtggcctgcgggtggtgcggtgcatggcagcgtcggacgcggcgcagctcaaggccgcgcgggaggacatcaaggaactccttaagagcacatactgccaccccatcatggtccgtctggggtggcatgattctggtacctatgacaaggatattaaggactggccacagcgaggtggagctaatggaagtttaaggttcgatgctgagctgagtcatggagccaatgccggcctgattaatgcattgaagcttatccagcctatcaaggacaaatacccaggtatcacttatgcagatttgttccagttagcaagtgctacggcgattgaggaagctggtggtccaaaacttccaatgaaatatggacgtgttgatgtcacagcagctgaacagtgtccgcccgaggggaggcttcctgatgctggcccacgtgatcctgctgaacaccttagggaggtattttatagaatgggccttgatgacaaggaaattgttgcactatctggagcacacacacttggaagagcaaggcctgaccggagtggctggggaaagctagaaacaaaatatactaaggatgggcctggtgagcctggagggcaatcatggacagttgagtggttgaagtttgataatagttacttcaaggagatgaagttattttttttgaacgaaattcaggacatgaagtttttgagccagcttccctggaaagagcagaaggaacaggatcttctagttttgcctacagatgctgcattatttgaggacccatcgttcaaggtatacgcagaaaagtatgcagatgaccaggaagcgttctttaaagactatggtgaagctcatgctaagctgagcgatcttggtgcaaagtttgatcctcctgagggattctcactcgacgatgacacaagctcttcaccttccgacgagaagacggaagaacctacactggtagcggtaggagcggcagtagcaacagcgacagcggacgacaacaacggcgcagctccgcagccggagcccttcgtcgctgccaaatactcgtatggaaagagggagttgtcggatgcgatgaagcaaaagatcagggcggagtacgaggggtttggaggcagcccggacaagcccatgcagtccaactacttcctcaacatcatgatcctgattgcggggttggcgttcttgacatctctgcttgggaactgagtgttatatcatcatatgattatgatccgatttctgaagtctacgagtgtccactattgcaaactctgtaaacgtatgaaacatatctacgactagcattagagctacgtacactgtgcaaacagtttttttttttcgcgaattttggagagagacgagcaaaagaaatgtataacgagtgttcg

SEQ ID NO: 3326 - protein, 481 aa, Zea mays subsp. mays
  peptide (1)..(481): Ceres Seq. ID no. 12410298
  misc_feature (98)..(298): Pfam Name: Peroxidase Pfam Description: Peroxidase
  misc_feature (24)..(347): Homolog of NCBI NO: 4996602 NR Description: thylakoid-bound ascorbate peroxidase [Nicotiana
  misc_feature (317)..(380): Homolog of NCBI NO: 32879781 NR Description: stromal ascorbate peroxidase
  misc_feature (21)..(298): Homolog of NCBI NO: 32879781 NR Description: stromal ascorbate peroxidase
  misc_feature (419)..(480): Homolog of NCBI NO: 1419390 NR Description: thylakoid-bound ascorbate peroxidase [Arabidopsis
  misc_feature (317)..(381): Homolog of NCBI NO: 1419390 NR Description: thylakoid-bound ascorbate peroxidase [Arabidopsis
  misc_feature (14)..(298): Homolog of NCBI NO: 1419390 NR Description: thylakoid-bound ascorbate peroxidase [Arabidopsis
  misc_feature (419)..(480): Homolog of NCBI NO: 15223971 NR Description: thylakoid-bound ascorbate peroxidase, putative
  misc_feature (317)..(381): Homolog of NCBI NO: 15223971 NR Description: thylakoid-bound ascorbate peroxidase, putative
  misc_feature (14)..(298): Homolog of NCBI NO: 15223971 NR Description: thylakoid-bound ascorbate peroxidase, putative
  misc_feature (20)..(481): Homolog of NCBI NO: 32879783 NR Description: thylakoid-bound ascorbate peroxidase
AQQSCLASLQIPKALARGAMAERLAASLLPAASPSPSARRATVAAAAAASFPSPCSARAGLRLRSRPPLFSQKAAGRGCGLRVVRCMAASDAAQLKAAREDIKELLKSTYCHPIMVRLGWHDSGTYDKDIKDWPQRGGANGSLRFDAELSHGANAGLINALKLIQPIKDKYPGITYADLFQLASATAIEEAGGPKLPMKYGRVDVTAAEQCPPEGRLPDAGPRDPAEHLREVFYRMGLDDKEIVALSGAHTLGRARPDRSGWGKLETKYTKDGPGEPGGQSWTVEWLKFDNSYFKEMKLFFLNEIQDMKFLSQLPWKEQKEQDLLVLPTDAALFEDPSFKVYAEKYADDQEAFFKDYGEAHAKLSDLGAKFDPPEGFSLDDDTSSSPSDEKTEEPTLVAVGAAVATATADDNNGAAPQPEPFVAAKYSYGKRELSDAMKQKIRAEYEGFGGSPDKPMQSNYFLNIMILIAGLAFLTSLLGN

SEQ ID NO: 3327 - protein, 462 aa, Zea mays subsp. mays
  peptide (1)..(462): Ceres Seq. ID no. 12410299
  misc_feature (79)..(279): Pfam Name: Peroxidase Pfam Description: Peroxidase
  misc_feature (5)..(328): Homolog of NCBI NO: 4996602 NR Description: thylakoid-bound ascorbate peroxidase [Nicotiana
  misc_feature (298)..(361): Homolog of NCBI NO: 32879781 NR Description: stromal ascorbate peroxidase
  misc_feature (2)..(279): Homolog of NCBI NO: 32879781 NR Description: stromal ascorbate peroxidase
  misc_feature (400)..(461): Homolog of NCBI NO: 1419390 NR Description: thylakoid-bound ascorbate peroxidase [Arabidopsis
  misc_feature (298)..(362): Homolog of NCBI NO: 1419390 NR Description: thylakoid-bound ascorbate peroxidase [Arabidopsis
  misc_feature (1)..(279): Homolog of NCBI NO: 1419390 NR Description: thylakoid-bound ascorbate peroxidase [Arabidopsis
  misc_feature (400)..(461): Homolog of NCBI NO: 15223971 NR Description: thylakoid-bound ascorbate peroxidase, putative
  misc_feature (298)..(362): Homolog of NCBI NO: 15223971 NR Description: thylakoid-bound ascorbate peroxidase, putative
  misc_feature (1)..(279): Homolog of NCBI NO: 15223971 NR Description: thylakoid-bound ascorbate peroxidase, putative
  misc_feature (1)..(462): Homolog of NCBI NO: 32879783 NR Description: thylakoid-bound ascorbate peroxidase
MAERLAASLLPAASPSPSARRATVAAAAAASFPSPCSARAGLRLRSRPPLFSQKAAGRGCGLRVVRCMAASDAAQLKAAREDIKELLKSTYCHPIMVRLGWHDSGTYDKDIKDWPQRGGANGSLRFDAELSHGANAGLINALKLIQPIKDKYPGITYADLFQLASATAIEEAGGPKLPMKYGRVDVTAAEQCPPEGRLPDAGPRDPAEHLREVFYRMGLDDKEIVALSGAHTLGRARPDRSGWGKLETKYTKDGPGEPGGQSWTVEWLKFDNSYFKEMKLFFLNEIQDMKFLSQLPWKEQKEQDLLVLPTDAALFEDPSFKVYAEKYADDQEAFFKDYGEAHAKLSDLGAKFDPPEGFSLDDDTSSSPSDEKTEEPTLVAVGAAVATATADDNNGAAPQPEPFVAAKYSYGKRELSDAMKQKIRAEYEGFGGSPDKPMQSNYFLNIMILIAGLAFLTSLLGN

SEQ ID NO: 3328 - protein, 395 aa, Zea mays subsp. mays
  peptide (1)..(395): Ceres Seq. ID no. 12410300
  misc_feature (12)..(212): Pfam Name: Peroxidase Pfam Description: Peroxidase
  misc_feature (1)..(212): Homolog of NCBI NO: 15223971 NR Description: thylakoid-bound ascorbate peroxidase, putative
  misc_feature (1)..(395): Homolog of NCBI NO: 32879783 NR Description: thylakoid-bound ascorbate peroxidase
  misc_feature (1)..(261): Homolog of NCBI NO: 4996602 NR Description: thylakoid-bound ascorbate peroxidase [Nicotiana
  misc_feature (231)..(294): Homolog of NCBI NO: 32879781 NR Description: stromal ascorbate peroxidase
  misc_feature (1)..(212): Homolog of NCBI NO: 32879781 NR Description: stromal ascorbate peroxidase
  misc_feature (333)..(394): Homolog of NCBI NO: 1419390 NR Description: thylakoid-bound ascorbate peroxidase [Arabidopsis
  misc_feature (231)..(295): Homolog of NCBI NO: 1419390 NR Description: thylakoid-bound ascorbate peroxidase [Arabidopsis
  misc_feature (1)..(212): Homolog of NCBI NO: 1419390 NR Description: thylakoid-bound ascorbate peroxidase [Arabidopsis
  misc_feature (333)..(394): Homolog of NCBI NO: 15223971 NR Description: thylakoid-bound ascorbate peroxidase, putative
  misc_feature (231)..(295): Homolog of NCBI NO: 15223971 NR Description: thylakoid-bound ascorbate peroxidase, putative
MAASDAAQLKAAREDIKELLKSTYCHPIMVRLGWHDSGTYDKDIKDWPQRGGANGSLRFDAELSHGANAGLINALKLIQPIKDKYPGITYADLFQLASATAIEEAGGPKLPMKYGRVDVTAAEQCPPEGRLPDAGPRDPAEHLREVFYRMGLDDKEIVALSGAHTLGRARPDRSGWGKLETKYTKDGPGEPGGQSWTVEWLKFDNSYFKEMKLFFLNEIQDMKFLSQLPWKEQKEQDLLVLPTDAALFEDPSFKVYAEKYADDQEAFFKDYGEAHAKLSDLGAKFDPPEGFSLDDDTSSSPSDEKTEEPTLVAVGAAVATATADDNNGAAPQPEPFVAAKYSYGKRELSDAMKQKIRAEYEGFGGSPDKPMQSNYFLNIMILIAGLAFLTSLLGN

SEQ ID NO: 3329 - DNA, 770 bp, Zea mays subsp. mays
  misc_feature (1)..(770): Ceres Seq. ID no. 12412983
  misc_feature: MA Experiment ID: 108504 Result: Down-regulated in Transcription
  misc_feature: MA Experiment 108504 PARAMETER Experiment Name: Zm_Drought_P Parameter: Age (day) Value: 8
  misc_feature: MA Experiment 108504 PARAMETER Experiment Name: Zm_Drought_P Parameter: Organism Value: Zea mays
  misc_feature: MA Experiment 108504 PARAMETER Experiment Name: Zm_Drought_P Parameter: Plant Line Value: 35A19
  misc_feature: MA Experiment 108504 PARAMETER Experiment Name: Zm_Drought_P Parameter: Timepoint (hr) Value: 12
  misc_feature: MA Experiment 108504 PARAMETER Experiment Name: Zm_Drought_P Parameter: Tissue Value: Aerial
  misc_feature: MA Experiment 108504 PARAMETER Experiment Name: Zm_Drought_P Parameter: Treatment Value: Drought vs. No Drought
  misc_feature: MA Experiment ID: 108515 Result: Down-regulated in Transcription
  misc_feature: MA Experiment 108515 PARAMETER Experiment Name: Zm_2mM_SA_P Parameter: Age (day) Value: 8
  misc_feature: MA Experiment 108515 PARAMETER Experiment Name: Zm_2mM_SA_P Parameter: Organism Value: Zea mays
  misc_feature: MA Experiment 108515 PARAMETER Experiment Name: Zm_2mM_SA_P Parameter: Plant Line Value: 35A19
  misc_feature: MA Experiment 108515 PARAMETER Experiment Name: Zm_2mM_SA_P Parameter: Timepoint (hr) Value: 12
  misc_feature: MA Experiment 108515 PARAMETER Experiment Name: Zm_2mM_SA_P Parameter: Tissue Value: Aerial
  misc_feature: MA Experiment 108515 PARAMETER Experiment Name: Zm_2mM_SA_P Parameter: Treatment Value: 2mM SA vs. No Treatment
  misc_feature: MA Experiment ID: 108523 Result: Down-regulated in Transcription
  misc_feature: MA Experiment 108523 PARAMETER Experiment Name: Zm_42deg_Heat_P Parameter: Age (day) Value: 8
  misc_feature: MA Experiment 108523 PARAMETER Experiment Name: Zm_42deg_Heat_P Parameter: Organism Value: Zea mays
  misc_feature: MA Experiment 108523 PARAMETER Experiment Name: Zm_42deg_Heat_P Parameter: Plant Line Value: 35A19
  misc_feature: MA Experiment 108523 PARAMETER Experiment Name: Zm_42deg_Heat_P Parameter: Temperature (deg C) Value: 42 vs. 22
  misc_feature: MA Experiment 108523 PARAMETER Experiment Name: Zm_42deg_Heat_P Parameter: Timepoint (hr) Value: 6
  misc_feature: MA Experiment 108523 PARAMETER Experiment Name: Zm_42deg_Heat_P Parameter: Tissue Value: Aerial
  misc_feature: MA Experiment ID: 108535 Result: Up-regulated in Transcription
  misc_feature: MA Experiment 108535 PARAMETER Experiment Name: Zm_Meristem_P Parameter: Age (day) Value: 8
  misc_feature: MA Experiment 108535 PARAMETER Experiment Name: Zm_Meristem_P Parameter: Organism Value: Zea mays
  misc_feature: MA Experiment 108535 PARAMETER Experiment Name: Zm_Meristem_P Parameter: Plant Line Value: 35A19
  misc_feature: MA Experiment 108535 PARAMETER Experiment Name: Zm_Meristem_P Parameter: Tissue Value: Root Meristem vs. Above Root Meristem
  misc_feature: MA Experiment ID: 108543 Result: Up-regulated in Transcription
  misc_feature: MA Experiment ID: 108544 Result: Down-regulated in Transcription
  misc_feature: MA Experiment ID: 108556 Result: Down-regulated in Transcription
  misc_feature: MA Experiment 108556 PARAMETER Experiment Name: Zm_Drought_P Parameter: Age (day) Value: 9
  misc_feature: MA Experiment 108556 PARAMETER Experiment Name: Zm_Drought_P Parameter: Organism Value: Zea mays
  misc_feature: MA Experiment 108556 PARAMETER Experiment Name: Zm_Drought_P Parameter: Plant Line Value: 35A19
  misc_feature: MA Experiment 108556 PARAMETER Experiment Name: Zm_Drought_P Parameter: Timepoint (hr) Value: 24
  misc_feature: MA Experiment 108556 PARAMETER Experiment Name: Zm_Drought_P Parameter: Tissue Value: Aerial
  misc_feature: MA Experiment 108556 PARAMETER Experiment Name: Zm_Drought_P Parameter: Treatment Value: Drought vs. No Drought
  misc_feature: MA Experiment ID: 108597 Result: Down-regulated in Transcription
  misc_feature: MA Experiment 108597 PARAMETER Experiment Name: Zm_100uM_ABA_P Parameter: Age (day) Value: 9
  misc_feature: MA Experiment 108597 PARAMETER Experiment Name: Zm_100uM_ABA_P Parameter: Organism Value: Zea mays
  misc_feature: MA Experiment 108597 PARAMETER Experiment Name: Zm_100uM_ABA_P Parameter: Plant Line Value: 35A19
  misc_feature: MA Experiment 108597 PARAMETER Experiment Name: Zm_100uM_ABA_P Parameter: Timepoint (hr) Value: 24
  misc_feature: MA Experiment 108597 PARAMETER Experiment Name: Zm_100uM_ABA_P Parameter: Tissue Value: Aerial
  misc_feature: MA Experiment 108597 PARAMETER Experiment Name: Zm_100uM_ABA_P Parameter: Treatment Value: 100uM ABA vs. No Treatment
  misc_feature: MA Experiment ID: 20000477 Result: Down-regulated in Transcription
  misc_feature: MA Experiment 20000477 PARAMETER Experiment Name: Zm_5mM_SA_P Parameter: Age (day) Value: 10
  misc_feature: MA Experiment 20000477 PARAMETER Experiment Name: Zm_5mM_SA_P Parameter: Organism Value: Zea mays
  misc_feature: MA Experiment 20000477 PARAMETER Experiment Name: Zm_5mM_SA_P Parameter: Plant Line Value: 35A19
  misc_feature: MA Experiment 20000477 PARAMETER Experiment Name: Zm_5mM_SA_P Parameter: Timepoint (hr) Value: 48
  misc_feature: MA Experiment 20000477 PARAMETER Experiment Name: Zm_5mM_SA_P Parameter: Tissue Value: Aerial
  misc_feature: MA Experiment 20000477 PARAMETER Experiment Name: Zm_5mM_SA_P Parameter: Treatment Value: 5mM SA vs. No Treatment
  misc_feature: MA Experiment ID: 20000626 Result: Down-regulated in Transcription
  misc_feature: MA Experiment 20000626 PARAMETER Experiment Name: Zm_Herbicide-Treatments_P Parameter: Timepoint (hr) Value: 12
  misc_feature: MA Experiment 20000626 PARAMETER Experiment Name: Zm_Herbicide-Treatments_P Parameter: Tissue Value: Aerial
  misc_feature: MA Experiment 20000626 PARAMETER Experiment Name: Zm_Herbicide-Treatments_P Parameter: Treatment Value: Roundup vs. No Treatment
  misc_feature: MA Experiment ID: 20000632 Result: Down-regulated in Transcription
  misc_feature: MA Experiment 20000632 PARAMETER Experiment Name: Zm_Herbicide-Treatments_P Parameter: Timepoint (hr) Value: 4
  misc_feature: MA Experiment 20000632 PARAMETER Experiment Name: Zm_Herbicide-Treatments_P Parameter: Tissue Value: Aerial
  misc_feature: MA Experiment 20000632 PARAMETER Experiment Name: Zm_Herbicide-Treatments_P Parameter: Treatment Value: Glean vs. No Treatment
gaattcccctgcgcctctcacctccctgctcgaatccagcgctcacccgcgccgcgtcgagacatgtcgaagaaaatcgtggtgaagctggacctgcacgacaacaaggacaagcagaaggcgctgaaggccatctccgtgctcgtcggcatcgacgccgtgtcggtggacatggcggcgcacaagatgacggtgatcgggacggtggacccggtgcaggtggtgagcaagctgcgcanaagntcgtgggcggcgcacatcgactccgtcgggccggccaaggagcccgagaagaaggaggagaagaaggacggcggcggcgagaagaaggacggcggcggtggcgagggcaagaaggaggaaggggacgggaagaaggacggcggcggcggtggcgacggcaagaaagacggcgagggcaagaaggaggacggcgacggcaagaagcaggacggcgagggcaagaaggaggatggcgatggcaagaaggacgacaagaaggacggcggcggcggcggcgcagaggagaagaagcccgccgccgcggtgcccctgcccaagaagaccgctgagaaggcggcggccaaggaggccaagtcgcccaagaaggccgccaagtcccccaagaaggcatagaggggcgggcgcctttaccgctgtgatgttgaatgctcgtgttcagtagatctttacgtctgtagtgtcgtcgttgttattggaactggttagtagatctgtgcattgtggttgaaacgtgattccctgatttc

SEQ ID NO: 3330 - protein, 211 aa, Zea mays subsp. mays
  peptide (1)..(211): Ceres Seq. ID no. 12412984
  misc_feature (26)..(96): Pfam Name: Heavy-metal-associated domain Pfam Description: Heavy-metal-associated domain
  misc_feature (24)..(157): Homolog of NCBI NO: 15223416 NR Description: expressed protein
  misc_feature (22)..(148): Homolog of NCBI NO: 37536388 NR Description: hypothetical protein [Oryza sativa (japonica
  misc_feature (22)..(186): Homolog of NCBI NO: 34902246 NR Description: Unknown protein [Oryza sativa (japonica
  misc_feature (80)..(80): Xaa is any aa, unknown or other
  misc_feature (81)..(81): Xaa is any aa, unknown or other
EFPCASHLPARIQRSPAPRRDMSKKIVVKLDLHDNKDKQKALKAISVLVGIDAVSVDMAAHKMTVIGTVDPVQVVSKLRXXSWAAHIDSVGPAKEPEKKEEKKDGGGEKKDGGGGEGKKEEGDGKKDGGGGGDGKKDGEGKKEDGDGKKQDGEGKKEDGDGKKDDKKDGGGGGAEEKKPAAAVPLPKKTAEKAAAKEAKSPKKAAKSPKKA

SEQ ID NO: 3331 - protein, 190 aa, Zea mays subsp. mays
  peptide (1)..(190): Ceres Seq. ID no. 12412985
  misc_feature (5)..(75): Pfam Name: Heavy-metal-associated domain Pfam Description: Heavy-metal-associated domain
  misc_feature (3)..(136): Homolog of NCBI NO: 15223416 NR Description: expressed protein
  misc_feature (1)..(127): Homolog of NCBI NO: 37536388 NR Description: hypothetical protein [Oryza sativa (japonica
  misc_feature (1)..(165): Homolog of NCBI NO: 34902246 NR Description: Unknown protein [Oryza sativa (japonica
  misc_feature (59)..(59): Xaa is any aa, unknown or other
  misc_feature (60)..(60): Xaa is any aa, unknown or other
MSKKIVVKLDLHDNKDKQKALKAISVLVGIDAVSVDMAAHKMTVIGTVDPVQVVSKLRXXSWAAHIDSVGPAKEPEKKEEKKDGGGEKKDGGGGEGKKEEGDGKKDGGGGGDGKKDGEGKKEDGDGKKQDGEGKKEDGDGKKDDKKDGGGGGAEEKKPAAAVPLPKKTAEKAAAKEAKSPKKAAKSPKKA

SEQ ID NO: 3332 - protein, 189 aa, Zea mays subsp. mays
  peptide (1)..(189): Ceres Seq. ID no. 12412986
  misc_feature (2)..(189): Pfam Name: High molecular weight glutenin subunit Pfam Description: High molecular weight glutenin subunit
  misc_feature (28)..(189): Homolog of NCBI NO: 21757162 NR Description: unnamed protein product [Homo sapiens]
  misc_feature (35)..(189): Homolog of NCBI NO: 20452161 NR Description: retinitis pigmentosa GTPase regulator [Canis
  misc_feature (20)..(189): Homolog of NCBI NO: 20452161 NR Description: retinitis pigmentosa GTPase regulator [Canis
  misc_feature (23)..(189): Homolog of NCBI NO: 20452161 NR Description: retinitis pigmentosa GTPase regulator [Canis
  misc_feature (23)..(189): Homolog of NCBI NO: 9837379 NR Description: retinitis pigmentosa GTPase regulator [Homo
  misc_feature (21)..(189): Homolog of NCBI NO: 23480318 NR Description: Drosophila melanogaster CG8797 gene
  misc_feature (34)..(189): Homolog of NCBI NO: 23480318 NR Description: Drosophila melanogaster CG8797 gene
  misc_feature (27)..(189): Homolog of NCBI NO: 24664668 NR Description: Argonaute 2 CG7439-PC
  misc_feature (27)..(189): Homolog of NCBI NO: 28317062 NR Description: RE04347p [Drosophila melanogaster]
  misc_feature (27)..(189): Homolog of NCBI NO: 24664664 NR Description: Argonaute 2 CG7439-PB
  misc_feature (79)..(79): Xaa is any aa, unknown or other
  misc_feature (81)..(81): Xaa is any aa, unknown or other
IPLRLSPPCSNPALTRAASRHVEENRGEAGPARQQGQAEGAEGHLRARRHRRRVGGHGGAQDDGDRDGGPGAGGEQAAXKXVGGAHRLRRAGQGAREEGGEEGRRRREEGRRRWRGQEGGRGREEGRRRRWRRQERRRGQEGGRRRQEAGRRGQEGGWRWQEGRQEGRRRRRRRGEEARRRGAPAQEDR

SEQ ID NO: 3333 - DNA, 1206 bp, Zea mays subsp. mays
  misc_feature (1)..(1206): Ceres Seq. ID no. 12406176
  misc_feature: MA Experiment ID: 108522 Result: Down-regulated in Transcription
  misc_feature: MA Experiment 108522 PARAMETER Experiment Name: Zm_42deg_Heat_P Parameter: Age (day) Value: 8
  misc_feature: MA Experiment 108522 PARAMETER Experiment Name: Zm_42deg_Heat_P Parameter: Organism Value: Zea mays
  misc_feature: MA Experiment 108522 PARAMETER Experiment Name: Zm_42deg_Heat_P Parameter: Plant Line Value: 35A19
  misc_feature: MA Experiment 108522 PARAMETER Experiment Name: Zm_42deg_Heat_P Parameter: Temperature (deg C) Value: 42 vs. 22
  misc_feature: MA Experiment 108522 PARAMETER Experiment Name: Zm_42deg_Heat_P Parameter: Timepoint (hr) Value: 1
  misc_feature: MA Experiment 108522 PARAMETER Experiment Name: Zm_42deg_Heat_P Parameter: Tissue Value: Aerial
  misc_feature: MA Experiment ID: 108528 Result: Down-regulated in Transcription
  misc_feature: MA Experiment 108528 PARAMETER Experiment Name: Zm_Imbibed_Seeds_P Parameter: Age (day) Value: 5 vs. 2
  misc_feature: MA Experiment 108528 PARAMETER Experiment Name: Zm_Imbibed_Seeds_P Parameter: Organism Value: Zea mays
  misc_feature: MA Experiment 108528 PARAMETER Experiment Name: Zm_Imbibed_Seeds_P Parameter: Plant Line Value: 35A19
  misc_feature: MA Experiment 108528 PARAMETER Experiment Name: Zm_Imbibed_Seeds_P Parameter: Tissue Value: Aerial vs. Embryo
  misc_feature: MA Experiment ID: 108529 Result: Down-regulated in Transcription
  misc_feature: MA Experiment 108529 PARAMETER Experiment Name: Zm_Imbibed_Seeds_P Parameter: Age (day) Value: 5 vs. 2
  misc_feature: MA Experiment 108529 PARAMETER Experiment Name: Zm_Imbibed_Seeds_P Parameter: Organism Value: Zea mays
  misc_feature: MA Experiment 108529 PARAMETER Experiment Name: Zm_Imbibed_Seeds_P Parameter: Plant Line Value: 35A19
  misc_feature: MA Experiment 108529 PARAMETER Experiment Name: Zm_Imbibed_Seeds_P Parameter: Tissue Value: Roots vs. Embryo
  misc_feature: MA Experiment ID: 108530 Result: Down-regulated in Transcription
  misc_feature: MA Experiment 108530 PARAMETER Experiment Name: Zm_Imbibed_Seeds_P Parameter: Age (day) Value: 6 vs. 2
  misc_feature: MA Experiment 108530 PARAMETER Experiment Name: Zm_Imbibed_Seeds_P Parameter: Organism Value: Zea mays
  misc_feature: MA Experiment 108530 PARAMETER Experiment Name: Zm_Imbibed_Seeds_P Parameter: Plant Line Value: 35A19
  misc_feature: MA Experiment 108530 PARAMETER Experiment Name: Zm_Imbibed_Seeds_P Parameter: Tissue Value: Aerial vs. Embryo
  misc_feature: MA Experiment ID: 20000492 Result: Down-regulated in Transcription
  misc_feature: MA Experiment 20000492 PARAMETER Experiment Name: Zm_Hybrid_Seed_Dev_P Parameter: DAP Value: 12
  misc_feature: MA Experiment 20000492 PARAMETER Experiment Name: Zm_Hybrid_Seed_Dev_P Parameter: Organism Value: Zea mays
  misc_feature: MA Experiment 20000492 PARAMETER Experiment Name: Zm_Hybrid_Seed_Dev_P Parameter: Plant Line Value: 35A19
  misc_feature: MA Experiment 20000492 PARAMETER Experiment Name: Zm_Hybrid_Seed_Dev_P Parameter: Tissue Value: Fert Kernel vs. Unfert Floret
  misc_feature: MA Experiment ID: 20000535 Result: Down-regulated in Transcription
  misc_feature: MA Experiment 20000535 PARAMETER Experiment Name: Zm_Hybrid_Seed_Dev_P Parameter: DAP Value: 30 vs. 12
  misc_feature: MA Experiment 20000535 PARAMETER Experiment Name: Zm_Hybrid_Seed_Dev_P Parameter: Organism Value: Zea mays
  misc_feature: MA Experiment 20000535 PARAMETER Experiment Name: Zm_Hybrid_Seed_Dev_P Parameter: Plant Line Value: 35A19
  misc_feature: MA Experiment 20000535 PARAMETER Experiment Name: Zm_Hybrid_Seed_Dev_P Parameter: Tissue Value: Embryo vs. Unfert Floret
gcacgagaccattacctagaacatcctaatcaaaagatcgggctgccctgccgcctcttgctcccttcctcctctcgcccagcagcctagctacttgagcgagacgagctccagctgaggaagtgagaggtcgtggtccgagaggcgtgcgtgcgtggccatggacggcgccgaggacgacgggacggagtggatgatgcatggtgccggagggaagggaaaaggcggcggcgcgctcgacaagaacaagaagcgcttcagcgacgagcagaccaagtcgctggagtccatgttcgcgacgcaggccaagctggagccgcgccagaagctgcagctggcgcgggagctcggcctgcagccgcgccaggtcgccatctggttccagaacaagcgcgcgcgctggaagtccaagcagctggagcgcgagtactcggcgctgcgcgacgactaccacgcgctcctctgcagctacgagtccctcaaggacgagaagcgcgcgctcctcaagcagctggagaagctggccgagatgctgcacgagccgccgcagggcaagtactacggcggcaatgcggacgacgtgcgctcgggcggcgtcggcggcacgaaggaggaggaggagtccacagacgcctgcgccggggccgcgctctactcgtccgagtgcgctggcggtggcaggttcatcgcgcacttcttggcggacgacgacgtgggagcagccctcttccggccgccgtcgtctccgcagccgaccgctggcttactcacgtcgtcggggccgccggagcaccagccgttccagttccactccggctactgctggccgtcgtcgtcggcggagcagacctgcagcggctcgcaatggtgggagttcgagtccctcagcgagtgacgtacgatgatcacaagcggccgggggtcactcggttccaagcacacgtaagggccgggccaatacgagttcgttcgtagcggtctcgtcactcgtcagctagccctgcagagcaacggtgtatgcatagcttcagtagatcgaagtccaggtccaggactgcccatcaagcagtttcttcttctcgccatcgatcatcgatcatgcatgcaaaagatttttttttctctcccttgctatcagatcatgtaatccagcagaggaacatgtagagaaagatcaaacgaggttatagagagaaggtcgcctgc

SEQ ID NO: 3334 - protein, 244 aa, Zea mays subsp. mays
  peptide (1)..(244): Ceres Seq. ID no. 12406177
  misc_feature (30)..(83): Pfam Name: Homeobox domain Pfam Description: Homeobox domain
  misc_feature (1)..(220): Homolog of NCBI NO: 5006853 NR Description: homeodomain leucine zipper protein [Oryza sativa]
  misc_feature (28)..(125): Homolog of NCBI NO: 37147908 NR Description: HD-ZIP [Capsicum annuum]
  misc_feature (29)..(134): Homolog of NCBI NO: 11357332 NR Description: homeobox-leucine zipper protein ATHB-12
  misc_feature (29)..(134): Homolog of NCBI NO: 15228625 NR Description: homeobox-leucine zipper protein ATHB-12
  misc_feature (29)..(130): Homolog of NCBI NO: 15226424 NR Description: homeodomain transcription factor  (ATHB-7)
  misc_feature (29)..(130): Homolog of NCBI NO: 629527 NR Description: homeotic protein Athb-7 - Arabidopsis thaliana
  misc_feature (25)..(131): Homolog of NCBI NO: 5031277 NR Description: homeobox leucine zipper protein [Prunus armeniaca]
  misc_feature (10)..(173): Homolog of NCBI NO: 29367373 NR Description: homeodomain leucine zipper protein-like protein
  misc_feature (224)..(241): Homolog of NCBI NO: 5006857 NR Description: homeodomain leucine zipper protein [Oryza sativa]
  misc_feature (1)..(173): Homolog of NCBI NO: 5006857 NR Description: homeodomain leucine zipper protein [Oryza sativa]
MDGAEDDGTEWMMHGAGGKGKGGGALDKNKKRFSDEQTKSLESMFATQAKLEPRQKLQLARELGLQPRQVAIWFQNKRARWKSKQLEREYSALRDDYHALLCSYESLKDEKRALLKQLEKLAEMLHEPPQGKYYGGNADDVRSGGVGGTKEEEESTDACAGAALYSSECAGGGRFIAHFLADDDVGAALFRPPSSPQPTAGLLTSSGPPEHQPFQFHSGYCWPSSSAEQTCSGSQWWEFESLSE

SEQ ID NO: 3335 - protein, 234 aa, Zea mays subsp. mays
  peptide (1)..(234): Ceres Seq. ID no. 12406178
  misc_feature (9)..(234): Homolog of NCBI NO: 15901602 NR Description: cell wall surface anchor family protein
  misc_feature (1)..(234): Homolog of NCBI NO: 15901602 NR Description: cell wall surface anchor family protein
  misc_feature (9)..(234): Homolog of NCBI NO: 15901602 NR Description: cell wall surface anchor family protein
  misc_feature (9)..(234): Homolog of NCBI NO: 15901602 NR Description: cell wall surface anchor family protein
  misc_feature (1)..(234): Homolog of NCBI NO: 15901602 NR Description: cell wall surface anchor family protein
  misc_feature (9)..(234): Homolog of NCBI NO: 15901602 NR Description: cell wall surface anchor family protein
  misc_feature (1)..(234): Homolog of NCBI NO: 6649242 NR Description: splicing coactivator subunit SRm300 [Homo sapiens]
  misc_feature (5)..(234): Homolog of NCBI NO: 6649242 NR Description: splicing coactivator subunit SRm300 [Homo sapiens]
  misc_feature (1)..(234): Homolog of NCBI NO: 6649242 NR Description: splicing coactivator subunit SRm300 [Homo sapiens]
  misc_feature (1)..(232): Homolog of NCBI NO: 6649242 NR Description: splicing coactivator subunit SRm300 [Homo sapiens]
MVPEGREKAAARSTRTRSASATSRPSRWSPCSRRRPSWSRARSCSWRGSSACSRARSPSGSRTSARAGSPSSWSASTRRCATTTTRSSAATSPSRTRSARSSSSWRSWPRCCTSRRRASTTAAMRTTCARAASAARRRRRSPQTPAPGPRSTRPSALAVAGSSRTSWRTTTWEQPSSGRRRLRSRPLAYSRRRGRRSTSRSSSTPATAGRRRRRSRPAAARNGGSSSPSASDVR

SEQ ID NO: 3336 - protein, 233 aa, Zea mays subsp. mays
  peptide (1)..(233): Ceres Seq. ID no. 12406179
  misc_feature (19)..(72): Pfam Name: Homeobox domain Pfam Description: Homeobox domain
  misc_feature (1)..(209): Homolog of NCBI NO: 5006853 NR Description: homeodomain leucine zipper protein [Oryza sativa]
  misc_feature (17)..(114): Homolog of NCBI NO: 37147908 NR Description: HD-ZIP [Capsicum annuum]
  misc_feature (18)..(123): Homolog of NCBI NO: 11357332 NR Description: homeobox-leucine zipper protein ATHB-12
  misc_feature (18)..(123): Homolog of NCBI NO: 15228625 NR Description: homeobox-leucine zipper protein ATHB-12
  misc_feature (18)..(119): Homolog of NCBI NO: 15226424 NR Description: homeodomain transcription factor  (ATHB-7)
  misc_feature (18)..(119): Homolog of NCBI NO: 629527 NR Description: homeotic protein Athb-7 - Arabidopsis thaliana
  misc_feature (14)..(120): Homolog of NCBI NO: 5031277 NR Description: homeobox leucine zipper protein [Prunus armeniaca]
  misc_feature (1)..(162): Homolog of NCBI NO: 29367373 NR Description: homeodomain leucine zipper protein-like protein
  misc_feature (213)..(230): Homolog of NCBI NO: 5006857 NR Description: homeodomain leucine zipper protein [Oryza sativa]
  misc_feature (1)..(162): Homolog of NCBI NO: 5006857 NR Description: homeodomain leucine zipper protein [Oryza sativa]
MMHGAGGKGKGGGALDKNKKRFSDEQTKSLESMFATQAKLEPRQKLQLARELGLQPRQVAIWFQNKRARWKSKQLEREYSALRDDYHALLCSYESLKDEKRALLKQLEKLAEMLHEPPQGKYYGGNADDVRSGGVGGTKEEEESTDACAGAALYSSECAGGGRFIAHFLADDDVGAALFRPPSSPQPTAGLLTSSGPPEHQPFQFHSGYCWPSSSAEQTCSGSQWWEFESLSE

SEQ ID NO: 3337 - DNA, 1343 bp, Zea mays subsp. mays
  misc_feature (1)..(1343): Ceres Seq. ID no. 12410293
  misc_feature: MA Experiment ID: 108515 Result: Down-regulated in Transcription
  misc_feature: MA Experiment 108515 PARAMETER Experiment Name: Zm_2mM_SA_P Parameter: Age (day) Value: 8
  misc_feature: MA Experiment 108515 PARAMETER Experiment Name: Zm_2mM_SA_P Parameter: Organism Value: Zea mays
  misc_feature: MA Experiment 108515 PARAMETER Experiment Name: Zm_2mM_SA_P Parameter: Plant Line Value: 35A19
  misc_feature: MA Experiment 108515 PARAMETER Experiment Name: Zm_2mM_SA_P Parameter: Timepoint (hr) Value: 12
  misc_feature: MA Experiment 108515 PARAMETER Experiment Name: Zm_2mM_SA_P Parameter: Tissue Value: Aerial
  misc_feature: MA Experiment 108515 PARAMETER Experiment Name: Zm_2mM_SA_P Parameter: Treatment Value: 2mM SA vs. No Treatment
  misc_feature: MA Experiment ID: 108527 Result: Down-regulated in Transcription
  misc_feature: MA Experiment 108527 PARAMETER Experiment Name: Zm_5mM_NO_P Parameter: Age (day) Value: 8
  misc_feature: MA Experiment 108527 PARAMETER Experiment Name: Zm_5mM_NO_P Parameter: Organism Value: Zea mays
  misc_feature: MA Experiment 108527 PARAMETER Experiment Name: Zm_5mM_NO_P Parameter: Plant Line Value: 35A19
  misc_feature: MA Experiment 108527 PARAMETER Experiment Name: Zm_5mM_NO_P Parameter: Timepoint (hr) Value: 6
  misc_feature: MA Experiment 108527 PARAMETER Experiment Name: Zm_5mM_NO_P Parameter: Tissue Value: Aerial
  misc_feature: MA Experiment 108527 PARAMETER Experiment Name: Zm_5mM_NO_P Parameter: Treatment Value: 5mM NO vs. No Treatment
  misc_feature: MA Experiment ID: 108528 Result: Up-regulated in Transcription
  misc_feature: MA Experiment 108528 PARAMETER Experiment Name: Zm_Imbibed_Seeds_P Parameter: Age (day) Value: 5 vs. 2
  misc_feature: MA Experiment 108528 PARAMETER Experiment Name: Zm_Imbibed_Seeds_P Parameter: Organism Value: Zea mays
  misc_feature: MA Experiment 108528 PARAMETER Experiment Name: Zm_Imbibed_Seeds_P Parameter: Plant Line Value: 35A19
  misc_feature: MA Experiment 108528 PARAMETER Experiment Name: Zm_Imbibed_Seeds_P Parameter: Tissue Value: Aerial vs. Embryo
  misc_feature: MA Experiment ID: 108544 Result: Down-regulated in Transcription
  misc_feature: MA Experiment ID: 108545 Result: Up-regulated in Transcription
  misc_feature: MA Experiment 108545 PARAMETER Experiment Name: Zm_Imbibed_Seeds_P Parameter: Age (day) Value: 3 vs. 2
  misc_feature: MA Experiment 108545 PARAMETER Experiment Name: Zm_Imbibed_Seeds_P Parameter: Organism Value: Zea mays
  misc_feature: MA Experiment 108545 PARAMETER Experiment Name: Zm_Imbibed_Seeds_P Parameter: Plant Line Value: 35A19
  misc_feature: MA Experiment 108545 PARAMETER Experiment Name: Zm_Imbibed_Seeds_P Parameter: Tissue Value: Aerial vs. Embryo
  misc_feature: MA Experiment ID: 108547 Result: Up-regulated in Transcription
  misc_feature: MA Experiment 108547 PARAMETER Experiment Name: Zm_Imbibed_Seeds_P Parameter: Age (day) Value: 4 vs. 2
  misc_feature: MA Experiment 108547 PARAMETER Experiment Name: Zm_Imbibed_Seeds_P Parameter: Organism Value: Zea mays
  misc_feature: MA Experiment 108547 PARAMETER Experiment Name: Zm_Imbibed_Seeds_P Parameter: Plant Line Value: 35A19
  misc_feature: MA Experiment 108547 PARAMETER Experiment Name: Zm_Imbibed_Seeds_P Parameter: Tissue Value: Aerial vs. Embryo
  misc_feature: MA Experiment ID: 108559 Result: Down-regulated in Transcription
  misc_feature: MA Experiment 108559 PARAMETER Experiment Name: Zm_5mM_NO_P Parameter: Age (day) Value: 8
  misc_feature: MA Experiment 108559 PARAMETER Experiment Name: Zm_5mM_NO_P Parameter: Organism Value: Zea mays
  misc_feature: MA Experiment 108559 PARAMETER Experiment Name: Zm_5mM_NO_P Parameter: Plant Line Value: 35A19
  misc_feature: MA Experiment 108559 PARAMETER Experiment Name: Zm_5mM_NO_P Parameter: Timepoint (hr) Value: 12
  misc_feature: MA Experiment 108559 PARAMETER Experiment Name: Zm_5mM_NO_P Parameter: Tissue Value: Aerial
  misc_feature: MA Experiment 108559 PARAMETER Experiment Name: Zm_5mM_NO_P Parameter: Treatment Value: 5mM NO vs. No Treatment
  misc_feature: MA Experiment ID: 20000478 Result: Down-regulated in Transcription
  misc_feature: MA Experiment 20000478 PARAMETER Experiment Name: Zm_5mM_SA_P Parameter: Age (day) Value: 11
  misc_feature: MA Experiment 20000478 PARAMETER Experiment Name: Zm_5mM_SA_P Parameter: Organism Value: Zea mays
  misc_feature: MA Experiment 20000478 PARAMETER Experiment Name: Zm_5mM_SA_P Parameter: Plant Line Value: 35A19
  misc_feature: MA Experiment 20000478 PARAMETER Experiment Name: Zm_5mM_SA_P Parameter: Timepoint (hr) Value: 72
  misc_feature: MA Experiment 20000478 PARAMETER Experiment Name: Zm_5mM_SA_P Parameter: Tissue Value: Aerial
  misc_feature: MA Experiment 20000478 PARAMETER Experiment Name: Zm_5mM_SA_P Parameter: Treatment Value: 5mM SA vs. No Treatment
atatcttagttgcacggttaggtaagacatatggacacaggcagttgcgtctctgtctcttatatacatatgctagatttgctatattgagttgacatgccgttagttgcgatttgcgaagctagctcccaccatctgcgacgccatgtcttcttcctctgtccaacaaacggcctttcccgagcaagaagccgatgcggaaggcgaaacgaaccctgagctctaccagcatttcgccaacttggtctcctccctgccgagctccaaaggcttgtccaacaacaaattctaccgccacgaccaaggctggcactgcagcgtggtgggcatagtgggcgccatggtcgccgacgcgtgcttcagcgcgcgcccctcggacgtcatcgtcgccaccctgcccaagtccggcaccacgtggatgaagtcgctcctgtacgccaccgtgcaccggagagagcgtcccgtcgtcggcgccgccgccgaccagcatcctctcaacagctggggcccccacgaactcatcaagttcttcgagtaccagctctacacgcgggacagggtcccggacctggacaggctccccgaccctcggctcttcgcgacgcacgtccctttcgtgtcgctgccgagctccgtggtcgccacgccgggctgcaagatcgtctacgtgtgccgcgaccccaaggaccacctcgtctccctgtgggacttcgtcaacaaatacttcagggtcaaggatgggctcgagcctctctccgtggaggccgccgccgagctgttctgcgccggcctgaccccgttcgggccgtactgggaccacgtgctcggctactggcgcgcgcaccgcgcggaccccgacaaggtgctcttcttcaggtacgaggagatgcagagggaccccgcggcgcacgtccgcaggctggcggagttcgtcggcctcccattcagctccgaggaggaggacggcggcgtggtggatgccgtcgtggggctgtgctcgttcgagcgcatgaggggcatggcgccgaccaaggcgtggcaggactgagttcccgatcggcgtggtgcccaacagctccttcttccggcagggcgtggtgggggactgggtgaaccacctgtcaccggagatggcgcgccgcattgacgcgatcactgcagacaagttcaggggttcgagtctcgtcgtctagctagctgttacggatcaatcatcactcatcatcagtgcgccactctaccgtggtttctcaaatgctcaataatgcaaggactacctattagtattctatatctatactattctattaataagaacttatatatgttgctatcgcggctcc

SEQ ID NO: 3338 - protein, 300 aa, Zea mays subsp. mays
  peptide (1)..(300): Ceres Seq. ID no. 12410294
  misc_feature (77)..(291): Pfam Name: Sulfotransferase domain Pfam Description: Sulfotransferase domain
  misc_feature (14)..(296): Homolog of NCBI NO: 15222843 NR Description: steroid sulfotransferase, putative
  misc_feature (1)..(292): Homolog of NCBI NO: 38346451 NR Description: OSJNBa0018J19.12 [Oryza sativa (japonica
  misc_feature (19)..(297): Homolog of NCBI NO: 15809903 NR Description: AT5g07010/MOJ9_18 [Arabidopsis thaliana]
  misc_feature (19)..(297): Homolog of NCBI NO: 18415376 NR Description: steroid sulfotransferase-like protein
  misc_feature (19)..(297): Homolog of NCBI NO: 9759557 NR Description: steroid sulfotransferase-like protein
  misc_feature (1)..(300): Homolog of NCBI NO: 15221820 NR Description: flavonol 4'-sulfotransferase, putative; protein
  misc_feature (12)..(297): Homolog of NCBI NO: 30681703 NR Description: sulfotransferase family [Arabidopsis thaliana]
  misc_feature (12)..(297): Homolog of NCBI NO: 9759556 NR Description: steroid sulfotransferase-like protein
  misc_feature (16)..(291): Homolog of NCBI NO: 34894524 NR Description: putative steroid sulfotransferase
  misc_feature (1)..(297): Homolog of NCBI NO: 38344441 NR Description: OSJNBa0038O10.13 [Oryza sativa (japonica
MSSSSVQQTAFPEQEADAEGETNPELYQHFANLVSSLPSSKGLSNNKFYRHDQGWHCSVVGIVGAMVADACFSARPSDVIVATLPKSGTTWMKSLLYATVHRRERPVVGAAADQHPLNSWGPHELIKFFEYQLYTRDRVPDLDRLPDPRLFATHVPFVSLPSSVVATPGCKIVYVCRDPKDHLVSLWDFVNKYFRVKDGLEPLSVEAAAELFCAGLTPFGPYWDHVLGYWRAHRADPDKVLFFRYEEMQRDPAAHVRRLAEFVGLPFSSEEEDGGVVDAVVGLCSFERMRGMAPTKAWQD

SEQ ID NO: 3339 - protein, 235 aa, Zea mays subsp. mays
  peptide (1)..(235): Ceres Seq. ID no. 12410295
  misc_feature (12)..(226): Pfam Name: Sulfotransferase domain Pfam Description: Sulfotransferase domain
  misc_feature (1)..(231): Homolog of NCBI NO: 15222843 NR Description: steroid sulfotransferase, putative
  misc_feature (1)..(227): Homolog of NCBI NO: 38346451 NR Description: OSJNBa0018J19.12 [Oryza sativa (japonica
  misc_feature (1)..(232): Homolog of NCBI NO: 15809903 NR Description: AT5g07010/MOJ9_18 [Arabidopsis thaliana]
  misc_feature (1)..(232): Homolog of NCBI NO: 18415376 NR Description: steroid sulfotransferase-like protein
  misc_feature (1)..(232): Homolog of NCBI NO: 9759557 NR Description: steroid sulfotransferase-like protein
  misc_feature (1)..(235): Homolog of NCBI NO: 15221820 NR Description: flavonol 4'-sulfotransferase, putative; protein
  misc_feature (1)..(232): Homolog of NCBI NO: 30681703 NR Description: sulfotransferase family [Arabidopsis thaliana]
  misc_feature (1)..(232): Homolog of NCBI NO: 9759556 NR Description: steroid sulfotransferase-like protein
  misc_feature (1)..(226): Homolog of NCBI NO: 34894524 NR Description: putative steroid sulfotransferase
  misc_feature (1)..(232): Homolog of NCBI NO: 38344441 NR Description: OSJNBa0038O10.13 [Oryza sativa (japonica
MVADACFSARPSDVIVATLPKSGTTWMKSLLYATVHRRERPVVGAAADQHPLNSWGPHELIKFFEYQLYTRDRVPDLDRLPDPRLFATHVPFVSLPSSVVATPGCKIVYVCRDPKDHLVSLWDFVNKYFRVKDGLEPLSVEAAAELFCAGLTPFGPYWDHVLGYWRAHRADPDKVLFFRYEEMQRDPAAHVRRLAEFVGLPFSSEEEDGGVVDAVVGLCSFERMRGMAPTKAWQD

SEQ ID NO: 3340 - protein, 209 aa, Zea mays subsp. mays
  peptide (1)..(209): Ceres Seq. ID no. 12410296
  misc_feature (1)..(200): Pfam Name: Sulfotransferase domain Pfam Description: Sulfotransferase domain
  misc_feature (1)..(201): Homolog of NCBI NO: 38346451 NR Description: OSJNBa0018J19.12 [Oryza sativa (japonica
  misc_feature (1)..(206): Homolog of NCBI NO: 15809903 NR Description: AT5g07010/MOJ9_18 [Arabidopsis thaliana]
  misc_feature (1)..(206): Homolog of NCBI NO: 18415376 NR Description: steroid sulfotransferase-like protein
  misc_feature (1)..(206): Homolog of NCBI NO: 9759557 NR Description: steroid sulfotransferase-like protein
  misc_feature (1)..(209): Homolog of NCBI NO: 15221820 NR Description: flavonol 4'-sulfotransferase, putative; protein
  misc_feature (1)..(205): Homolog of NCBI NO: 15222843 NR Description: steroid sulfotransferase, putative
  misc_feature (1)..(206): Homolog of NCBI NO: 30681703 NR Description: sulfotransferase family [Arabidopsis thaliana]
  misc_feature (1)..(206): Homolog of NCBI NO: 9759556 NR Description: steroid sulfotransferase-like protein
  misc_feature (1)..(200): Homolog of NCBI NO: 34894524 NR Description: putative steroid sulfotransferase
  misc_feature (1)..(206): Homolog of NCBI NO: 38344441 NR Description: OSJNBa0038O10.13 [Oryza sativa (japonica
MKSLLYATVHRRERPVVGAAADQHPLNSWGPHELIKFFEYQLYTRDRVPDLDRLPDPRLFATHVPFVSLPSSVVATPGCKIVYVCRDPKDHLVSLWDFVNKYFRVKDGLEPLSVEAAAELFCAGLTPFGPYWDHVLGYWRAHRADPDKVLFFRYEEMQRDPAAHVRRLAEFVGLPFSSEEEDGGVVDAVVGLCSFERMRGMAPTKAWQD

SEQ ID NO: 3341 - DNA, 1332 bp, Zea mays subsp. mays
  misc_feature (1)..(1332): Ceres Seq. ID no. 12407298
  misc_feature: MA Experiment ID: 108535 Result: Up-regulated in Transcription
  misc_feature: MA Experiment 108535 PARAMETER Experiment Name: Zm_Meristem_P Parameter: Age (day) Value: 8
  misc_feature: MA Experiment 108535 PARAMETER Experiment Name: Zm_Meristem_P Parameter: Organism Value: Zea mays
  misc_feature: MA Experiment 108535 PARAMETER Experiment Name: Zm_Meristem_P Parameter: Plant Line Value: 35A19
  misc_feature: MA Experiment 108535 PARAMETER Experiment Name: Zm_Meristem_P Parameter: Tissue Value: Root Meristem vs. Above Root Meristem
  misc_feature: MA Experiment ID: 108556 Result: Down-regulated in Transcription
  misc_feature: MA Experiment 108556 PARAMETER Experiment Name: Zm_Drought_P Parameter: Age (day) Value: 9
  misc_feature: MA Experiment 108556 PARAMETER Experiment Name: Zm_Drought_P Parameter: Organism Value: Zea mays
  misc_feature: MA Experiment 108556 PARAMETER Experiment Name: Zm_Drought_P Parameter: Plant Line Value: 35A19
  misc_feature: MA Experiment 108556 PARAMETER Experiment Name: Zm_Drought_P Parameter: Timepoint (hr) Value: 24
  misc_feature: MA Experiment 108556 PARAMETER Experiment Name: Zm_Drought_P Parameter: Tissue Value: Aerial
  misc_feature: MA Experiment 108556 PARAMETER Experiment Name: Zm_Drought_P Parameter: Treatment Value: Drought vs. No Drought
  misc_feature: MA Experiment ID: 20000108 Result: Up-regulated in Transcription
  misc_feature: MA Experiment 20000108 PARAMETER Experiment Name: Zm_Root-Tips_P Parameter: Age (day) Value: 12
  misc_feature: MA Experiment 20000108 PARAMETER Experiment Name: Zm_Root-Tips_P Parameter: Organism Value: Zea mays
  misc_feature: MA Experiment 20000108 PARAMETER Experiment Name: Zm_Root-Tips_P Parameter: Tissue Value: Root tips vs. Root mid region    35
  misc_feature: MA Experiment 20000108 PARAMETER Experiment Name: Zm_Root-Tips_P Parameter: Tissue Value: Root tips vs. Root mid region   Sequence Listing-Misc Features (4)
  misc_feature: MA Experiment ID: 20000492 Result: Up-regulated in Transcription
  misc_feature: MA Experiment 20000492 PARAMETER Experiment Name: Zm_Hybrid_Seed_Dev_P Parameter: DAP Value: 12
  misc_feature: MA Experiment 20000492 PARAMETER Experiment Name: Zm_Hybrid_Seed_Dev_P Parameter: Organism Value: Zea mays
  misc_feature: MA Experiment 20000492 PARAMETER Experiment Name: Zm_Hybrid_Seed_Dev_P Parameter: Plant Line Value: 35A19
  misc_feature: MA Experiment 20000492 PARAMETER Experiment Name: Zm_Hybrid_Seed_Dev_P Parameter: Tissue Value: Fert Kernel vs. Unfert Floret
aatataggcaccccgcaccccgttggcgtttgcccgtcctgactcctcgtccccgtgcacaccaccctcgtctccgcgcccgcgccactcacatcgtgatcgagacgacccgcgtcctccgcggtccgcgcccgcgcaccatctcgcctcgcattcccgaaagtatctgtattccttgatcaacatgtcgcgggaggagaatgtttatatggccaagctggctgagcaagcagaacggtacgaggaaatggttgaatacatggagaaggtggctaagaccacagatgtgcaagagctcactgttgaggagcgtaaccttctatctgttgcctacaagaatgtgattgcggccccccgtgcctcatggcgcattatctcctccatcgagcagaaagaggagtcccgtaagaatgaggaacatgttgcacagatcaaggaataccgtggcaagattgaggctgaattgagcaacatttgtgatggtatcctaaagctgcttgacacgcaccttgtgccttcctccactgccacagagtcgaaggtgttttacctcaagatgaagggtgattatcacaggtaccttgctgagtttaagactggtgctgagaggaaggaatctgcagagagcacaatggtagcttataaggcagctcaggatattgcattggctgaactgccacctattcatcccataaggcttggacttgcacttaacttctcagttttctattacgagattcagaactctccagacaaagcttgcaatcttgccaaggaggcgtttgatgaagctatttctcagttggacatgcttggtgaggattcctacaaagatagcaacttgattatgcagctcctgagggacaacttgaccctctggacggaggacggcattgaggagggcttagaatcctctaagggcgatgctggtgagggtcagtagcctggtaaacttagattgatggttcgacgtgtttctcaagcacatcgtgttggacgcccagtgctgacaaaaggcttttgctgctccatgcattccaagcttctgccccctcgttcgcaccctctttatgttgttggctggtagtggtcagatttagtcccattggtttagttggccctgggtccatctgaactgatgtattgttactgctatggaagtcattcctttagttttgctctggcagtggattgctgttgggtcgtgttttcagtctttattggtttccgatcggacgctgttgcgggcaaaccacccctgtagatactcttcacatgctgaagaaaactaccagcagccgtttagcctgaataattgctaaatgataggtt

SEQ ID NO: 3342 - protein, 252 aa, Zea mays subsp. mays
  peptide (1)..(252): Ceres Seq. ID no. 12407299
  misc_feature (3)..(240): Pfam Name: 14-3-3 protein Pfam Description: 14-3-3 protein
  misc_feature (2)..(250): Homolog of NCBI NO: 3023187 NR Description: 14-3-3-LIKE PROTEIN (G-BOX BINDING FACTOR)
  misc_feature (1)..(252): Homolog of NCBI NO: 7435015 NR Description: 14-3-3 protein - barley
  misc_feature (2)..(251): Homolog of NCBI NO: 13702816 NR Description: putative 14-3-3 protein [Oryza sativa]
  misc_feature (1)..(252): Homolog of NCBI NO: 2492487 NR Description: 14-3-3-LIKE PROTEIN B (14-3-3B)
  misc_feature (1)..(252): Homolog of NCBI NO: 7435021 NR Description: GF14-b protein - rice
  misc_feature (2)..(252): Homolog of NCBI NO: 12229593 NR Description: 14-3-3-like protein
  misc_feature (2)..(252): Homolog of NCBI NO: 2921512 NR Description: GF14 protein [Fritillaria agrestis]
  misc_feature (1)..(252): Homolog of NCBI NO: 7271253 NR Description: 14-3-3-like protein [Oryza sativa]
  misc_feature (1)..(252): Homolog of NCBI NO: 7435022 NR Description: GF14-c protein - rice
  misc_feature (1)..(252): Homolog of NCBI NO: 37903393 NR Description: 14-3-3-like protein [Saccharum hybrid cultivar
MSREENVYMAKLAEQAERYEEMVEYMEKVAKTTDVQELTVEERNLLSVAYKNVIAAPRASWRIISSIEQKEESRKNEEHVAQIKEYRGKIEAELSNICDGILKLLDTHLVPSSTATESKVFYLKMKGDYHRYLAEFKTGAERKESAESTMVAYKAAQDIALAELPPIHPIRLGLALNFSVFYYEIQNSPDKACNLAKEAFDEAISQLDMLGEDSYKDSNLIMQLLRDNLTLWTEDGIEEGLESSKGDAGEGQ

SEQ ID NO: 3343 - protein, 244 aa, Zea mays subsp. mays
  peptide (1)..(244): Ceres Seq. ID no. 12407300
  misc_feature (1)..(232): Pfam Name: 14-3-3 protein Pfam Description: 14-3-3 protein
  misc_feature (1)..(242): Homolog of NCBI NO: 3023187 NR Description: 14-3-3-LIKE PROTEIN (G-BOX BINDING FACTOR)
  misc_feature (1)..(244): Homolog of NCBI NO: 7435015 NR Description: 14-3-3 protein - barley
  misc_feature (1)..(243): Homolog of NCBI NO: 13702816 NR Description: putative 14-3-3 protein [Oryza sativa]
  misc_feature (1)..(244): Homolog of NCBI NO: 2492487 NR Description: 14-3-3-LIKE PROTEIN B (14-3-3B)
  misc_feature (1)..(244): Homolog of NCBI NO: 7435021 NR Description: GF14-b protein - rice
  misc_feature (1)..(244): Homolog of NCBI NO: 12229593 NR Description: 14-3-3-like protein
  misc_feature (1)..(244): Homolog of NCBI NO: 2921512 NR Description: GF14 protein [Fritillaria agrestis]
  misc_feature (1)..(244): Homolog of NCBI NO: 7271253 NR Description: 14-3-3-like protein [Oryza sativa]
  misc_feature (1)..(244): Homolog of NCBI NO: 7435022 NR Description: GF14-c protein - rice
  misc_feature (1)..(244): Homolog of NCBI NO: 37903393 NR Description: 14-3-3-like protein [Saccharum hybrid cultivar
MAKLAEQAERYEEMVEYMEKVAKTTDVQELTVEERNLLSVAYKNVIAAPRASWRIISSIEQKEESRKNEEHVAQIKEYRGKIEAELSNICDGILKLLDTHLVPSSTATESKVFYLKMKGDYHRYLAEFKTGAERKESAESTMVAYKAAQDIALAELPPIHPIRLGLALNFSVFYYEIQNSPDKACNLAKEAFDEAISQLDMLGEDSYKDSNLIMQLLRDNLTLWTEDGIEEGLESSKGDAGEGQ

SEQ ID NO: 3344 - protein, 231 aa, Zea mays subsp. mays
  peptide (1)..(231): Ceres Seq. ID no. 12407301
  misc_feature (1)..(219): Pfam Name: 14-3-3 protein Pfam Description: 14-3-3 protein
  misc_feature (1)..(229): Homolog of NCBI NO: 3023187 NR Description: 14-3-3-LIKE PROTEIN (G-BOX BINDING FACTOR)
  misc_feature (1)..(231): Homolog of NCBI NO: 7435015 NR Description: 14-3-3 protein - barley
  misc_feature (1)..(230): Homolog of NCBI NO: 13702816 NR Description: putative 14-3-3 protein [Oryza sativa]
  misc_feature (1)..(231): Homolog of NCBI NO: 2492487 NR Description: 14-3-3-LIKE PROTEIN B (14-3-3B)
  misc_feature (1)..(231): Homolog of NCBI NO: 7435021 NR Description: GF14-b protein - rice
  misc_feature (1)..(231): Homolog of NCBI NO: 12229593 NR Description: 14-3-3-like protein
  misc_feature (1)..(231): Homolog of NCBI NO: 2921512 NR Description: GF14 protein [Fritillaria agrestis]
  misc_feature (1)..(231): Homolog of NCBI NO: 7271253 NR Description: 14-3-3-like protein [Oryza sativa]
  misc_feature (1)..(231): Homolog of NCBI NO: 7435022 NR Description: GF14-c protein - rice
  misc_feature (1)..(231): Homolog of NCBI NO: 37903393 NR Description: 14-3-3-like protein [Saccharum hybrid cultivar
MVEYMEKVAKTTDVQELTVEERNLLSVAYKNVIAAPRASWRIISSIEQKEESRKNEEHVAQIKEYRGKIEAELSNICDGILKLLDTHLVPSSTATESKVFYLKMKGDYHRYLAEFKTGAERKESAESTMVAYKAAQDIALAELPPIHPIRLGLALNFSVFYYEIQNSPDKACNLAKEAFDEAISQLDMLGEDSYKDSNLIMQLLRDNLTLWTEDGIEEGLESSKGDAGEGQ

SEQ ID NO: 3345 - DNA, 1538 bp, Zea mays subsp. mays
  misc_feature (1)..(1538): Ceres Seq. ID no. 12410280
  misc_feature: MA Experiment ID: 108543 Result: Down-regulated in Transcription
gcgatctcggtttttacccaaagacgaagccgacgacaaggagaacagagactccggcgagccccagccaccgtgaagccgcgcgaattgcaggagcgaagcaaaggagatgcttctcgaggagctgctccggtgccaaatccacgagtggtacccggccttccgtcgccactccatccccaccgtcatcatcccgctccccgccgccttcctccgctacctcgccggccagcgggcctaccccaacgccgacgccgacgctgaagatggcgctgatgaggagccactaccgttcctccttccggcgataacttccggccgccagcccttcgcgcccatccacgcgcaccaccccgaccccgactctctcctcaactccgacttgttcttcggctccagcagcgaagacgtcttcgaccccgacgccgaccacccgctccggccggaattcccggagctggaggtggccatcgactccgccatcgccgagctaggcggcgccgcgctccccaagctcaactggagcgcgcccaaggatgccaccttcatgtctgccgatggcacgagtcggtgcacgtgcttcgccgaggttgccatgctgctccgctcctccgactgtgtagcccacgaccttgcctccgcgcgacaatcatgcaaggatttcgtgcgcccggagggtgctcgacggaatgcccaaaaagttagtgccggttctgaggaaggtgctcgaccaaatgccgatgggattcgtggctgcgaaggcaccaatggagcaccaagtaattcaagcaagacaggtgaggagggaggcaagacaaatgatggggactgtgatgttgaagatgcaaccgaagaagaacataacgagaatacttgggtggacgatgggttccaatactaccttgccctccgcaagtggtacccaggcctacgccctgagtcagagttccgatgcttcgttcgggagcagaagctggttgctgtgtcccagagagacccatcagcttactacccatcactgcctggatggagttccgaggtgcaaccgaaaattgaggctttcttcaacgaagtgattgagccacagtttgcttcaaacaattatacgtttgatgtgtatgtgaggacagatgggcgagtcaagctcatagatttcaatccatggggtggttataccttgccgctgctgtttacttgggaggagcttgagaaggggagagggtctgagctggagtttcgggtggtcatgcagcagggtgcagtgaggccaggattgatgacagctgtgccatatgatatgctggattggggtgaggggagtggctgggatgtttttctgaagaaggctgacgaggagcttgacagacagatatgaactccctggatggtgattcatgattgtggttcgaaaaaaaagtcttaattatgctgtaggcacacaatttaaagtgatgactgctgttttttttacctgctactgtgctacatactagcagtcacctcctttcttaaaattgctatgcagtctcttgccattt

SEQ ID NO: 3346 - protein, 421 aa, Zea mays subsp. mays
  peptide (1)..(421): Ceres Seq. ID no. 12410281
  misc_feature (258)..(403): Homolog of NCBI NO: 23959082 NR Description: similar to expressed sequence AA959893 [Mus
  misc_feature (1)..(38): Homolog of NCBI NO: 25742671 NR Description: D123 gene product [Rattus norvegicus]
  misc_feature (83)..(184): Homolog of NCBI NO: 25742671 NR Description: D123 gene product [Rattus norvegicus]
  misc_feature (258)..(403): Homolog of NCBI NO: 25742671 NR Description: D123 gene product [Rattus norvegicus]
  misc_feature (1)..(38): Homolog of NCBI NO: 19527052 NR Description: expressed sequence AA959893 [Mus musculus]
  misc_feature (83)..(184): Homolog of NCBI NO: 19527052 NR Description: expressed sequence AA959893 [Mus musculus]
  misc_feature (258)..(403): Homolog of NCBI NO: 19527052 NR Description: expressed sequence AA959893 [Mus musculus]
  misc_feature (4)..(38): Homolog of NCBI NO: 15235584 NR Description: D123 -like protein; protein id: At4g05440.1
  misc_feature (84)..(189): Homolog of NCBI NO: 15235584 NR Description: D123 -like protein; protein id: At4g05440.1
  misc_feature (263)..(419): Homolog of NCBI NO: 15235584 NR Description: D123 -like protein; protein id: At4g05440.1
MLLEELLRCQIHEWYPAFRRHSIPTVIIPLPAAFLRYLAGQRAYPNADADAEDGADEEPLPFLLPAITSGRQPFAPIHAHHPDPDSLLNSDLFFGSSSEDVFDPDADHPLRPEFPELEVAIDSAIAELGGAALPKLNWSAPKDATFMSADGTSRCTCFAEVAMLLRSSDCVAHDLASARQSCKDFVRPEGARRNAQKVSAGSEEGARPNADGIRGCEGTNGAPSNSSKTGEEGGKTNDGDCDVEDATEEEHNENTWVDDGFQYYLALRKWYPGLRPESEFRCFVREQKLVAVSQRDPSAYYPSLPGWSSEVQPKIEAFFNEVIEPQFASNNYTFDVYVRTDGRVKLIDFNPWGGYTLPLLFTWEELEKGRGSELEFRVVMQQGAVRPGLMTAVPYDMLDWGEGSGWDVFLKKADEELDRQI

SEQ ID NO: 3347 - protein, 275 aa, Zea mays subsp. mays
  peptide (1)..(275): Ceres Seq. ID no. 12410282
  misc_feature (112)..(220): Homolog of NCBI NO: 28829467 NR Description: similar to Homo sapiens (Human). HT-1080 protein
  misc_feature (1)..(38): Homolog of NCBI NO: 28829467 NR Description: similar to Homo sapiens (Human). HT-1080 protein
  misc_feature (1)..(38): Homolog of NCBI NO: 23959082 NR Description: similar to expressed sequence AA959893 [Mus
  misc_feature (112)..(257): Homolog of NCBI NO: 23959082 NR Description: similar to expressed sequence AA959893 [Mus
  misc_feature (1)..(38): Homolog of NCBI NO: 25742671 NR Description: D123 gene product [Rattus norvegicus]
  misc_feature (112)..(257): Homolog of NCBI NO: 25742671 NR Description: D123 gene product [Rattus norvegicus]
  misc_feature (1)..(38): Homolog of NCBI NO: 19527052 NR Description: expressed sequence AA959893 [Mus musculus]
  misc_feature (112)..(257): Homolog of NCBI NO: 19527052 NR Description: expressed sequence AA959893 [Mus musculus]
  misc_feature (1)..(43): Homolog of NCBI NO: 15235584 NR Description: D123 -like protein; protein id: At4g05440.1
  misc_feature (117)..(273): Homolog of NCBI NO: 15235584 NR Description: D123 -like protein; protein id: At4g05440.1
MSADGTSRCTCFAEVAMLLRSSDCVAHDLASARQSCKDFVRPEGARRNAQKVSAGSEEGARPNADGIRGCEGTNGAPSNSSKTGEEGGKTNDGDCDVEDATEEEHNENTWVDDGFQYYLALRKWYPGLRPESEFRCFVREQKLVAVSQRDPSAYYPSLPGWSSEVQPKIEAFFNEVIEPQFASNNYTFDVYVRTDGRVKLIDFNPWGGYTLPLLFTWEELEKGRGSELEFRVVMQQGAVRPGLMTAVPYDMLDWGEGSGWDVFLKKADEELDRQI

SEQ ID NO: 3348 - protein, 259 aa, Zea mays subsp. mays
  peptide (1)..(259): Ceres Seq. ID no. 12410283
  misc_feature (96)..(204): Homolog of NCBI NO: 28829467 NR Description: similar to Homo sapiens (Human). HT-1080 protein
  misc_feature (1)..(22): Homolog of NCBI NO: 28829467 NR Description: similar to Homo sapiens (Human). HT-1080 protein
  misc_feature (1)..(22): Homolog of NCBI NO: 23959082 NR Description: similar to expressed sequence AA959893 [Mus
  misc_feature (96)..(241): Homolog of NCBI NO: 23959082 NR Description: similar to expressed sequence AA959893 [Mus
  misc_feature (1)..(22): Homolog of NCBI NO: 25742671 NR Description: D123 gene product [Rattus norvegicus]
  misc_feature (96)..(241): Homolog of NCBI NO: 25742671 NR Description: D123 gene product [Rattus norvegicus]
  misc_feature (1)..(22): Homolog of NCBI NO: 19527052 NR Description: expressed sequence AA959893 [Mus musculus]
  misc_feature (96)..(241): Homolog of NCBI NO: 19527052 NR Description: expressed sequence AA959893 [Mus musculus]
  misc_feature (1)..(27): Homolog of NCBI NO: 15235584 NR Description: D123 -like protein; protein id: At4g05440.1
  misc_feature (101)..(257): Homolog of NCBI NO: 15235584 NR Description: D123 -like protein; protein id: At4g05440.1
MLLRSSDCVAHDLASARQSCKDFVRPEGARRNAQKVSAGSEEGARPNADGIRGCEGTNGAPSNSSKTGEEGGKTNDGDCDVEDATEEEHNENTWVDDGFQYYLALRKWYPGLRPESEFRCFVREQKLVAVSQRDPSAYYPSLPGWSSEVQPKIEAFFNEVIEPQFASNNYTFDVYVRTDGRVKLIDFNPWGGYTLPLLFTWEELEKGRGSELEFRVVMQQGAVRPGLMTAVPYDMLDWGEGSGWDVFLKKADEELDRQI

SEQ ID NO: 3349 - DNA, 1885 bp, Zea mays subsp. mays
  misc_feature (1)..(1885): Ceres Seq. ID no. 13629041
  misc_feature: MA Experiment ID: 108527 Result: Down-regulated in Transcription
  misc_feature: MA Experiment 108527 PARAMETER Experiment Name: Zm_5mM_NO_P Parameter: Age (day) Value: 8
  misc_feature: MA Experiment 108527 PARAMETER Experiment Name: Zm_5mM_NO_P Parameter: Organism Value: Zea mays
  misc_feature: MA Experiment 108527 PARAMETER Experiment Name: Zm_5mM_NO_P Parameter: Plant Line Value: 35A19
  misc_feature: MA Experiment 108527 PARAMETER Experiment Name: Zm_5mM_NO_P Parameter: Timepoint (hr) Value: 6
  misc_feature: MA Experiment 108527 PARAMETER Experiment Name: Zm_5mM_NO_P Parameter: Tissue Value: Aerial
  misc_feature: MA Experiment 108527 PARAMETER Experiment Name: Zm_5mM_NO_P Parameter: Treatment Value: 5mM NO vs. No Treatment
  misc_feature: MA Experiment ID: 20000488 Result: Down-regulated in Transcription
  misc_feature: MA Experiment 20000488 PARAMETER Experiment Name: Zm_50mM_NH4NO3_L_to_H_P Parameter: Organism Value: Zea mays
  misc_feature: MA Experiment 20000488 PARAMETER Experiment Name: Zm_50mM_NH4NO3_L_to_H_P Parameter: Timepoint (hr) Value: 8
  misc_feature: MA Experiment 20000488 PARAMETER Experiment Name: Zm_50mM_NH4NO3_L_to_H_P Parameter: Tissue Value: Leaves
  misc_feature: MA Experiment 20000488 PARAMETER Experiment Name: Zm_50mM_NH4NO3_L_to_H_P Parameter: Treatment Value: 50mM NH4NO3 vs. 100mM Mannitol
accgagtcgagtccacagtccacaccaccaccgcgaggtccactaaaaaaacaagagcattaccggcaccaatcaatcaggctggcagtggagtgacagcggcggcaacaccacgcccacgcggcgccggagccgaagccgatcccccgatggatctcccgccgctctcccaccaggccctcttcgccggccgtccgatccgccgacgcgcccgccgtccgcgcgctcctggtcgacgccgaggcgtcgggcacctcgttggccgcgctcgccgccgctcagacggacgccggggaaaccgcgctgtacgttgccgcggaggccggaagcgaggaggtcgtgcgcctcctcctcccgctctacgacttcgaggcagccaccgtccgctcacgccttgacctcgacgccttccatgtcgccgccaagcagggccacaccggggttgtgaaagagttcttggggcggtggccagggctttgctcagtctgtgactcttccaacactagtcccctctactctgctgctgtcaaggatcacttggatgtggtaaatgctatactggacactgatgatagctgcataaagattgtgcggaagaatgggaaaacatccctacatactgctgcaagaattggataccatcgtattgtcaaagcactcatagagagagatccaggaattgttccgatcaatgataggaagggacaaactgcacttcacatggctgtgaagggcaaaaatacagatgtagtggaagagttattgatggctgatgtttccattctcaatgtgagggacaagaaaggaaatactgctttgcacatagctacacggaaatggaggccccagatggtacagcttcttcttagctatgaatcacttgaagttaatgctatcaacagtcaaaatgaaacagctatggatttggctgacaaagttccttatggtgagtctaaaacggaaataatagagtggctgacagaagctggtgcaaagaatgccagaaatgttgggaaaattgatgaggcatcagaactgaggagaactgtgagcgatatcaagcacaatgttcaggcacagcttagcgagaatgctaagaccaacaaacgggtgactgggattcgcaaagagttgcagaaactgcatagagaagctatccagaacaccatcaattcagtcaccttggtagcgaccctgatcgcctccattgccttcgtcgccatattcaatctgccaggtcaatacttccaggatgtgaatagtgggggagatattggtgaggctgaaatagccaagcttaccggtttccgtgtcttctgccttctgaacgctactgctctcttcatctccctcgcggtggtcgtggtgcagatcaccttggttgcctgggaaactggtgcccagaagcaagttatcaagatcgtgaataagctcatgtggacggcatgccttagcacgggtgtggcttttatctcgctggcctatgttgtagttggcccgcagcatgcctggatggccttcacggcatcagccatcggagggccgatcatgattggaactttcctgttcctagcctatctgctgttgcgcccacggttcaagttcggcgaagacagacagcgccgcatcaagagggcaagcggcagcaaatccttctcctggtcaatccatgatgggttttcagatctggaagccttctctgatcacgagaagaggatctatgccctgtaggagggtgtaacagtaactactcctgcaagaggcaactgggagagtacaaatggttcatgtatatatttggtttagccgttttagcctagccgctgttagacctttctccccatgtacaatatctaataatgaagagctgcagctattgtaaagc

SEQ ID NO: 3350 - protein, 336 aa, Zea mays subsp. mays
  peptide (1)..(336): Ceres Seq. ID no. 13629042
  misc_feature (1)..(336): Homolog of NCBI NO: 30679697 NR Description: ankyrin repeat protein family [Arabidopsis
  misc_feature (1)..(336): Homolog of NCBI NO: 11357168 NR Description: ankyrin-like protein - Arabidopsis thaliana
  misc_feature (1)..(336): Homolog of NCBI NO: 15238604 NR Description: ankyrin repeat protein family [Arabidopsis
  misc_feature (1)..(336): Homolog of NCBI NO: 34908074 NR Description: P0506B12.26 [Oryza sativa (japonica
  misc_feature (1)..(336): Homolog of NCBI NO: 24796797 NR Description: putative ankyrin repeat containing protein
  misc_feature (1)..(336): Homolog of NCBI NO: 15220595 NR Description: ankyrin repeat protein family [Arabidopsis
  misc_feature (1)..(336): Homolog of NCBI NO: 15222993 NR Description: ankyrin repeat protein family [Arabidopsis
  misc_feature (1)..(336): Homolog of NCBI NO: 15225141 NR Description: ankyrin repeat protein family [Arabidopsis
  misc_feature (1)..(336): Homolog of NCBI NO: 18379277 NR Description: ankyrin repeat protein family [Arabidopsis
  misc_feature (1)..(336): Homolog of NCBI NO: 21537142 NR Description: unknown [Arabidopsis thaliana]
MAVKGKNTDVVEELLMADVSILNVRDKKGNTALHIATRKWRPQMVQLLLSYESLEVNAINSQNETAMDLADKVPYGESKTEIIEWLTEAGAKNARNVGKIDEASELRRTVSDIKHNVQAQLSENAKTNKRVTGIRKELQKLHREAIQNTINSVTLVATLIASIAFVAIFNLPGQYFQDVNSGGDIGEAEIAKLTGFRVFCLLNATALFISLAVVVVQITLVAWETGAQKQVIKIVNKLMWTACLSTGVAFISLAYVVVGPQHAWMAFTASAIGGPIMIGTFLFLAYLLLRPRFKFGEDRQRRIKRASGSKSFSWSIHDGFSDLEAFSDHEKRIYAL

SEQ ID NO: 3351 - protein, 321 aa, Zea mays subsp. mays
  peptide (1)..(321): Ceres Seq. ID no. 13629043
  misc_feature (1)..(321): Homolog of NCBI NO: 30679697 NR Description: ankyrin repeat protein family [Arabidopsis
  misc_feature (1)..(321): Homolog of NCBI NO: 11357168 NR Description: ankyrin-like protein - Arabidopsis thaliana
  misc_feature (1)..(321): Homolog of NCBI NO: 15238604 NR Description: ankyrin repeat protein family [Arabidopsis
  misc_feature (1)..(321): Homolog of NCBI NO: 34908074 NR Description: P0506B12.26 [Oryza sativa (japonica
  misc_feature (1)..(321): Homolog of NCBI NO: 24796797 NR Description: putative ankyrin repeat containing protein
  misc_feature (1)..(321): Homolog of NCBI NO: 15220595 NR Description: ankyrin repeat protein family [Arabidopsis
  misc_feature (1)..(321): Homolog of NCBI NO: 15222993 NR Description: ankyrin repeat protein family [Arabidopsis
  misc_feature (1)..(321): Homolog of NCBI NO: 15225141 NR Description: ankyrin repeat protein family [Arabidopsis
  misc_feature (1)..(321): Homolog of NCBI NO: 18379277 NR Description: ankyrin repeat protein family [Arabidopsis
  misc_feature (1)..(321): Homolog of NCBI NO: 21537142 NR Description: unknown [Arabidopsis thaliana]
MADVSILNVRDKKGNTALHIATRKWRPQMVQLLLSYESLEVNAINSQNETAMDLADKVPYGESKTEIIEWLTEAGAKNARNVGKIDEASELRRTVSDIKHNVQAQLSENAKTNKRVTGIRKELQKLHREAIQNTINSVTLVATLIASIAFVAIFNLPGQYFQDVNSGGDIGEAEIAKLTGFRVFCLLNATALFISLAVVVVQITLVAWETGAQKQVIKIVNKLMWTACLSTGVAFISLAYVVVGPQHAWMAFTASAIGGPIMIGTFLFLAYLLLRPRFKFGEDRQRRIKRASGSKSFSWSIHDGFSDLEAFSDHEKRIYAL

SEQ ID NO: 3352 - protein, 293 aa, Zea mays subsp. mays
  peptide (1)..(293): Ceres Seq. ID no. 13629044
  misc_feature (1)..(293): Homolog of NCBI NO: 34908074 NR Description: P0506B12.26 [Oryza sativa (japonica
  misc_feature (1)..(293): Homolog of NCBI NO: 24796797 NR Description: putative ankyrin repeat containing protein
  misc_feature (1)..(293): Homolog of NCBI NO: 15220595 NR Description: ankyrin repeat protein family [Arabidopsis
  misc_feature (1)..(293): Homolog of NCBI NO: 15222993 NR Description: ankyrin repeat protein family [Arabidopsis
  misc_feature (1)..(293): Homolog of NCBI NO: 15225141 NR Description: ankyrin repeat protein family [Arabidopsis
  misc_feature (1)..(293): Homolog of NCBI NO: 18379277 NR Description: ankyrin repeat protein family [Arabidopsis
  misc_feature (1)..(293): Homolog of NCBI NO: 21537142 NR Description: unknown [Arabidopsis thaliana]
  misc_feature (1)..(293): Homolog of NCBI NO: 30679697 NR Description: ankyrin repeat protein family [Arabidopsis
  misc_feature (1)..(293): Homolog of NCBI NO: 11357168 NR Description: ankyrin-like protein - Arabidopsis thaliana
  misc_feature (1)..(293): Homolog of NCBI NO: 15238604 NR Description: ankyrin repeat protein family [Arabidopsis
MVQLLLSYESLEVNAINSQNETAMDLADKVPYGESKTEIIEWLTEAGAKNARNVGKIDEASELRRTVSDIKHNVQAQLSENAKTNKRVTGIRKELQKLHREAIQNTINSVTLVATLIASIAFVAIFNLPGQYFQDVNSGGDIGEAEIAKLTGFRVFCLLNATALFISLAVVVVQITLVAWETGAQKQVIKIVNKLMWTACLSTGVAFISLAYVVVGPQHAWMAFTASAIGGPIMIGTFLFLAYLLLRPRFKFGEDRQRRIKRASGSKSFSWSIHDGFSDLEAFSDHEKRIYAL

SEQ ID NO: 3353 - DNA, 1519 bp, Zea mays subsp. mays
  misc_feature (1)..(1519): Ceres Seq. ID no. 13577756
  misc_feature: MA Experiment ID: 108523 Result: Down-regulated in Transcription
  misc_feature: MA Experiment 108523 PARAMETER Experiment Name: Zm_42deg_Heat_P Parameter: Age (day) Value: 8
  misc_feature: MA Experiment 108523 PARAMETER Experiment Name: Zm_42deg_Heat_P Parameter: Organism Value: Zea mays
  misc_feature: MA Experiment 108523 PARAMETER Experiment Name: Zm_42deg_Heat_P Parameter: Plant Line Value: 35A19
  misc_feature: MA Experiment 108523 PARAMETER Experiment Name: Zm_42deg_Heat_P Parameter: Temperature (deg C) Value: 42 vs. 22
  misc_feature: MA Experiment 108523 PARAMETER Experiment Name: Zm_42deg_Heat_P Parameter: Timepoint (hr) Value: 6
  misc_feature: MA Experiment 108523 PARAMETER Experiment Name: Zm_42deg_Heat_P Parameter: Tissue Value: Aerial
  misc_feature: MA Experiment ID: 108527 Result: Down-regulated in Transcription
  misc_feature: MA Experiment 108527 PARAMETER Experiment Name: Zm_5mM_NO_P Parameter: Age (day) Value: 8
  misc_feature: MA Experiment 108527 PARAMETER Experiment Name: Zm_5mM_NO_P Parameter: Organism Value: Zea mays
  misc_feature: MA Experiment 108527 PARAMETER Experiment Name: Zm_5mM_NO_P Parameter: Plant Line Value: 35A19
  misc_feature: MA Experiment 108527 PARAMETER Experiment Name: Zm_5mM_NO_P Parameter: Timepoint (hr) Value: 6
  misc_feature: MA Experiment 108527 PARAMETER Experiment Name: Zm_5mM_NO_P Parameter: Tissue Value: Aerial
  misc_feature: MA Experiment 108527 PARAMETER Experiment Name: Zm_5mM_NO_P Parameter: Treatment Value: 5mM NO vs. No Treatment
  misc_feature: MA Experiment ID: 108689 Result: Up-regulated in Transcription
  misc_feature: MA Experiment 108689 PARAMETER Experiment Name: Zm_Drought_Roots_P Parameter: Age (day) Value: 9
  misc_feature: MA Experiment 108689 PARAMETER Experiment Name: Zm_Drought_Roots_P Parameter: Organism Value: Zea mays
  misc_feature: MA Experiment 108689 PARAMETER Experiment Name: Zm_Drought_Roots_P Parameter: Plant Line Value: 35A19
  misc_feature: MA Experiment 108689 PARAMETER Experiment Name: Zm_Drought_Roots_P Parameter: Timepoint (hr) Value: 24
  misc_feature: MA Experiment 108689 PARAMETER Experiment Name: Zm_Drought_Roots_P Parameter: Tissue Value: Roots
  misc_feature: MA Experiment 108689 PARAMETER Experiment Name: Zm_Drought_Roots_P Parameter: Treatment Value: Drought vs. No Drought
gtctcgtttctcccttcctcagctgctggcccccctgcctgcagccattgccccgctcctcgaggtcaaatggcccctgcccccgctctcaccgccacatccgtcctgaagcgatcccacctacccggcgtccactcgttggccggtcgccggcagccggggcggggaccgcgtctcggtgctttctccagcgatcccgccgccccgcgtttcatggcagcaaggatctggagtggttgctaagaggctcctctgggcgagtgcgagtggttccttcgagaaagataacatcggggaggacgtggtgttgccttctcagatagcggtggagaataaagtagatttgttgaagattttgaagagtgccaactcaattattccccatatagtgctggggagtacaattctcgcgctggtgtacccgccttcgttcacatggttcactaccaggtactatgcaccagctttggggttcttgatgtttgctgttggtgtaaactcaagcgccaatgatttcattgaagcaataaaaaggccagatgctattgctgcgggctatatcggacagtttgtcattaagcctttgtttggattcctttttgacactcttgcagttgcagttcttaacctcccagctgctctaggtgctggcataatgttggtttcatgcgtgagcggagcacaactttcaaactacgcaactttcttgacggatccacatatggctcctctcagcattgttatgacgtcattgtcaacagctactgcagtttttgtcaccccaacattatcttactttcttattggccagaaattacctgtagatgtcaaggggatgatgtccagcatcattcaaatagttgttgctccaattgctgccggattgcttctgaatagattccttccaaggctctgtgcagctattcagccatttctcccttcgatgtcggtgtttgtcactgccctgtgtgttggctcaccattggcaataaatatcaaggctgttttgtcgccatttggattaaccatagtgctgctcctttttgcattccacacctcatcttttgtagctggttatcatcttgctggtacttggtttagcaagtcagacgacgtaaaggcactacaaaggacaatatctttcgagacaggaatgcaaagcagccttcttgctcttgctttagcaaataagttcttcccagatccactagtgggtgtgcctccagccatatcggttgtgttgatgtccttaatgggatttgctcttgtcatggtatggtccaagaaaagagaagcctaattttctgaatcaattaagcgctgttgttttctgctcttatttatgtagagtaggcagaattttcatggttcaaatttgaaactcttgtatcgttccttctctcctctgagtgagcttgcaagggctctctctctctctcgctaaattattttccagatttacattttttttttgaatcgtgctggcatgccgccccaagagctgatggagttcaattcc

SEQ ID NO: 3354 - protein, 273 aa, Zea mays subsp. mays
  peptide (1)..(273): Ceres Seq. ID no. 13577757
  misc_feature (1)..(179): Pfam Name: Sodium Bile acid symporter family Pfam Description: Sodium Bile acid symporter family
  misc_feature (1)..(271): Homolog of NCBI NO: 18416020 NR Description: bile acid:sodium symporter family [Arabidopsis >gi|17529350|gb|AAL38902.1| unknown protein [Arabidopsis >gi|21436155|gb|AAM51324.1| unknown protein [Arabidopsis
  misc_feature (1)..(271): Homolog of NCBI NO: 7486890 NR Description: hypothetical protein T12H17.230 - Arabidopsis >gi|2827561|emb|CAA16569.1| predicted protein [Arabidopsis >gi|3292809|emb|CAA19799.1| putative protein [Arabidopsis
  misc_feature (1)..(272): Homolog of NCBI NO: 18413732 NR Description: bile acid:sodium symporter family [Arabidopsis >gi|15215839|gb|AAK91464.1| AT4g12030/F16J13_100 [Arabidopsis >gi|20453271|gb|AAM19874.1| AT3g20560/K10D20_9 [Arabidopsis
  misc_feature (1)..(253): Homolog of NCBI NO: 7485566 NR Description: hypothetical protein F16J13.100 - Arabidopsis >gi|4586108|emb|CAB40944.1| putative transport protein thaliana] >gi|7267904|emb|CAB78246.1| putative transport protein
  misc_feature (1)..(267): Homolog of NCBI NO: 18404505 NR Description: bile acid:sodium symporter family [Arabidopsis >gi|19698909|gb|AAL91190.1| unknown protein [Arabidopsis >gi|22136206|gb|AAM91181.1| unknown protein [Arabidopsis
  misc_feature (1)..(267): Homolog of NCBI NO: 21554890 NR Description: unknown [Arabidopsis thaliana]
  misc_feature (1)..(255): Homolog of NCBI NO: 9279722 NR Description: contains similarity to transporter
  misc_feature (1)..(267): Homolog of NCBI NO: 20269901 NR Description: putative sodium-dependent bile acid symporter
  misc_feature (1)..(267): Homolog of NCBI NO: 30683305 NR Description: bile acid:sodium symporter family [Arabidopsis
  misc_feature (1)..(270): Homolog of NCBI NO: 34911708 NR Description: P0707D10.18 [Oryza sativa (japonica
MFAVGVNSSANDFIEAIKRPDAIAAGYIGQFVIKPLFGFLFDTLAVAVLNLPAALGAGIMLVSCVSGAQLSNYATFLTDPHMAPLSIVMTSLSTATAVFVTPTLSYFLIGQKLPVDVKGMMSSIIQIVVAPIAAGLLLNRFLPRLCAAIQPFLPSMSVFVTALCVGSPLAINIKAVLSPFGLTIVLLLFAFHTSSFVAGYHLAGTWFSKSDDVKALQRTISFETGMQSSLLALALANKFFPDPLVGVPPAISVVLMSLMGFALVMVWSKKREA

SEQ ID NO: 3355 - protein, 214 aa, Zea mays subsp. mays
  peptide (1)..(214): Ceres Seq. ID no. 13577758
  misc_feature (1)..(120): Pfam Name: Sodium Bile acid symporter family Pfam Description: Sodium Bile acid symporter family
  misc_feature (1)..(212): Homolog of NCBI NO: 18416020 NR Description: bile acid:sodium symporter family [Arabidopsis >gi|17529350|gb|AAL38902.1| unknown protein [Arabidopsis >gi|21436155|gb|AAM51324.1| unknown protein [Arabidopsis
  misc_feature (1)..(212): Homolog of NCBI NO: 7486890 NR Description: hypothetical protein T12H17.230 - Arabidopsis >gi|2827561|emb|CAA16569.1| predicted protein [Arabidopsis >gi|3292809|emb|CAA19799.1| putative protein [Arabidopsis
  misc_feature (1)..(213): Homolog of NCBI NO: 18413732 NR Description: bile acid:sodium symporter family [Arabidopsis >gi|15215839|gb|AAK91464.1| AT4g12030/F16J13_100 [Arabidopsis >gi|20453271|gb|AAM19874.1| AT3g20560/K10D20_9 [Arabidopsis
  misc_feature (1)..(194): Homolog of NCBI NO: 7485566 NR Description: hypothetical protein F16J13.100 - Arabidopsis >gi|4586108|emb|CAB40944.1| putative transport protein thaliana] >gi|7267904|emb|CAB78246.1| putative transport protein
  misc_feature (1)..(208): Homolog of NCBI NO: 18404505 NR Description: bile acid:sodium symporter family [Arabidopsis >gi|19698909|gb|AAL91190.1| unknown protein [Arabidopsis >gi|22136206|gb|AAM91181.1| unknown protein [Arabidopsis
  misc_feature (1)..(208): Homolog of NCBI NO: 21554890 NR Description: unknown [Arabidopsis thaliana]
  misc_feature (1)..(196): Homolog of NCBI NO: 9279722 NR Description: contains similarity to transporter
  misc_feature (1)..(208): Homolog of NCBI NO: 20269901 NR Description: putative sodium-dependent bile acid symporter
  misc_feature (1)..(208): Homolog of NCBI NO: 30683305 NR Description: bile acid:sodium symporter family [Arabidopsis
  misc_feature (1)..(211): Homolog of NCBI NO: 34911708 NR Description: P0707D10.18 [Oryza sativa (japonica
MLVSCVSGAQLSNYATFLTDPHMAPLSIVMTSLSTATAVFVTPTLSYFLIGQKLPVDVKGMMSSIIQIVVAPIAAGLLLNRFLPRLCAAIQPFLPSMSVFVTALCVGSPLAINIKAVLSPFGLTIVLLLFAFHTSSFVAGYHLAGTWFSKSDDVKALQRTISFETGMQSSLLALALANKFFPDPLVGVPPAISVVLMSLMGFALVMVWSKKREA

SEQ ID NO: 3356 - protein, 192 aa, Zea mays subsp. mays
  peptide (1)..(192): Ceres Seq. ID no. 13577759
  misc_feature (1)..(98): Pfam Name: Sodium Bile acid symporter family Pfam Description: Sodium Bile acid symporter family
  misc_feature (1)..(190): Homolog of NCBI NO: 18416020 NR Description: bile acid:sodium symporter family [Arabidopsis >gi|17529350|gb|AAL38902.1| unknown protein [Arabidopsis >gi|21436155|gb|AAM51324.1| unknown protein [Arabidopsis
  misc_feature (1)..(190): Homolog of NCBI NO: 7486890 NR Description: hypothetical protein T12H17.230 - Arabidopsis >gi|2827561|emb|CAA16569.1| predicted protein [Arabidopsis >gi|3292809|emb|CAA19799.1| putative protein [Arabidopsis
  misc_feature (1)..(191): Homolog of NCBI NO: 18413732 NR Description: bile acid:sodium symporter family [Arabidopsis >gi|15215839|gb|AAK91464.1| AT4g12030/F16J13_100 [Arabidopsis >gi|20453271|gb|AAM19874.1| AT3g20560/K10D20_9 [Arabidopsis
  misc_feature (1)..(172): Homolog of NCBI NO: 7485566 NR Description: hypothetical protein F16J13.100 - Arabidopsis >gi|4586108|emb|CAB40944.1| putative transport protein thaliana] >gi|7267904|emb|CAB78246.1| putative transport protein
  misc_feature (1)..(186): Homolog of NCBI NO: 18404505 NR Description: bile acid:sodium symporter family [Arabidopsis >gi|19698909|gb|AAL91190.1| unknown protein [Arabidopsis >gi|22136206|gb|AAM91181.1| unknown protein [Arabidopsis
  misc_feature (1)..(186): Homolog of NCBI NO: 21554890 NR Description: unknown [Arabidopsis thaliana]
  misc_feature (1)..(174): Homolog of NCBI NO: 9279722 NR Description: contains similarity to transporter
  misc_feature (1)..(186): Homolog of NCBI NO: 20269901 NR Description: putative sodium-dependent bile acid symporter
  misc_feature (1)..(186): Homolog of NCBI NO: 30683305 NR Description: bile acid:sodium symporter family [Arabidopsis
  misc_feature (1)..(189): Homolog of NCBI NO: 34911708 NR Description: P0707D10.18 [Oryza sativa (japonica
MAPLSIVMTSLSTATAVFVTPTLSYFLIGQKLPVDVKGMMSSIIQIVVAPIAAGLLLNRFLPRLCAAIQPFLPSMSVFVTALCVGSPLAINIKAVLSPFGLTIVLLLFAFHTSSFVAGYHLAGTWFSKSDDVKALQRTISFETGMQSSLLALALANKFFPDPLVGVPPAISVVLMSLMGFALVMVWSKKREA

SEQ ID NO: 3357 - DNA, 1432 bp, Zea mays subsp. mays
  misc_feature (1)..(1432): Ceres Seq. ID no. 12406172
  misc_feature: MA Experiment ID: 108544 Result: Down-regulated in Transcription
  misc_feature: MA Experiment ID: 108545 Result: Up-regulated in Transcription
  misc_feature: MA Experiment 108545 PARAMETER Experiment Name: Zm_Imbibed_Seeds_P Parameter: Age (day) Value: 3 vs. 2
  misc_feature: MA Experiment 108545 PARAMETER Experiment Name: Zm_Imbibed_Seeds_P Parameter: Organism Value: Zea mays
  misc_feature: MA Experiment 108545 PARAMETER Experiment Name: Zm_Imbibed_Seeds_P Parameter: Plant Line Value: 35A19
  misc_feature: MA Experiment 108545 PARAMETER Experiment Name: Zm_Imbibed_Seeds_P Parameter: Tissue Value: Aerial vs. Embryo
  misc_feature: MA Experiment ID: 108546 Result: Down-regulated in Transcription
  misc_feature: MA Experiment 108546 PARAMETER Experiment Name: Zm_Imbibed_Seeds_P Parameter: Age (day) Value: 3 vs. 2
  misc_feature: MA Experiment 108546 PARAMETER Experiment Name: Zm_Imbibed_Seeds_P Parameter: Organism Value: Zea mays
  misc_feature: MA Experiment 108546 PARAMETER Experiment Name: Zm_Imbibed_Seeds_P Parameter: Plant Line Value: 35A19
  misc_feature: MA Experiment 108546 PARAMETER Experiment Name: Zm_Imbibed_Seeds_P Parameter: Tissue Value: Roots vs. Embryo
  misc_feature: MA Experiment ID: 20000477 Result: Down-regulated in Transcription
  misc_feature: MA Experiment 20000477 PARAMETER Experiment Name: Zm_5mM_SA_P Parameter: Age (day) Value: 10
  misc_feature: MA Experiment 20000477 PARAMETER Experiment Name: Zm_5mM_SA_P Parameter: Organism Value: Zea mays
  misc_feature: MA Experiment 20000477 PARAMETER Experiment Name: Zm_5mM_SA_P Parameter: Plant Line Value: 35A19
  misc_feature: MA Experiment 20000477 PARAMETER Experiment Name: Zm_5mM_SA_P Parameter: Timepoint (hr) Value: 48
  misc_feature: MA Experiment 20000477 PARAMETER Experiment Name: Zm_5mM_SA_P Parameter: Tissue Value: Aerial
  misc_feature: MA Experiment 20000477 PARAMETER Experiment Name: Zm_5mM_SA_P Parameter: Treatment Value: 5mM SA vs. No Treatment
  misc_feature: MA Experiment ID: 20000487 Result: Down-regulated in Transcription
  misc_feature: MA Experiment 20000487 PARAMETER Experiment Name: Zm_50mM_NH4NO3_L_to_H_P Parameter: Organism Value: Zea mays
  misc_feature: MA Experiment 20000487 PARAMETER Experiment Name: Zm_50mM_NH4NO3_L_to_H_P Parameter: Timepoint (hr) Value: 4
  misc_feature: MA Experiment 20000487 PARAMETER Experiment Name: Zm_50mM_NH4NO3_L_to_H_P Parameter: Tissue Value: Leaves
  misc_feature: MA Experiment 20000487 PARAMETER Experiment Name: Zm_50mM_NH4NO3_L_to_H_P Parameter: Treatment Value: 50mM NH4NO3 vs. 100mM Mannitol
  misc_feature: MA Experiment ID: 20000488 Result: Down-regulated in Transcription
  misc_feature: MA Experiment 20000488 PARAMETER Experiment Name: Zm_50mM_NH4NO3_L_to_H_P Parameter: Organism Value: Zea mays
  misc_feature: MA Experiment 20000488 PARAMETER Experiment Name: Zm_50mM_NH4NO3_L_to_H_P Parameter: Timepoint (hr) Value: 8
  misc_feature: MA Experiment 20000488 PARAMETER Experiment Name: Zm_50mM_NH4NO3_L_to_H_P Parameter: Tissue Value: Leaves
  misc_feature: MA Experiment 20000488 PARAMETER Experiment Name: Zm_50mM_NH4NO3_L_to_H_P Parameter: Treatment Value: 50mM NH4NO3 vs. 100mM Mannitol
  misc_feature: MA Experiment ID: 20000534 Result: Down-regulated in Transcription
  misc_feature: MA Experiment 20000534 PARAMETER Experiment Name: Zm_Hybrid_Pollen_P Parameter: Age (day) Value: 8
  misc_feature: MA Experiment 20000534 PARAMETER Experiment Name: Zm_Hybrid_Pollen_P Parameter: Organism Value: Zea mays
  misc_feature: MA Experiment 20000534 PARAMETER Experiment Name: Zm_Hybrid_Pollen_P Parameter: Plant Line Value: 35A19
  misc_feature: MA Experiment 20000534 PARAMETER Experiment Name: Zm_Hybrid_Pollen_P Parameter: Tissue Value: Pollen vs. Aerial
  misc_feature: MA Experiment ID: 20000626 Result: Down-regulated in Transcription
  misc_feature: MA Experiment 20000626 PARAMETER Experiment Name: Zm_Herbicide-Treatments_P Parameter: Timepoint (hr) Value: 12
  misc_feature: MA Experiment 20000626 PARAMETER Experiment Name: Zm_Herbicide-Treatments_P Parameter: Tissue Value: Aerial
  misc_feature: MA Experiment 20000626 PARAMETER Experiment Name: Zm_Herbicide-Treatments_P Parameter: Treatment Value: Roundup vs. No Treatment
atgtccacggtcaccgtggcgagggcagccccgccgagcgttagtcacagttgttgcctgcctaccatgcggctctaactcgatccgtgcagcagacgccgagtcgcggcaaggagtagctaggaactaggaaggaggaggcagggaaaggccaggccatggcgctcgaagctgtggtgttcccgaagagcacccggggtgtacggcggtcaaggcgcgcccggcgtcgctgggctgcggcttccacaccgaggagctcgaggtcgaggacaangncggcgtggttctgcaagganaagccgccgacgcgctgccgccgcccggtggtgccgccaccacgtnggactgggacgcggtgctctgnccgtgctccactacaccagctgcaggcgccgtggaggagtgctgggacgtgcatgcagcancagcatcagctcctgtccgtgtccccgccgccctcgtccgccgtcgcagcgtcgtcgtctgggcgccgcaaggctgccgcgtcggaggcggcgcggcgacggcggcgacgccccaaggcggtgaggaacacggacgagatggagagccagcgccgcaaccacattgccgtggagcgcaaccggcggcggcagatgaacgagtacctctccgtgctccgctccgccatgccgccttcctacacgcagcggggtgaccaggcgtcgatcgtggctggtgccatcaacttcgtcaaggagctggagcaactgctgcagtcgctggaggcgcagaagcggcgacagaggtgcaccgagccattggcggcgtcgtcgttcgccggcttcttcatcttccctcagtactccaccaccgccgcgacgagtggtgcggttggctctagtagcgacagcgctggctccggcggcgatcagagtggcggcggcgggggagcgcggcgaggcgtggccgacatcgaggtgtccctggcggagagccacgccaacgtgaaggtgctcgcggcgcggcnggccgcggcagctgctgaggatggtggtggcgctgcagtgcctnggccctcaccgtgctcccacctcaccgtgaccaccaccgccgaccacctggccttgtactccctcagcctcaagatgggaggacgagtgccggctgtcgccgtcggtcgacgacatcgccgccgcggtgaacgagatactcgacgagtgcgcccgcgggggggcccactgatgattagccgcttagcctaatatatatcttagcgagtgccatgtattgttgtgacgtacgtcgatttgatcctagtacacggataacactggcaagctagcgtggcagctcgctcgcgccactgtcaggcaggcggtaccactaccactccatatgtttgcgtgcaagtaaacatgtaccgattggaccagcttacgtactactacgactctttttttgcagcgcc

SEQ ID NO: 3358 - protein, 355 aa, Zea mays subsp. mays
  peptide (1)..(355): Ceres Seq. ID no. 12406173
  misc_feature (139)..(190): Pfam Name: Helix-loop-helix DNA-binding domain Pfam Description: Helix-loop-helix DNA-binding domain
  misc_feature (98)..(318): Homolog of NCBI NO: 28558779 NR Description: helix-loop-helix-like protein [Cucumis melo]
  misc_feature (121)..(318): Homolog of NCBI NO: 21593808 NR Description: unknown [Arabidopsis thaliana]
  misc_feature (95)..(318): Homolog of NCBI NO: 15238424 NR Description: bHLH protein
  misc_feature (121)..(318): Homolog of NCBI NO: 18395124 NR Description: expressed protein
  misc_feature (99)..(318): Homolog of NCBI NO: 15218391 NR Description: bHLH protein; protein id: At1g72210.1
  misc_feature (115)..(318): Homolog of NCBI NO: 15234187 NR Description: bHLH protein
  misc_feature (113)..(201): Homolog of NCBI NO: 38346722 NR Description: OSJNBa0086O06.20 [Oryza sativa (japonica
  misc_feature (214)..(324): Homolog of NCBI NO: 38346722 NR Description: OSJNBa0086O06.20 [Oryza sativa (japonica
  misc_feature (101)..(318): Homolog of NCBI NO: 37533680 NR Description: putative helix-loop-helix DNA-binding protein
  misc_feature (106)..(318): Homolog of NCBI NO: 34902426 NR Description: Unknown protein [Oryza sativa (japonica
  misc_feature (39)..(39): Xaa is any aa, unknown or other
  misc_feature (40)..(40): Xaa is any aa, unknown or other
  misc_feature (46)..(46): Xaa is any aa, unknown or other
  misc_feature (62)..(62): Xaa is any aa, unknown or other
  misc_feature (69)..(69): Xaa is any aa, unknown or other
  misc_feature (89)..(89): Xaa is any aa, unknown or other
  misc_feature (278)..(278): Xaa is any aa, unknown or other
  misc_feature (293)..(293): Xaa is any aa, unknown or other
MALEAVVFPKSTRGVRRSRRARRRWAAASTPRSSRSRTXXAWFCKXKPPTRCRRPVVPPPRXTGTRCSXRAPLHQLQAPWRSAGTCMQXQHQLLSVSPPPSSAVAASSSGRRKAAASEAARRRRRRPKAVRNTDEMESQRRNHIAVERNRRRQMNEYLSVLRSAMPPSYTQRGDQASIVAGAINFVKELEQLLQSLEAQKRRQRCTEPLAASSFAGFFIFPQYSTTAATSGAVGSSSDSAGSGGDQSGGGGGARRGVADIEVSLAESHANVKVLAARXAAAAAEDGGGAAVPXPSPCSHLTVTTTADHLALYSLSLKMGGRVPAVAVGRRHRRRGERDTRRVRPRGGPLMISRLA

SEQ ID NO: 3359 - protein, 269 aa, Zea mays subsp. mays
  peptide (1)..(269): Ceres Seq. ID no. 12406174
  misc_feature (53)..(104): Pfam Name: Helix-loop-helix DNA-binding domain Pfam Description: Helix-loop-helix DNA-binding domain
  misc_feature (12)..(232): Homolog of NCBI NO: 28558779 NR Description: helix-loop-helix-like protein [Cucumis melo]
  misc_feature (35)..(232): Homolog of NCBI NO: 21593808 NR Description: unknown [Arabidopsis thaliana]
  misc_feature (9)..(232): Homolog of NCBI NO: 15238424 NR Description: bHLH protein
  misc_feature (35)..(232): Homolog of NCBI NO: 18395124 NR Description: expressed protein
  misc_feature (13)..(232): Homolog of NCBI NO: 15218391 NR Description: bHLH protein; protein id: At1g72210.1
  misc_feature (29)..(232): Homolog of NCBI NO: 15234187 NR Description: bHLH protein
  misc_feature (27)..(115): Homolog of NCBI NO: 38346722 NR Description: OSJNBa0086O06.20 [Oryza sativa (japonica
  misc_feature (128)..(238): Homolog of NCBI NO: 38346722 NR Description: OSJNBa0086O06.20 [Oryza sativa (japonica
  misc_feature (15)..(232): Homolog of NCBI NO: 37533680 NR Description: putative helix-loop-helix DNA-binding protein
  misc_feature (20)..(232): Homolog of NCBI NO: 34902426 NR Description: Unknown protein [Oryza sativa (japonica
  misc_feature (3)..(3): Xaa is any aa, unknown or other
  misc_feature (192)..(192): Xaa is any aa, unknown or other
  misc_feature (207)..(207): Xaa is any aa, unknown or other
MQXQHQLLSVSPPPSSAVAASSSGRRKAAASEAARRRRRRPKAVRNTDEMESQRRNHIAVERNRRRQMNEYLSVLRSAMPPSYTQRGDQASIVAGAINFVKELEQLLQSLEAQKRRQRCTEPLAASSFAGFFIFPQYSTTAATSGAVGSSSDSAGSGGDQSGGGGGARRGVADIEVSLAESHANVKVLAARXAAAAAEDGGGAAVPXPSPCSHLTVTTTADHLALYSLSLKMGGRVPAVAVGRRHRRRGERDTRRVRPRGGPLMISRLA

SEQ ID NO: 3360 - protein, 220 aa, Zea mays subsp. mays
  peptide (1)..(220): Ceres Seq. ID no. 12406175
  misc_feature (4)..(55): Pfam Name: Helix-loop-helix DNA-binding domain Pfam Description: Helix-loop-helix DNA-binding domain
  misc_feature (1)..(183): Homolog of NCBI NO: 28558779 NR Description: helix-loop-helix-like protein [Cucumis melo]
  misc_feature (1)..(183): Homolog of NCBI NO: 21593808 NR Description: unknown [Arabidopsis thaliana]
  misc_feature (1)..(183): Homolog of NCBI NO: 15238424 NR Description: bHLH protein
  misc_feature (1)..(183): Homolog of NCBI NO: 18395124 NR Description: expressed protein
  misc_feature (1)..(183): Homolog of NCBI NO: 15218391 NR Description: bHLH protein; protein id: At1g72210.1
  misc_feature (1)..(183): Homolog of NCBI NO: 15234187 NR Description: bHLH protein
  misc_feature (1)..(66): Homolog of NCBI NO: 38346722 NR Description: OSJNBa0086O06.20 [Oryza sativa (japonica
  misc_feature (79)..(189): Homolog of NCBI NO: 38346722 NR Description: OSJNBa0086O06.20 [Oryza sativa (japonica
  misc_feature (1)..(183): Homolog of NCBI NO: 37533680 NR Description: putative helix-loop-helix DNA-binding protein
  misc_feature (1)..(183): Homolog of NCBI NO: 34902426 NR Description: Unknown protein [Oryza sativa (japonica
  misc_feature (143)..(143): Xaa is any aa, unknown or other
  misc_feature (158)..(158): Xaa is any aa, unknown or other
MESQRRNHIAVERNRRRQMNEYLSVLRSAMPPSYTQRGDQASIVAGAINFVKELEQLLQSLEAQKRRQRCTEPLAASSFAGFFIFPQYSTTAATSGAVGSSSDSAGSGGDQSGGGGGARRGVADIEVSLAESHANVKVLAARXAAAAAEDGGGAAVPXPSPCSHLTVTTTADHLALYSLSLKMGGRVPAVAVGRRHRRRGERDTRRVRPRGGPLMISRLA

SEQ ID NO: 3361 - DNA, 996 bp, Zea mays subsp. mays
  misc_feature (1)..(996): Ceres Seq. ID no. 12413160
  misc_feature: MA Experiment ID: 108527 Result: Up-regulated in Transcription
  misc_feature: MA Experiment 108527 PARAMETER Experiment Name: Zm_5mM_NO_P Parameter: Age (day) Value: 8
  misc_feature: MA Experiment 108527 PARAMETER Experiment Name: Zm_5mM_NO_P Parameter: Organism Value: Zea mays
  misc_feature: MA Experiment 108527 PARAMETER Experiment Name: Zm_5mM_NO_P Parameter: Plant Line Value: 35A19
  misc_feature: MA Experiment 108527 PARAMETER Experiment Name: Zm_5mM_NO_P Parameter: Timepoint (hr) Value: 6
  misc_feature: MA Experiment 108527 PARAMETER Experiment Name: Zm_5mM_NO_P Parameter: Tissue Value: Aerial
  misc_feature: MA Experiment 108527 PARAMETER Experiment Name: Zm_5mM_NO_P Parameter: Treatment Value: 5mM NO vs. No Treatment
aatcaaaaaccccgaaggttcggactgaatgaagcgaaagcccaaatccccttccccttccccctcttcgtctccgtcggcggcgtcggaccgaacccgatcccgcagccctaactaaccctaggaggcaggcggcggcggggatggtgtactacgcgctgttggtgggcgcggagctggatggcctcaccaacctgcagcccccgccacggctgcgacgaccccagcttcccctactacctcaagctcaagtgcgagaactgcggggaggtcaccgccaagtccacctacgtcaccctcagcgagcaagtcgacctgcccagaggacacggcgccgctcacctcgtccagaagtgcaagctttgtgggagagatggaacaattgtgatgattcctggtcaggggacaccacttactattgagcagagccagaaagaggagaagacttgtttgatggtgtttgactgcagaggctatgaacctgttgagttttcctttggcactggctggaaggctgaatctgtgcatgggactccttttgaaattgactgctctgaaggtgaattttctgagtatgatgagaagggagaatgccccgttgagctaggcaagctgcagtcaacattcaaagtggtgaagaagcatgagaagggtgggaagactagatttgtctagatcgagtgacttggaatctggcagatattggagttggcggtgtgtataaatggtagatttgggctgaaggtcatgcgtgatccgacctcctttttcttctatctgttgattctgtggatgcagtgaaccatgcgaagctttcggtgatagtgtccacaggggcattaccctgtaccgaaactgatctttataacttaccaccaatgctcgaacatgttgctggttgctggtatttttagcactgttctctctggctaatgggtctgaagacatctcaaggggatatgtggtgcaatctgagttctttaaagggcatcgtct

SEQ ID NO: 3362 - protein, 164 aa, Zea mays subsp. mays
  peptide (1)..(164): Ceres Seq. ID no. 12413161
  misc_feature (1)..(152): Pfam Name: Eukaryotic protein of unknown function (DUF866) Pfam Description: Eukaryotic protein of unknown function (DUF866)
  misc_feature (17)..(153): Homolog of NCBI NO: 26328397 NR Description: unnamed protein product [Mus musculus]
  misc_feature (17)..(153): Homolog of NCBI NO: 21539639 NR Description: RIKEN cDNA 0610037L13 [Mus musculus]
  misc_feature (17)..(153): Homolog of NCBI NO: 27715611 NR Description: similar to hypothetical protein FLJ20580
  misc_feature (17)..(153): Homolog of NCBI NO: 8923541 NR Description: hypothetical protein FLJ20580 [Homo sapiens]
  misc_feature (21)..(157): Homolog of NCBI NO: 39594673 NR Description: Hypothetical protein CBG19371 [Caenorhabditis
  misc_feature (21)..(157): Homolog of NCBI NO: 17561054 NR Description: Putative protein of eukaryotic origin
  misc_feature (13)..(157): Homolog of NCBI NO: 7503539 NR Description: hypothetical protein F46B6.3 - Caenorhabditis
  misc_feature (8)..(153): Homolog of NCBI NO: 7486215 NR Description: hypothetical protein F26P21.50 - Arabidopsis
  misc_feature (8)..(153): Homolog of NCBI NO: 18418118 NR Description: putative protein
  misc_feature (1)..(162): Homolog of NCBI NO: 34914208 NR Description: OSJNBb0049O23.17 [Oryza sativa (japonica
MASPTCSPRHGCDDPSFPYYLKLKCENCGEVTAKSTYVTLSEQVDLPRGHGAAHLVQKCKLCGRDGTIVMIPGQGTPLTIEQSQKEEKTCLMVFDCRGYEPVEFSFGTGWKAESVHGTPFEIDCSEGEFSEYDEKGECPVELGKLQSTFKVVKKHEKGGKTRFV

SEQ ID NO: 3363 - protein, 95 aa, Zea mays subsp. mays
  peptide (1)..(95): Ceres Seq. ID no. 12413162
  misc_feature (1)..(83): Pfam Name: Eukaryotic protein of unknown function (DUF866) Pfam Description: Eukaryotic protein of unknown function (DUF866)
  misc_feature (1)..(88): Homolog of NCBI NO: 7503539 NR Description: hypothetical protein F46B6.3 - Caenorhabditis
  misc_feature (1)..(84): Homolog of NCBI NO: 7486215 NR Description: hypothetical protein F26P21.50 - Arabidopsis
  misc_feature (1)..(84): Homolog of NCBI NO: 26328397 NR Description: unnamed protein product [Mus musculus]
  misc_feature (1)..(84): Homolog of NCBI NO: 27715611 NR Description: similar to hypothetical protein FLJ20580
  misc_feature (1)..(88): Homolog of NCBI NO: 39594673 NR Description: Hypothetical protein CBG19371 [Caenorhabditis
  misc_feature (1)..(88): Homolog of NCBI NO: 17561054 NR Description: Putative protein of eukaryotic origin
  misc_feature (1)..(84): Homolog of NCBI NO: 8923541 NR Description: hypothetical protein FLJ20580 [Homo sapiens]
  misc_feature (1)..(84): Homolog of NCBI NO: 21539639 NR Description: RIKEN cDNA 0610037L13 [Mus musculus]
  misc_feature (1)..(84): Homolog of NCBI NO: 18418118 NR Description: putative protein
  misc_feature (1)..(93): Homolog of NCBI NO: 34914208 NR Description: OSJNBb0049O23.17 [Oryza sativa (japonica
MIPGQGTPLTIEQSQKEEKTCLMVFDCRGYEPVEFSFGTGWKAESVHGTPFEIDCSEGEFSEYDEKGECPVELGKLQSTFKVVKKHEKGGKTRFV

SEQ ID NO: 3364 - protein, 92 aa, Zea mays subsp. mays
  peptide (1)..(92): Ceres Seq. ID no. 12413163
MVYYALLVGAELDGLTNLQPPPRLRRPQLPLLPQAQVRELRGGHRQVHLRHPQRASRPAQRTRRRSPRPEVQALWERWNNCDDSWSGDTTYY

SEQ ID NO: 3365 - DNA, 1277 bp, Zea mays subsp. mays
  misc_feature (1)..(1277): Ceres Seq. ID no. 12406397
  misc_feature: MA Experiment ID: 108522 Result: Down-regulated in Transcription
  misc_feature: MA Experiment 108522 PARAMETER Experiment Name: Zm_42deg_Heat_P Parameter: Age (day) Value: 8
  misc_feature: MA Experiment 108522 PARAMETER Experiment Name: Zm_42deg_Heat_P Parameter: Organism Value: Zea mays
  misc_feature: MA Experiment 108522 PARAMETER Experiment Name: Zm_42deg_Heat_P Parameter: Plant Line Value: 35A19
  misc_feature: MA Experiment 108522 PARAMETER Experiment Name: Zm_42deg_Heat_P Parameter: Temperature (deg C) Value: 42 vs. 22
  misc_feature: MA Experiment 108522 PARAMETER Experiment Name: Zm_42deg_Heat_P Parameter: Timepoint (hr) Value: 1
  misc_feature: MA Experiment 108522 PARAMETER Experiment Name: Zm_42deg_Heat_P Parameter: Tissue Value: Aerial
  misc_feature: MA Experiment ID: 108529 Result: Down-regulated in Transcription
  misc_feature: MA Experiment 108529 PARAMETER Experiment Name: Zm_Imbibed_Seeds_P Parameter: Age (day) Value: 5 vs. 2
  misc_feature: MA Experiment 108529 PARAMETER Experiment Name: Zm_Imbibed_Seeds_P Parameter: Organism Value: Zea mays
  misc_feature: MA Experiment 108529 PARAMETER Experiment Name: Zm_Imbibed_Seeds_P Parameter: Plant Line Value: 35A19
  misc_feature: MA Experiment 108529 PARAMETER Experiment Name: Zm_Imbibed_Seeds_P Parameter: Tissue Value: Roots vs. Embryo
  misc_feature: MA Experiment ID: 108545 Result: Up-regulated in Transcription
  misc_feature: MA Experiment 108545 PARAMETER Experiment Name: Zm_Imbibed_Seeds_P Parameter: Age (day) Value: 3 vs. 2
  misc_feature: MA Experiment 108545 PARAMETER Experiment Name: Zm_Imbibed_Seeds_P Parameter: Organism Value: Zea mays
  misc_feature: MA Experiment 108545 PARAMETER Experiment Name: Zm_Imbibed_Seeds_P Parameter: Plant Line Value: 35A19
  misc_feature: MA Experiment 108545 PARAMETER Experiment Name: Zm_Imbibed_Seeds_P Parameter: Tissue Value: Aerial vs. Embryo
  misc_feature: MA Experiment ID: 108546 Result: Down-regulated in Transcription
  misc_feature: MA Experiment 108546 PARAMETER Experiment Name: Zm_Imbibed_Seeds_P Parameter: Age (day) Value: 3 vs. 2
  misc_feature: MA Experiment 108546 PARAMETER Experiment Name: Zm_Imbibed_Seeds_P Parameter: Organism Value: Zea mays
  misc_feature: MA Experiment 108546 PARAMETER Experiment Name: Zm_Imbibed_Seeds_P Parameter: Plant Line Value: 35A19
  misc_feature: MA Experiment 108546 PARAMETER Experiment Name: Zm_Imbibed_Seeds_P Parameter: Tissue Value: Roots vs. Embryo
  misc_feature: MA Experiment ID: 108547 Result: Up-regulated in Transcription
  misc_feature: MA Experiment 108547 PARAMETER Experiment Name: Zm_Imbibed_Seeds_P Parameter: Age (day) Value: 4 vs. 2
  misc_feature: MA Experiment 108547 PARAMETER Experiment Name: Zm_Imbibed_Seeds_P Parameter: Organism Value: Zea mays
  misc_feature: MA Experiment 108547 PARAMETER Experiment Name: Zm_Imbibed_Seeds_P Parameter: Plant Line Value: 35A19
  misc_feature: MA Experiment 108547 PARAMETER Experiment Name: Zm_Imbibed_Seeds_P Parameter: Tissue Value: Aerial vs. Embryo
  misc_feature: MA Experiment ID: 108556 Result: Down-regulated in Transcription
  misc_feature: MA Experiment 108556 PARAMETER Experiment Name: Zm_Drought_P Parameter: Age (day) Value: 9
  misc_feature: MA Experiment 108556 PARAMETER Experiment Name: Zm_Drought_P Parameter: Organism Value: Zea mays
  misc_feature: MA Experiment 108556 PARAMETER Experiment Name: Zm_Drought_P Parameter: Plant Line Value: 35A19
  misc_feature: MA Experiment 108556 PARAMETER Experiment Name: Zm_Drought_P Parameter: Timepoint (hr) Value: 24
  misc_feature: MA Experiment 108556 PARAMETER Experiment Name: Zm_Drought_P Parameter: Tissue Value: Aerial
  misc_feature: MA Experiment 108556 PARAMETER Experiment Name: Zm_Drought_P Parameter: Treatment Value: Drought vs. No Drought
  misc_feature: MA Experiment ID: 108689 Result: Down-regulated in Transcription
  misc_feature: MA Experiment 108689 PARAMETER Experiment Name: Zm_Drought_Roots_P Parameter: Age (day) Value: 9
  misc_feature: MA Experiment 108689 PARAMETER Experiment Name: Zm_Drought_Roots_P Parameter: Organism Value: Zea mays
  misc_feature: MA Experiment 108689 PARAMETER Experiment Name: Zm_Drought_Roots_P Parameter: Plant Line Value: 35A19
  misc_feature: MA Experiment 108689 PARAMETER Experiment Name: Zm_Drought_Roots_P Parameter: Timepoint (hr) Value: 24
  misc_feature: MA Experiment 108689 PARAMETER Experiment Name: Zm_Drought_Roots_P Parameter: Tissue Value: Roots
  misc_feature: MA Experiment 108689 PARAMETER Experiment Name: Zm_Drought_Roots_P Parameter: Treatment Value: Drought vs. No Drought
  misc_feature: MA Experiment ID: 20000478 Result: Down-regulated in Transcription
  misc_feature: MA Experiment 20000478 PARAMETER Experiment Name: Zm_5mM_SA_P Parameter: Age (day) Value: 11
  misc_feature: MA Experiment 20000478 PARAMETER Experiment Name: Zm_5mM_SA_P Parameter: Organism Value: Zea mays
  misc_feature: MA Experiment 20000478 PARAMETER Experiment Name: Zm_5mM_SA_P Parameter: Plant Line Value: 35A19
  misc_feature: MA Experiment 20000478 PARAMETER Experiment Name: Zm_5mM_SA_P Parameter: Timepoint (hr) Value: 72
  misc_feature: MA Experiment 20000478 PARAMETER Experiment Name: Zm_5mM_SA_P Parameter: Tissue Value: Aerial
  misc_feature: MA Experiment 20000478 PARAMETER Experiment Name: Zm_5mM_SA_P Parameter: Treatment Value: 5mM SA vs. No Treatment
  misc_feature: MA Experiment ID: 20000480 Result: Down-regulated in Transcription
  misc_feature: MA Experiment 20000480 PARAMETER Experiment Name: Zm_Drought_P Parameter: Age (day) Value: 11
  misc_feature: MA Experiment 20000480 PARAMETER Experiment Name: Zm_Drought_P Parameter: Organism Value: Zea mays
  misc_feature: MA Experiment 20000480 PARAMETER Experiment Name: Zm_Drought_P Parameter: Plant Line Value: 35A19
  misc_feature: MA Experiment 20000480 PARAMETER Experiment Name: Zm_Drought_P Parameter: Timepoint (hr) Value: 72
  misc_feature: MA Experiment 20000480 PARAMETER Experiment Name: Zm_Drought_P Parameter: Tissue Value: Aerial
  misc_feature: MA Experiment 20000480 PARAMETER Experiment Name: Zm_Drought_P Parameter: Treatment Value: Drought vs. No Drought
  misc_feature: MA Experiment ID: 20000535 Result: Up-regulated in Transcription
  misc_feature: MA Experiment 20000535 PARAMETER Experiment Name: Zm_Hybrid_Seed_Dev_P Parameter: DAP Value: 30 vs. 12
  misc_feature: MA Experiment 20000535 PARAMETER Experiment Name: Zm_Hybrid_Seed_Dev_P Parameter: Organism Value: Zea mays
  misc_feature: MA Experiment 20000535 PARAMETER Experiment Name: Zm_Hybrid_Seed_Dev_P Parameter: Plant Line Value: 35A19
  misc_feature: MA Experiment 20000535 PARAMETER Experiment Name: Zm_Hybrid_Seed_Dev_P Parameter: Tissue Value: Embryo vs. Unfert Floret
  misc_feature: MA Experiment ID: 20000626 Result: Down-regulated in Transcription
  misc_feature: MA Experiment 20000626 PARAMETER Experiment Name: Zm_Herbicide-Treatments_P Parameter: Timepoint (hr) Value: 12
  misc_feature: MA Experiment 20000626 PARAMETER Experiment Name: Zm_Herbicide-Treatments_P Parameter: Tissue Value: Aerial
  misc_feature: MA Experiment 20000626 PARAMETER Experiment Name: Zm_Herbicide-Treatments_P Parameter: Treatment Value: Roundup vs. No Treatment
actcatcaaacccgcccttacagtcttatccatcgcggcctcgccgtccagcagctagctacgacctagctctgggcctctggccctgtgcctcgcccgagctgcagctccactccggtgcaccatggccgtcctgacgaaggtgcttctccgtctcttcttcaccactggcggcctcatcgtcttcctgttgtgtcccgcgtcctgccttgctcgtcctcctcattccagcagcaactccaactactactgcgactggtgccctcgccgttccaccgcctcccccgacctcgacgcgtcgttgctgcgttcttgtggaactagtagagacggcgacgacggtggcttcggctgcgggtacggggctgcggagcagctggacggaggtggagctccccacgtcgctgccgcgggcgccgactccttcagcgctggcgctggctgcggcgcctgctaccagttgaggtgcagagaccggagggtgtgcggcgacggcggcgtcaaggtcgtcgtggtagccggcttggccaaccggacggggttcttgctcaccagggaggccttcgctgcgatgatggccaggccgcgcgtgtcgtccaatgaccaactgctgcccggcttgggtggcaatgttgttgaggtcgacttcaggaggataccttgcgagtacaagaacagaaacctgtcggtacgcatcgacgaggaagggagccggcacccggcgcacctggccatcaccttcctgtaccagggcgggcagacggacatcgcggccgtcgagctctcgcacgcgcacgcgcagccgccgtcgtggcggcccatggcgcccgtgggcaggcgcggcatcgtgacgtggcgcacctcaagcgcgccggcggggccgctgcagctccgcctcgtcgtcacggccggcgtcggcggcaagtggctgcgggccggcggggacgtgctgccggcggactggcggcctgggcaggtgcacgacacggggctccggatccgcgacgtcgccctgagctcctgcgcccgctcctgccgcggcgccgctacagccggcgccagcgaggagctcaggtagtagagtagattagatgtaggcatggcatacaatggcattgggctggaggcgagcgagattagcttgctgcttgagtgcccatgaaggatgctcgtgctcgtccattgaggaaaattaaaagcaaaccagcagagagctgatctctgatgatctgacgcagtccatggaaatggaagcaaattaagttggtttcttgctg

SEQ ID NO: 3366 - protein, 317 aa, Zea mays subsp. mays
  peptide (1)..(317): Ceres Seq. ID no. 12406398
  misc_feature (187)..(277): Pfam Name: Pollen allergen Pfam Description: Pollen allergen
  misc_feature (37)..(300): Homolog of NCBI NO: 20138389 NR Description: Expansin-like 3 precursor (At-EXPL3)
  misc_feature (37)..(300): Homolog of NCBI NO: 15233841 NR Description: putative pollen allergen
  misc_feature (77)..(301): Homolog of NCBI NO: 33111959 NR Description: expansin-like protein [Quercus robur]
  misc_feature (37)..(300): Homolog of NCBI NO: 21555265 NR Description: Expansin-like 1 precursor (At-EXPL1)
  misc_feature (37)..(300): Homolog of NCBI NO: 15231303 NR Description: putative protein
  misc_feature (57)..(300): Homolog of NCBI NO: 37536544 NR Description: putative pollen allergen [Oryza sativa (japonica
  misc_feature (73)..(300): Homolog of NCBI NO: 34901594 NR Description: P0571D04.11 [Oryza sativa (japonica
  misc_feature (86)..(300): Homolog of NCBI NO: 25136297 NR Description: expansin-like protein [Oryza sativa (japonica
  misc_feature (43)..(300): Homolog of NCBI NO: 20502989 NR Description: Putative pollen allergen [Oryza sativa (japonica
  misc_feature (77)..(300): Homolog of NCBI NO: 21654743 NR Description: expansin-like protein 1 [Oryza sativa]
MAVLTKVLLRLFFTTGGLIVFLLCPASCLARPPHSSSNSNYYCDWCPRRSTASPDLDASLLRSCGTSRDGDDGGFGCGYGAAEQLDGGGAPHVAAAGADSFSAGAGCGACYQLRCRDRRVCGDGGVKVVVVAGLANRTGFLLTREAFAAMMARPRVSSNDQLLPGLGGNVVEVDFRRIPCEYKNRNLSVRIDEEGSRHPAHLAITFLYQGGQTDIAAVELSHAHAQPPSWRPMAPVGRRGIVTWRTSSAPAGPLQLRLVVTAGVGGKWLRAGGDVLPADWRPGQVHDTGLRIRDVALSSCARSCRGAATAGASEELR

SEQ ID NO: 3367 - protein, 168 aa, Zea mays subsp. mays
  peptide (1)..(168): Ceres Seq. ID no. 12406399
  misc_feature (38)..(128): Pfam Name: Pollen allergen Pfam Description: Pollen allergen
  misc_feature (1)..(151): Homolog of NCBI NO: 20138389 NR Description: Expansin-like 3 precursor (At-EXPL3)
  misc_feature (1)..(151): Homolog of NCBI NO: 15233841 NR Description: putative pollen allergen
  misc_feature (1)..(152): Homolog of NCBI NO: 33111959 NR Description: expansin-like protein [Quercus robur]
  misc_feature (1)..(151): Homolog of NCBI NO: 21555265 NR Description: Expansin-like 1 precursor (At-EXPL1)
  misc_feature (1)..(151): Homolog of NCBI NO: 15231303 NR Description: putative protein
  misc_feature (1)..(151): Homolog of NCBI NO: 37536544 NR Description: putative pollen allergen [Oryza sativa (japonica
  misc_feature (1)..(151): Homolog of NCBI NO: 34901594 NR Description: P0571D04.11 [Oryza sativa (japonica
  misc_feature (1)..(151): Homolog of NCBI NO: 25136297 NR Description: expansin-like protein [Oryza sativa (japonica
  misc_feature (1)..(151): Homolog of NCBI NO: 20502989 NR Description: Putative pollen allergen [Oryza sativa (japonica
  misc_feature (1)..(151): Homolog of NCBI NO: 21654743 NR Description: expansin-like protein 1 [Oryza sativa]
MMARPRVSSNDQLLPGLGGNVVEVDFRRIPCEYKNRNLSVRIDEEGSRHPAHLAITFLYQGGQTDIAAVELSHAHAQPPSWRPMAPVGRRGIVTWRTSSAPAGPLQLRLVVTAGVGGKWLRAGGDVLPADWRPGQVHDTGLRIRDVALSSCARSCRGAATAGASEELR

SEQ ID NO: 3368 - protein, 167 aa, Zea mays subsp. mays
  peptide (1)..(167): Ceres Seq. ID no. 12406400
  misc_feature (37)..(127): Pfam Name: Pollen allergen Pfam Description: Pollen allergen
  misc_feature (1)..(150): Homolog of NCBI NO: 20138389 NR Description: Expansin-like 3 precursor (At-EXPL3)
  misc_feature (1)..(150): Homolog of NCBI NO: 15233841 NR Description: putative pollen allergen
  misc_feature (1)..(151): Homolog of NCBI NO: 33111959 NR Description: expansin-like protein [Quercus robur]
  misc_feature (1)..(150): Homolog of NCBI NO: 21555265 NR Description: Expansin-like 1 precursor (At-EXPL1)
  misc_feature (1)..(150): Homolog of NCBI NO: 15231303 NR Description: putative protein
  misc_feature (1)..(150): Homolog of NCBI NO: 37536544 NR Description: putative pollen allergen [Oryza sativa (japonica
  misc_feature (1)..(150): Homolog of NCBI NO: 34901594 NR Description: P0571D04.11 [Oryza sativa (japonica
  misc_feature (1)..(150): Homolog of NCBI NO: 25136297 NR Description: expansin-like protein [Oryza sativa (japonica
  misc_feature (1)..(150): Homolog of NCBI NO: 20502989 NR Description: Putative pollen allergen [Oryza sativa (japonica
  misc_feature (1)..(150): Homolog of NCBI NO: 21654743 NR Description: expansin-like protein 1 [Oryza sativa]
MARPRVSSNDQLLPGLGGNVVEVDFRRIPCEYKNRNLSVRIDEEGSRHPAHLAITFLYQGGQTDIAAVELSHAHAQPPSWRPMAPVGRRGIVTWRTSSAPAGPLQLRLVVTAGVGGKWLRAGGDVLPADWRPGQVHDTGLRIRDVALSSCARSCRGAATAGASEELR

SEQ ID NO: 3369 - DNA, 1057 bp, Zea mays subsp. mays
  misc_feature (1)..(1057): Ceres Seq. ID no. 12410273
  misc_feature: MA Experiment ID: 20001606 Result: Down-regulated in Transcription
  misc_feature: MA Experiment 20001606 PARAMETER Experiment Name: Zm_50ppm_KNO3_L-to-H_P Parameter: Age (day) Value: 19
  misc_feature: MA Experiment 20001606 PARAMETER Experiment Name: Zm_50ppm_KNO3_L-to-H_P Parameter: Organism Value: Zea mays
  misc_feature: MA Experiment 20001606 PARAMETER Experiment Name: Zm_50ppm_KNO3_L-to-H_P Parameter: Plant Line Value: 35A19
  misc_feature: MA Experiment 20001606 PARAMETER Experiment Name: Zm_50ppm_KNO3_L-to-H_P Parameter: Timepoint (hr) Value: 8
  misc_feature: MA Experiment 20001606 PARAMETER Experiment Name: Zm_50ppm_KNO3_L-to-H_P Parameter: Tissue Value: Shoots
  misc_feature: MA Experiment 20001606 PARAMETER Experiment Name: Zm_50ppm_KNO3_L-to-H_P Parameter: Treatment Value: 50ppm KNO3 vs. 50ppm KCl
catgcaaatttagtcgtggccagcgtcgctgtctttttttcttccgttacctctccaggcagctcctctccctctctgtcgccgacgactacgccaggtcttcttcggggcccaggtcgctgccgcctacatcaggggccccaagttttcctaggacccctcgccggcgacgagcaccaccagcttggttcactcccaacaaaatgtcagccaatgtgggtgaatcaactagcggtgtcagcagcagcgatgcagctggggggagctttgagtgcaacatatgcttcgagctgcctcaggagccaatagtgactctctgtggccacctcttctgctggccgtgcctttaccggtggctgcacattcacgcacactcgccagagtgcccagtgtgcaaggccctcgtggaggaggacaagctcgtccccctttatgggcgtggcaaggatcgcgtcgacccgaggtcgaagaacatgcccgagggcgagattcctcaccgcccaacgggccagaggcctgccacagccccccgggcccatgctaacagcaactttgccaatgccaatgccaatgccaatccatggttcccgggcgcaggagtccctctggcaaatgcgcgatgggggaactacgcattctcagctgctttcgggggactgttccctatgcttagcttccaagttcatgggtttccagatgccgccgcttacgcgcagcctgctgggttccactatgaatacgggcatgggcatgggcatgggttccaccatggcgggcatatgggacaagcacaagcccatggcgtccaccgacaggcaccgttggggcaacaacagcagcaggcagatatttatctgaaggccctgctcttcatgattgtaattctagtgctcgcaagcctcctcgcgttttaaagcttgtttggcaacgtctcctcgtcatggtttggaaattgtaattctggggagtgctcctcctggcatttcagtgctgttggcatggcagtttgacattgtgatggcgtattggcctatgagaatcgccagaatatttcact

SEQ ID NO: 3370 - protein, 303 aa, Zea mays subsp. mays
  peptide (1)..(303): Ceres Seq. ID no. 12410274
  misc_feature (91)..(131): Pfam Name: Zinc finger, C3HC4 type (RING finger) Pfam Description: Zinc finger, C3HC4 type (RING finger)
  misc_feature (74)..(297): Homolog of NCBI NO: 39581891 NR Description: Hypothetical protein CBG20152 [Caenorhabditis
  misc_feature (76)..(194): Homolog of NCBI NO: 22795037 NR Description: putative RING protein [Populus x canescens]
  misc_feature (80)..(229): Homolog of NCBI NO: 21912604 NR Description: putative ubiquitin ligase [Taenia solium]
  misc_feature (74)..(301): Homolog of NCBI NO: 17554742 NR Description: Ring finger protein RNF-5 (24.9 kD) (rnf-5)
  misc_feature (80)..(190): Homolog of NCBI NO: 15222064 NR Description: putative RING zinc finger protein
  misc_feature (73)..(301): Homolog of NCBI NO: 21553849 NR Description: putative RING zinc finger protein [Arabidopsis
  misc_feature (73)..(301): Homolog of NCBI NO: 15224062 NR Description: putative RING zinc finger protein
  misc_feature (70)..(300): Homolog of NCBI NO: 18394721 NR Description: expressed protein
  misc_feature (68)..(303): Homolog of NCBI NO: 34909840 NR Description: P0403C05.28 [Oryza sativa (japonica
  misc_feature (68)..(303): Homolog of NCBI NO: 29150403 NR Description: unknown protein [Oryza sativa (japonica
CKFSRGQRRCLFFFRYLSRQLLSLSVADDYARSSSGPRSLPPTSGAPSFPRTPRRRRAPPAWFTPNKMSANVGESTSGVSSSDAAGGSFECNICFELPQEPIVTLCGHLFCWPCLYRWLHIHAHSPECPVCKALVEEDKLVPLYGRGKDRVDPRSKNMPEGEIPHRPTGQRPATAPRAHANSNFANANANANPWFPGAGVPLANARWGNYAFSAAFGGLFPMLSFQVHGFPDAAAYAQPAGFHYEYGHGHGHGFHHGGHMGQAQAHGVHRQAPLGQQQQQADIYLKALLFMIVILVLASLLAF

SEQ ID NO: 3371 - protein, 236 aa, Zea mays subsp. mays
  peptide (1)..(236): Ceres Seq. ID no. 12410275
  misc_feature (24)..(64): Pfam Name: Zinc finger, C3HC4 type (RING finger) Pfam Description: Zinc finger, C3HC4 type (RING finger)
  misc_feature (7)..(230): Homolog of NCBI NO: 39581891 NR Description: Hypothetical protein CBG20152 [Caenorhabditis
  misc_feature (9)..(127): Homolog of NCBI NO: 22795037 NR Description: putative RING protein [Populus x canescens]
  misc_feature (13)..(162): Homolog of NCBI NO: 21912604 NR Description: putative ubiquitin ligase [Taenia solium]
  misc_feature (7)..(234): Homolog of NCBI NO: 17554742 NR Description: Ring finger protein RNF-5 (24.9 kD) (rnf-5)
  misc_feature (13)..(123): Homolog of NCBI NO: 15222064 NR Description: putative RING zinc finger protein
  misc_feature (6)..(234): Homolog of NCBI NO: 21553849 NR Description: putative RING zinc finger protein [Arabidopsis
  misc_feature (6)..(234): Homolog of NCBI NO: 15224062 NR Description: putative RING zinc finger protein
  misc_feature (3)..(233): Homolog of NCBI NO: 18394721 NR Description: expressed protein
  misc_feature (1)..(236): Homolog of NCBI NO: 34909840 NR Description: P0403C05.28 [Oryza sativa (japonica
  misc_feature (1)..(236): Homolog of NCBI NO: 29150403 NR Description: unknown protein [Oryza sativa (japonica
MSANVGESTSGVSSSDAAGGSFECNICFELPQEPIVTLCGHLFCWPCLYRWLHIHAHSPECPVCKALVEEDKLVPLYGRGKDRVDPRSKNMPEGEIPHRPTGQRPATAPRAHANSNFANANANANPWFPGAGVPLANARWGNYAFSAAFGGLFPMLSFQVHGFPDAAAYAQPAGFHYEYGHGHGHGFHHGGHMGQAQAHGVHRQAPLGQQQQQADIYLKALLFMIVILVLASLLAF

SEQ ID NO: 3372 - DNA, 1981 bp, Zea mays subsp. mays
  misc_feature (1)..(1981): Ceres Seq. ID no. 12410269
  misc_feature: MA Experiment ID: 108522 Result: Up-regulated in Transcription
  misc_feature: MA Experiment 108522 PARAMETER Experiment Name: Zm_42deg_Heat_P Parameter: Age (day) Value: 8
  misc_feature: MA Experiment 108522 PARAMETER Experiment Name: Zm_42deg_Heat_P Parameter: Organism Value: Zea mays
  misc_feature: MA Experiment 108522 PARAMETER Experiment Name: Zm_42deg_Heat_P Parameter: Plant Line Value: 35A19
  misc_feature: MA Experiment 108522 PARAMETER Experiment Name: Zm_42deg_Heat_P Parameter: Temperature (deg C) Value: 42 vs. 22
  misc_feature: MA Experiment 108522 PARAMETER Experiment Name: Zm_42deg_Heat_P Parameter: Timepoint (hr) Value: 1
  misc_feature: MA Experiment 108522 PARAMETER Experiment Name: Zm_42deg_Heat_P Parameter: Tissue Value: Aerial
  misc_feature: MA Experiment ID: 108556 Result: Up-regulated in Transcription
  misc_feature: MA Experiment 108556 PARAMETER Experiment Name: Zm_Drought_P Parameter: Age (day) Value: 9
  misc_feature: MA Experiment 108556 PARAMETER Experiment Name: Zm_Drought_P Parameter: Organism Value: Zea mays
  misc_feature: MA Experiment 108556 PARAMETER Experiment Name: Zm_Drought_P Parameter: Plant Line Value: 35A19
  misc_feature: MA Experiment 108556 PARAMETER Experiment Name: Zm_Drought_P Parameter: Timepoint (hr) Value: 24
  misc_feature: MA Experiment 108556 PARAMETER Experiment Name: Zm_Drought_P Parameter: Tissue Value: Aerial
  misc_feature: MA Experiment 108556 PARAMETER Experiment Name: Zm_Drought_P Parameter: Treatment Value: Drought vs. No Drought
  misc_feature: MA Experiment ID: 20000534 Result: Down-regulated in Transcription
  misc_feature: MA Experiment 20000534 PARAMETER Experiment Name: Zm_Hybrid_Pollen_P Parameter: Age (day) Value: 8
  misc_feature: MA Experiment 20000534 PARAMETER Experiment Name: Zm_Hybrid_Pollen_P Parameter: Organism Value: Zea mays
  misc_feature: MA Experiment 20000534 PARAMETER Experiment Name: Zm_Hybrid_Pollen_P Parameter: Plant Line Value: 35A19
  misc_feature: MA Experiment 20000534 PARAMETER Experiment Name: Zm_Hybrid_Pollen_P Parameter: Tissue Value: Pollen vs. Aerial
atcgaccccatcgcgttgccggatcgagctcagctctatctcgaaccttggttcgccgcacggcaccagaagcacggccgtgttctcatcccctccacacgtttccgcctcccgatccacgtccgccgttagccgcggccgacacagctcctcctcctcctcgcagctcttctccagctctcggaggcccgaggtttcatcgacccgcgctccttcatcctcgacacctcactccggcggcgcgggtccgcagtgctgcacatcgcgagccgcgcggcacagccgcacttgttgtccttcgtgcgtggggtgcggttcgacgcgggcggcgggatggcggcgagcgcgcgggacagcaccgatgcagcggagcgagttgtggatgaccacgacggctgggcgtcggacgccgagatggacgtggagatggatgtggtggaaggcgagttccacgaccgcgatgccgaccggagggacggcggcgcggatggtgatgatgagtacttgctgctcactaggataagggacacatcagcagctgaagcaagggcaggaaaggatatacaaggtataccatgggagaggatacacatagccaggcaagattaccgaaaagctaggttggaacagtataagaactatgaaaatttccctcaatcaggagagctcatggataagctgtgcaagcaagtggagaagagcagcaagtattatgaatttcagcacaacactagatcagtgaagccatcaattctccattttcaggaatttgttatgggcaacatcgaagcatgatgtctattttatgtcaaattccacagtaagccactggtcatcattgtctcacaaattatcagaggttcttgacttctctgggcatgttgctccagcggagaagtatcctggcagtttactagaaggtttctctggtgttcaagttagcacacttgctgtgaatgagggtttggtggtagctggtggttttcaaggagaactaattggcaaagatgtggaaggctgtagtgtaaaattctgtatgaggacaactttgagtgacaatgccataacaaatgccatagatatacacagatcgataagtggaagcctgcacattacagtatctaacaacgattgtggtgttcgtgaatatgatatggagagatatcagctcgtgaaccactaccgatataactggccggttaatcacacatccgtgagcccagataagaaacttttggctgtggttggagatgatcgagatgctcttcttgtggattcacgaaatggaaaggtaacctctaccctagttggccatctggactactcatttgctacggcatggcacccggacagccggacattcgcgaccgggaaccaggacaaaacctgccgcatctgggacacccgcaacttgtcgacctcacttgcagtactgcggggcaacatcggcgcgatccggtgcatccgctactcctccgacgggcggttcctggtgttctcggagcctgccgacttcgtccatgtgtacagtgtggctgcggactacaagaaacggcaggagattgacttctttggtgaggtgtccgggatcacgctcagcccggacgatgagtccctgttcatcggagtgtgcgaccgcgtctatgccagcctgttgcagtacaggatgatccgcggattcgactatcttgactcatacgtgtgaagaactgagctttggtgactggtgttgtgctaggtgctggctgaaggttctgatgcgcggttcagggaatatatctgcctgctcttagttcatggcgaatgatggttcggtgggactcgacgccagcgaatctgccgtgtaaatagtttagaatttgaagcgtagtgtagtgctgtggaccaatgctgtctctgaacatacatatgatcagagtaatgtgtgtttgcgctgttagtttcagactccggaatacaaatagttttggaccaaattcct

SEQ ID NO: 3373 - protein, 299 aa, Zea mays subsp. mays
  peptide (1)..(299): Ceres Seq. ID no. 12410270
  misc_feature (1)..(299): Homolog of NCBI NO: 9294540 NR Description: WD domain protein-like [Arabidopsis thaliana]
  misc_feature (1)..(299): Homolog of NCBI NO: 18405485 NR Description: expressed protein
  misc_feature (1)..(299): Homolog of NCBI NO: 18399975 NR Description: expressed protein
  misc_feature (1)..(297): Homolog of NCBI NO: 9758639 NR Description: WD-repeat protein-like [Arabidopsis thaliana]
  misc_feature (1)..(297): Homolog of NCBI NO: 21536732 NR Description: WD-repeat protein-like [Arabidopsis thaliana]
  misc_feature (1)..(297): Homolog of NCBI NO: 18423837 NR Description: WD-repeat protein-like
  misc_feature (1)..(297): Homolog of NCBI NO: 30696707 NR Description: WD-40 repeat protein family [Arabidopsis
  misc_feature (1)..(299): Homolog of NCBI NO: 27948448 NR Description: GAMYB-binding protein [Hordeum vulgare subsp.
  misc_feature (168)..(299): Homolog of NCBI NO: 8096398 NR Description: ESTs AU082471(C61852),AU082572(S11858), AU082573(S11858) correspond to a region of the predicted
  misc_feature (1)..(162): Homolog of NCBI NO: 8096398 NR Description: ESTs AU082471(C61852),AU082572(S11858), AU082573(S11858) correspond to a region of the predicted
MSNSTVSHWSSLSHKLSEVLDFSGHVAPAEKYPGSLLEGFSGVQVSTLAVNEGLVVAGGFQGELIGKDVEGCSVKFCMRTTLSDNAITNAIDIHRSISGSLHITVSNNDCGVREYDMERYQLVNHYRYNWPVNHTSVSPDKKLLAVVGDDRDALLVDSRNGKVTSTLVGHLDYSFATAWHPDSRTFATGNQDKTCRIWDTRNLSTSLAVLRGNIGAIRCIRYSSDGRFLVFSEPADFVHVYSVAADYKKRQEIDFFGEVSGITLSPDDESLFIGVCDRVYASLLQYRMIRGFDYLDSYV

SEQ ID NO: 3374 - protein, 222 aa, Zea mays subsp. mays
  peptide (1)..(222): Ceres Seq. ID no. 12410271
  misc_feature (1)..(222): Homolog of NCBI NO: 9294540 NR Description: WD domain protein-like [Arabidopsis thaliana]
  misc_feature (1)..(222): Homolog of NCBI NO: 18405485 NR Description: expressed protein
  misc_feature (1)..(222): Homolog of NCBI NO: 18399975 NR Description: expressed protein
  misc_feature (1)..(220): Homolog of NCBI NO: 9758639 NR Description: WD-repeat protein-like [Arabidopsis thaliana]
  misc_feature (1)..(220): Homolog of NCBI NO: 21536732 NR Description: WD-repeat protein-like [Arabidopsis thaliana]
  misc_feature (1)..(220): Homolog of NCBI NO: 18423837 NR Description: WD-repeat protein-like
  misc_feature (1)..(220): Homolog of NCBI NO: 30696707 NR Description: WD-40 repeat protein family [Arabidopsis
  misc_feature (1)..(222): Homolog of NCBI NO: 27948448 NR Description: GAMYB-binding protein [Hordeum vulgare subsp.
  misc_feature (91)..(222): Homolog of NCBI NO: 8096398 NR Description: ESTs AU082471(C61852),AU082572(S11858), AU082573(S11858) correspond to a region of the predicted
  misc_feature (1)..(85): Homolog of NCBI NO: 8096398 NR Description: ESTs AU082471(C61852),AU082572(S11858), AU082573(S11858) correspond to a region of the predicted
MRTTLSDNAITNAIDIHRSISGSLHITVSNNDCGVREYDMERYQLVNHYRYNWPVNHTSVSPDKKLLAVVGDDRDALLVDSRNGKVTSTLVGHLDYSFATAWHPDSRTFATGNQDKTCRIWDTRNLSTSLAVLRGNIGAIRCIRYSSDGRFLVFSEPADFVHVYSVAADYKKRQEIDFFGEVSGITLSPDDESLFIGVCDRVYASLLQYRMIRGFDYLDSYV

SEQ ID NO: 3375 - protein, 183 aa, Zea mays subsp. mays
  peptide (1)..(183): Ceres Seq. ID no. 12410272
  misc_feature (1)..(183): Homolog of NCBI NO: 27948448 NR Description: GAMYB-binding protein [Hordeum vulgare subsp.
  misc_feature (52)..(183): Homolog of NCBI NO: 8096398 NR Description: ESTs AU082471(C61852),AU082572(S11858), AU082573(S11858) correspond to a region of the predicted
  misc_feature (1)..(46): Homolog of NCBI NO: 8096398 NR Description: ESTs AU082471(C61852),AU082572(S11858), AU082573(S11858) correspond to a region of the predicted
  misc_feature (1)..(183): Homolog of NCBI NO: 9294540 NR Description: WD domain protein-like [Arabidopsis thaliana]
  misc_feature (1)..(183): Homolog of NCBI NO: 18405485 NR Description: expressed protein
  misc_feature (1)..(183): Homolog of NCBI NO: 18399975 NR Description: expressed protein
  misc_feature (1)..(181): Homolog of NCBI NO: 9758639 NR Description: WD-repeat protein-like [Arabidopsis thaliana]
  misc_feature (1)..(181): Homolog of NCBI NO: 21536732 NR Description: WD-repeat protein-like [Arabidopsis thaliana]
  misc_feature (1)..(181): Homolog of NCBI NO: 18423837 NR Description: WD-repeat protein-like
  misc_feature (1)..(181): Homolog of NCBI NO: 30696707 NR Description: WD-40 repeat protein family [Arabidopsis
MERYQLVNHYRYNWPVNHTSVSPDKKLLAVVGDDRDALLVDSRNGKVTSTLVGHLDYSFATAWHPDSRTFATGNQDKTCRIWDTRNLSTSLAVLRGNIGAIRCIRYSSDGRFLVFSEPADFVHVYSVAADYKKRQEIDFFGEVSGITLSPDDESLFIGVCDRVYASLLQYRMIRGFDYLDSYV

SEQ ID NO: 3376 - DNA, 857 bp, Zea mays subsp. mays
  misc_feature (1)..(857): Ceres Seq. ID no. 12412972
  misc_feature: MA Experiment ID: 20000488 Result: Up-regulated in Transcription
  misc_feature: MA Experiment 20000488 PARAMETER Experiment Name: Zm_50mM_NH4NO3_L_to_H_P Parameter: Organism Value: Zea mays
  misc_feature: MA Experiment 20000488 PARAMETER Experiment Name: Zm_50mM_NH4NO3_L_to_H_P Parameter: Timepoint (hr) Value: 8
  misc_feature: MA Experiment 20000488 PARAMETER Experiment Name: Zm_50mM_NH4NO3_L_to_H_P Parameter: Tissue Value: Leaves
  misc_feature: MA Experiment 20000488 PARAMETER Experiment Name: Zm_50mM_NH4NO3_L_to_H_P Parameter: Treatment Value: 50mM NH4NO3 vs. 100mM Mannitol
  misc_feature: MA Experiment ID: 20001605 Result: Up-regulated in Transcription
  misc_feature: MA Experiment 20001605 PARAMETER Experiment Name: Zm_50ppm_KNO3_L-to-H_P Parameter: Age (day) Value: 19
  misc_feature: MA Experiment 20001605 PARAMETER Experiment Name: Zm_50ppm_KNO3_L-to-H_P Parameter: Organism Value: Zea mays
  misc_feature: MA Experiment 20001605 PARAMETER Experiment Name: Zm_50ppm_KNO3_L-to-H_P Parameter: Plant Line Value: 35A19
  misc_feature: MA Experiment 20001605 PARAMETER Experiment Name: Zm_50ppm_KNO3_L-to-H_P Parameter: Timepoint (hr) Value: 4
  misc_feature: MA Experiment 20001605 PARAMETER Experiment Name: Zm_50ppm_KNO3_L-to-H_P Parameter: Tissue Value: Shoots
  misc_feature: MA Experiment 20001605 PARAMETER Experiment Name: Zm_50ppm_KNO3_L-to-H_P Parameter: Treatment Value: 50ppm KNO3 vs. 50ppm KCl
  misc_feature: MA Experiment ID: 20001606 Result: Up-regulated in Transcription
  misc_feature: MA Experiment 20001606 PARAMETER Experiment Name: Zm_50ppm_KNO3_L-to-H_P Parameter: Age (day) Value: 19
  misc_feature: MA Experiment 20001606 PARAMETER Experiment Name: Zm_50ppm_KNO3_L-to-H_P Parameter: Organism Value: Zea mays
  misc_feature: MA Experiment 20001606 PARAMETER Experiment Name: Zm_50ppm_KNO3_L-to-H_P Parameter: Plant Line Value: 35A19
  misc_feature: MA Experiment 20001606 PARAMETER Experiment Name: Zm_50ppm_KNO3_L-to-H_P Parameter: Timepoint (hr) Value: 8
  misc_feature: MA Experiment 20001606 PARAMETER Experiment Name: Zm_50ppm_KNO3_L-to-H_P Parameter: Tissue Value: Shoots
  misc_feature: MA Experiment 20001606 PARAMETER Experiment Name: Zm_50ppm_KNO3_L-to-H_P Parameter: Treatment Value: 50ppm KNO3 vs. 50ppm KCl
atcgccgcaactgcccgtctgctcctgcttttcatccagtcgcaaaacaaagagaagagatctccgcgtccgcaaccgcatcgcttccctcccggcagaagaagaagattcggttgggttgtttgtctcttgcaaaccgcaatggctgctgctgccactgctactccggccgtggcgccggaggccggcgaccggaaggcggtggcaccgccggtcgacgcggtggatctggagctggagctggaggagaagcacgtgctggcggtggacgacagctccgtggaccgcgcggtgatcgccaagatcctacgcagctccaaatacagagtgacgaccgtggactcggcgacgcgcgcgctggagctgctggcgctggggctggtccccgacgtgaacatgatcatcacggactactggatgcccgggatgaccgggtacgagctgctgaagcacgtgaaggagtcgtcggcgctgcgggccatcccgggtggtgatcatgtcgtcggagaacgtgcccacccgcatcagccggtgcctggaggagggcgccgaggacttcctcctcaagcccgtccgccccgccgacgtctcccgcctctgcagccggatccggtgaccgcccgcgcaaggatggaggatctggttgcgcgctctgacttaattagaggagttgttaggatccaattttttgtgtgttcgttcgttcgttcgttcttttctttctttcttcttggacatagatctgctgccgccgctgctgccgtcgactgaaacaagaagctaacttagttttagggtccaggttgttgttgttgttgttaggaaggcgagtcgttgggggcagcagatctatgtcc

SEQ ID NO: 3377 - protein, 256 aa, Zea mays subsp. mays
  peptide (1)..(256): Ceres Seq. ID no. 12412973
  misc_feature (84)..(162): Pfam Name: Response regulator receiver domain Pfam Description: Response regulator receiver domain
  misc_feature (85)..(162): Homolog of NCBI NO: 11358906 NR Description: two-component response regulator homolog
  misc_feature (85)..(162): Homolog of NCBI NO: 11358763 NR Description: response regulator 5 [imported] - Arabidopsis
  misc_feature (79)..(162): Homolog of NCBI NO: 15218957 NR Description: response regulator 3
  misc_feature (85)..(162): Homolog of NCBI NO: 15242000 NR Description: response regulator 6 (ARR6)
  misc_feature (85)..(162): Homolog of NCBI NO: 12060386 NR Description: response regulator 5 [Zea mays]
  misc_feature (79)..(162): Homolog of NCBI NO: 15218550 NR Description: putative response regulator 3
  misc_feature (73)..(162): Homolog of NCBI NO: 34901288 NR Description: similar to response regulator
  misc_feature (85)..(162): Homolog of NCBI NO: 11041692 NR Description: response regulator [Zea mays]
  misc_feature (44)..(162): Homolog of NCBI NO: 11358973 NR Description: response regulator Cip1 [imported] - maize
  misc_feature (48)..(162): Homolog of NCBI NO: 11358972 NR Description: repsonse regulator ZmRR2 [imported] - maize
IAATARLLLLFIQSQNKEKRSPRPQPHRFPPGRRRRFGWVVCLLQTAMAAAATATPAVAPEAGDRKAVAPPVDAVDLELELEEKHVLAVDDSSVDRAVIAKILRSSKYRVTTVDSATRALELLALGLVPDVNMIITDYWMPGMTGYELLKHVKESSALRAIPGGDHVVGERAHPHQPVPGGGRRGLPPQARPPRRRLPPLQPDPVTARARMEDLVARSDLIRGVVRIQFFVCSFVRSFFSFFLLGHRSAAAAAAVD

SEQ ID NO: 3378 - protein, 209 aa, Zea mays subsp. mays
  peptide (1)..(209): Ceres Seq. ID no. 12412974
  misc_feature (37)..(115): Pfam Name: Response regulator receiver domain Pfam Description: Response regulator receiver domain
  misc_feature (38)..(115): Homolog of NCBI NO: 15228338 NR Description: response reactor 2 (ATRR2)
  misc_feature (38)..(115): Homolog of NCBI NO: 11358763 NR Description: response regulator 5 [imported] - Arabidopsis
  misc_feature (32)..(115): Homolog of NCBI NO: 15218957 NR Description: response regulator 3
  misc_feature (38)..(115): Homolog of NCBI NO: 15242000 NR Description: response regulator 6 (ARR6)
  misc_feature (38)..(115): Homolog of NCBI NO: 12060386 NR Description: response regulator 5 [Zea mays]
  misc_feature (32)..(115): Homolog of NCBI NO: 15218550 NR Description: putative response regulator 3
  misc_feature (26)..(115): Homolog of NCBI NO: 34901288 NR Description: similar to response regulator
  misc_feature (38)..(115): Homolog of NCBI NO: 11041692 NR Description: response regulator [Zea mays]
  misc_feature (1)..(115): Homolog of NCBI NO: 11358973 NR Description: response regulator Cip1 [imported] - maize
  misc_feature (1)..(115): Homolog of NCBI NO: 11358972 NR Description: repsonse regulator ZmRR2 [imported] - maize
MAAAATATPAVAPEAGDRKAVAPPVDAVDLELELEEKHVLAVDDSSVDRAVIAKILRSSKYRVTTVDSATRALELLALGLVPDVNMIITDYWMPGMTGYELLKHVKESSALRAIPGGDHVVGERAHPHQPVPGGGRRGLPPQARPPRRRLPPLQPDPVTARARMEDLVARSDLIRGVVRIQFFVCSFVRSFFSFFLLGHRSAAAAAAVD

SEQ ID NO: 3379 - protein, 163 aa, Zea mays subsp. mays
  peptide (1)..(163): Ceres Seq. ID no. 12412975
RRNCPSAPAFHPVAKQREEISASATASLPSRQKKKIRLGCLSLANRNGCCCHCYSGRGAGGRRPEGGGTAGRRGGSGAGAGGEARAGGGRQLRGPRGDRQDPTQLQIQSDDRGLGDARAGAAGAGAGPRREHDHHGLLDARDDRVRAAEAREGVVGAAGHPGW

SEQ ID NO: 3380 - DNA, 978 bp, Zea mays subsp. mays
  misc_feature (1)..(978): Ceres Seq. ID no. 12356047
  misc_feature: MA Experiment ID: 108556 Result: Down-regulated in Transcription
  misc_feature: MA Experiment 108556 PARAMETER Experiment Name: Zm_Drought_P Parameter: Age (day) Value: 9
  misc_feature: MA Experiment 108556 PARAMETER Experiment Name: Zm_Drought_P Parameter: Organism Value: Zea mays
  misc_feature: MA Experiment 108556 PARAMETER Experiment Name: Zm_Drought_P Parameter: Plant Line Value: 35A19
  misc_feature: MA Experiment 108556 PARAMETER Experiment Name: Zm_Drought_P Parameter: Timepoint (hr) Value: 24
  misc_feature: MA Experiment 108556 PARAMETER Experiment Name: Zm_Drought_P Parameter: Tissue Value: Aerial
  misc_feature: MA Experiment 108556 PARAMETER Experiment Name: Zm_Drought_P Parameter: Treatment Value: Drought vs. No Drought
gctcgatctgttttcgttttgtaagattcattcacgtctgcgctgtggctctattcagatttggtcgagatttctgggtttgaccagctgatggctgatgtcgacgagtaccgttgcttcattgggaacctgtcctggtcaacgactgatgaaagcctcaaggatgcgttcagcaaattcggcaacctcactgaggcaaaggtggttcttgacaaattttcaggacgttctcgtggtttcggctttgtaacttttgatgagaagcaagccatggaggatgctattgagggaatgaatggactggacttggacgggaggaacatcactgttgataaagctcagccacaaggacctggtagagaccgtaatggtgaccgtgattatgaccgcgagcgtggatctcgttatgaacgtggtcgtgactatggtggtgggcgtgcaccgcgaggtggtggtggtggtggtggtggtggtggtgactgcttcaagtgtgggaaacctggtcattttgctagagagtgcccatctggggatggtgggagaggggacagatatggtgggagagatgacaggtatggtggcggtggcggtggcggtcgttatggttctgaccgtggtggtgaccgatactctggccgtagccgagatggcggcagctatgggggtggcgatcgctacagccgtgaccgatcaggtccttactgatggccttagttcttgattgagaagtatgtgccatccaggtatgaaagtctatctactattataaggcttgttattgtgtctggaactttgttatcctgtagttggagtcgacatgtaccgtgagaaatcagctgctttgttatagaccgtattactgaccggtttattatcgtttcctgcttgccaggcatatgacttggtcatagtgcttggcgcttggatcctgcatgtttgcttgatgtgctatttggctattaaaagatggattttgtc

SEQ ID NO: 3381 - protein, 204 aa, Zea mays subsp. mays
  peptide (1)..(204): Ceres Seq. ID no. 12356048
  misc_feature (9)..(80): Pfam Name: RNA recognition motif. (a.k.a. RRM, RBD, or RNP domain) Pfam Description: RNA recognition motif. (a.k.a. RRM, RBD, or RNP
  misc_feature (1)..(169): Homolog of NCBI NO: 1346181 NR Description: Glycine-rich RNA-binding protein GRP2A
  misc_feature (5)..(183): Homolog of NCBI NO: 21388660 NR Description: glycine-rich RNA-binding protein [Physcomitrella
  misc_feature (1)..(171): Homolog of NCBI NO: 544426 NR Description: Glycine-rich RNA-binding protein
  misc_feature (1)..(203): Homolog of NCBI NO: 33146923 NR Description: glycine-rich RNA-binding protein-like
  misc_feature (1)..(194): Homolog of NCBI NO: 1076672 NR Description: probable glycine rich RNA binding protein -
  misc_feature (1)..(146): Homolog of NCBI NO: 15982739 NR Description: AT3g26420/F20C19_14 [Arabidopsis thaliana]
  misc_feature (1)..(202): Homolog of NCBI NO: 15231557 NR Description: glycine-rich RNA-binding protein
  misc_feature (1)..(183): Homolog of NCBI NO: 12659074 NR Description: RNA-binding protein [Triticum aestivum]
  misc_feature (1)..(204): Homolog of NCBI NO: 2129944 NR Description: RNA-binding protein RZ-1 - wood tobacco
  misc_feature (1)..(204): Homolog of NCBI NO: 40714682 NR Description: putative RNA binding protein
MADVDEYRCFIGNLSWSTTDESLKDAFSKFGNLTEAKVVLDKFSGRSRGFGFVTFDEKQAMEDAIEGMNGLDLDGRNITVDKAQPQGPGRDRNGDRDYDRERGSRYERGRDYGGGRAPRGGGGGGGGGGDCFKCGKPGHFARECPSGDGGRGDRYGGRDDRYGGGGGGGRYGSDRGGDRYSGRSRDGGSYGGGDRYSRDRSGPY

SEQ ID NO: 3382 - protein, 144 aa, Zea mays subsp. mays
  peptide (1)..(144): Ceres Seq. ID no. 12356049
  misc_feature (1)..(109): Homolog of NCBI NO: 1346181 NR Description: Glycine-rich RNA-binding protein GRP2A
  misc_feature (1)..(123): Homolog of NCBI NO: 21388660 NR Description: glycine-rich RNA-binding protein [Physcomitrella
  misc_feature (1)..(111): Homolog of NCBI NO: 544426 NR Description: Glycine-rich RNA-binding protein
  misc_feature (1)..(143): Homolog of NCBI NO: 33146923 NR Description: glycine-rich RNA-binding protein-like
  misc_feature (1)..(134): Homolog of NCBI NO: 1076672 NR Description: probable glycine rich RNA binding protein -
  misc_feature (1)..(86): Homolog of NCBI NO: 15982739 NR Description: AT3g26420/F20C19_14 [Arabidopsis thaliana]
  misc_feature (1)..(142): Homolog of NCBI NO: 15231557 NR Description: glycine-rich RNA-binding protein
  misc_feature (1)..(123): Homolog of NCBI NO: 12659074 NR Description: RNA-binding protein [Triticum aestivum]
  misc_feature (1)..(144): Homolog of NCBI NO: 2129944 NR Description: RNA-binding protein RZ-1 - wood tobacco
  misc_feature (1)..(144): Homolog of NCBI NO: 40714682 NR Description: putative RNA binding protein
MEDAIEGMNGLDLDGRNITVDKAQPQGPGRDRNGDRDYDRERGSRYERGRDYGGGRAPRGGGGGGGGGGDCFKCGKPGHFARECPSGDGGRGDRYGGRDDRYGGGGGGGRYGSDRGGDRYSGRSRDGGSYGGGDRYSRDRSGPY

SEQ ID NO: 3383 - protein, 141 aa, Zea mays subsp. mays
  peptide (1)..(141): Ceres Seq. ID no. 12356050
MDWTWTGGTSLLIKLSHKDLVETVMVTVIMTASVDLVMNVVVTMVVGVHREVVVVVVVVVVTASSVGNLVILLESAHLGMVGEGTDMVGEMTGMVAVAVAVVMVLTVVVTDTLAVAEMAAAMGVAIATAVTDQVLTDGLSS

SEQ ID NO: 3384 - DNA, 1930 bp, Zea mays subsp. mays
  misc_feature (1)..(1930): Ceres Seq. ID no. 12367909
  misc_feature: MA Experiment ID: 108529 Result: Down-regulated in Transcription
  misc_feature: MA Experiment 108529 PARAMETER Experiment Name: Zm_Imbibed_Seeds_P Parameter: Age (day) Value: 5 vs. 2
  misc_feature: MA Experiment 108529 PARAMETER Experiment Name: Zm_Imbibed_Seeds_P Parameter: Organism Value: Zea mays
  misc_feature: MA Experiment 108529 PARAMETER Experiment Name: Zm_Imbibed_Seeds_P Parameter: Plant Line Value: 35A19
  misc_feature: MA Experiment 108529 PARAMETER Experiment Name: Zm_Imbibed_Seeds_P Parameter: Tissue Value: Roots vs. Embryo
  misc_feature: MA Experiment ID: 20000479 Result: Down-regulated in Transcription
  misc_feature: MA Experiment 20000479 PARAMETER Experiment Name: Zm_Drought_P Parameter: Age (day) Value: 10
  misc_feature: MA Experiment 20000479 PARAMETER Experiment Name: Zm_Drought_P Parameter: Organism Value: Zea mays
  misc_feature: MA Experiment 20000479 PARAMETER Experiment Name: Zm_Drought_P Parameter: Plant Line Value: 35A19
  misc_feature: MA Experiment 20000479 PARAMETER Experiment Name: Zm_Drought_P Parameter: Timepoint (hr) Value: 48
  misc_feature: MA Experiment 20000479 PARAMETER Experiment Name: Zm_Drought_P Parameter: Tissue Value: Aerial
  misc_feature: MA Experiment 20000479 PARAMETER Experiment Name: Zm_Drought_P Parameter: Treatment Value: Drought vs. No Drought
  misc_feature: MA Experiment ID: 20000480 Result: Down-regulated in Transcription
  misc_feature: MA Experiment 20000480 PARAMETER Experiment Name: Zm_Drought_P Parameter: Age (day) Value: 11
  misc_feature: MA Experiment 20000480 PARAMETER Experiment Name: Zm_Drought_P Parameter: Organism Value: Zea mays
  misc_feature: MA Experiment 20000480 PARAMETER Experiment Name: Zm_Drought_P Parameter: Plant Line Value: 35A19
  misc_feature: MA Experiment 20000480 PARAMETER Experiment Name: Zm_Drought_P Parameter: Timepoint (hr) Value: 72
  misc_feature: MA Experiment 20000480 PARAMETER Experiment Name: Zm_Drought_P Parameter: Tissue Value: Aerial
  misc_feature: MA Experiment 20000480 PARAMETER Experiment Name: Zm_Drought_P Parameter: Treatment Value: Drought vs. No Drought
  misc_feature: MA Experiment ID: 20000626 Result: Down-regulated in Transcription
  misc_feature: MA Experiment 20000626 PARAMETER Experiment Name: Zm_Herbicide-Treatments_P Parameter: Timepoint (hr) Value: 12
  misc_feature: MA Experiment 20000626 PARAMETER Experiment Name: Zm_Herbicide-Treatments_P Parameter: Tissue Value: Aerial
  misc_feature: MA Experiment 20000626 PARAMETER Experiment Name: Zm_Herbicide-Treatments_P Parameter: Treatment Value: Roundup vs. No Treatment
aggcaggcagcgggctggcggaaaagcctagtgcgcgctcgtgctcgtgctccccgaccagactagaccagcttgctagcgccagcaaggcgagcggcgatgctcgcacgatctactacagctgccgccgcggccgccgccgggatctgcctgtgattaaggatgtcggcgtcgcggagcgggaggcggcggaccggtagcgtggcgctcggagaccttctgcagcgggaggcgtcggcggagcgggccgcgttgggatgcggcgagcggccctcggtcgcggcggggcaggcctgccgggcgaagaagggcgaggacttcgcgctgctcaagcccgcctgcgagcgacgccccggcgcgccgtccacctccttctccgccttcgccctgttcgatgggcataacgggagcgccgccgcggtgtacgccaaggagcacctcctcggcaacgtgctcagctgcgtcccgaccgatctggcctgggacgactggctcgccgcgctgccgagggccctcgtcgcggggttcgtcaagaccgacaaggatttccagactaaagctcattcctcggggacaaccgtgacgcttgccataattgatggctccgttgtaactgttgcatctgttggtgattcacgttgtgtccttgaagctgagggatccatctactatttgtcggctgaccatcgcttcgacgctaatgaagaggaggtgggacgtgtaaccgaatgtggaggtgaagttggaaggctaaatgtcgtcggtggtgctgagattggtccccttagatgttggccaggtggtttatgcctctcaagatcgattggtgatcaggatgtaggtgaatttattattccggttccttatgtgaagcaaattaagctgtctaatgctggaggccgtcttattatttcaagcgacggtgtttgggatgctttgactgcagaaatggcttttaaatgtgcacgagggcttcctcctgaggctgcagctgagcaaattgttaaagaagcagttgaagcaaaaggattgagagatgatacaacttgcattgtcattgacataatatcaccagagaaaccaaaacgcactatacaatctcaaagatcgccaagaaaaggccttgtgcttctaaaaaatttctttttaaggaaaacagcatctgactcgttgtctctccctgataaggataattatcctgagccagatttagaggaggtctttgaggacggatgcccatccctttcaaggaggcttaattctgagtatcctgtccgagacatgttcaaactttttgcatgtgcaatttgtcaaattgacttggaatctggccaaggcatatccatacacgagggtttgtcaaggccaggaaagctgcgtccctgggatggccctttcctttgtcacagctgccaggaaaagaaagaggcgatggaggggaagcgccattcacgagattcctcgtcgagaaatagcgggtcaagtgaatcgtgactgaagccgagaatcatcttgaggcaaacgcctagcggtgtgacgagctaattattgttgctgctgtcgttcttgcagcactttctcatggattaccattgaattgagacatgttggaagtcgccatgcctatatatatgttggagctgtacggtactggaccgtagagcaaatccaatcgcctctagataccacaccagcgtcttcggcagggcttgtggcagcagctcacgcagggaatgatgacaagaggttgttattattagtgaagaatgtcgacagtggccaatagtcatgtaaattattcgtcgtgtagaggtgcaagtgacaaatagccacggttttgtaattctcaactaggattaggtattgagacctgtaattcgtctgggcagacctcaaactgaaggtcaacaacgtagcgtggccctattgt

SEQ ID NO: 3385 - protein, 443 aa, Zea mays subsp. mays
  peptide (1)..(443): Ceres Seq. ID no. 12367910
  misc_feature (42)..(294): Pfam Name: Protein phosphatase 2C Pfam Description: Protein phosphatase 2C
  misc_feature (1)..(363): Homolog of NCBI NO: 16930415 NR Description: At1g09160/T12M4_13 [Arabidopsis thaliana]
  misc_feature (1)..(364): Homolog of NCBI NO: 34898168 NR Description: protein phosphatase 2C-like
  misc_feature (36)..(430): Homolog of NCBI NO: 34914644 NR Description: OSJNBa0054L14.21 [Oryza sativa (japonica
  misc_feature (1)..(433): Homolog of NCBI NO: 15217454 NR Description: putative protein phosphatase 2C
  misc_feature (1)..(436): Homolog of NCBI NO: 34394411 NR Description: protein phosphatase 2C-like
  misc_feature (3)..(430): Homolog of NCBI NO: 15221404 NR Description: putative protein phosphatase
  misc_feature (12)..(429): Homolog of NCBI NO: 14029015 NR Description: Unknown protein [Oryza sativa]
  misc_feature (4)..(438): Homolog of NCBI NO: 15292869 NR Description: unknown protein [Arabidopsis thaliana]
  misc_feature (4)..(438): Homolog of NCBI NO: 18401703 NR Description: expressed protein; protein id: At1g47380.1
  misc_feature (1)..(442): Homolog of NCBI NO: 38344839 NR Description: OSJNBa0064H22.20 [Oryza sativa (japonica
MSASRSGRRRTGSVALGDLLQREASAERAALGCGERPSVAAGQACRAKKGEDFALLKPACERRPGAPSTSFSAFALFDGHNGSAAAVYAKEHLLGNVLSCVPTDLAWDDWLAALPRALVAGFVKTDKDFQTKAHSSGTTVTLAIIDGSVVTVASVGDSRCVLEAEGSIYYLSADHRFDANEEEVGRVTECGGEVGRLNVVGGAEIGPLRCWPGGLCLSRSIGDQDVGEFIIPVPYVKQIKLSNAGGRLIISSDGVWDALTAEMAFKCARGLPPEAAAEQIVKEAVEAKGLRDDTTCIVIDIISPEKPKRTIQSQRSPRKGLVLLKNFFLRKTASDSLSLPDKDNYPEPDLEEVFEDGCPSLSRRLNSEYPVRDMFKLFACAICQIDLESGQGISIHEGLSRPGKLRPWDGPFLCHSCQEKKEAMEGKRHSRDSSSRNSGSSES

SEQ ID NO: 3386 - DNA, 1961 bp, Zea mays subsp. mays
  misc_feature (1)..(1961): Ceres Seq. ID no. 12410265
  misc_feature: MA Experiment ID: 108535 Result: Down-regulated in Transcription
  misc_feature: MA Experiment 108535 PARAMETER Experiment Name: Zm_Meristem_P Parameter: Age (day) Value: 8
  misc_feature: MA Experiment 108535 PARAMETER Experiment Name: Zm_Meristem_P Parameter: Organism Value: Zea mays
  misc_feature: MA Experiment 108535 PARAMETER Experiment Name: Zm_Meristem_P Parameter: Plant Line Value: 35A19
  misc_feature: MA Experiment 108535 PARAMETER Experiment Name: Zm_Meristem_P Parameter: Tissue Value: Root Meristem vs. Above Root Meristem
  misc_feature: MA Experiment ID: 108556 Result: Up-regulated in Transcription
  misc_feature: MA Experiment 108556 PARAMETER Experiment Name: Zm_Drought_P Parameter: Age (day) Value: 9
  misc_feature: MA Experiment 108556 PARAMETER Experiment Name: Zm_Drought_P Parameter: Organism Value: Zea mays
  misc_feature: MA Experiment 108556 PARAMETER Experiment Name: Zm_Drought_P Parameter: Plant Line Value: 35A19
  misc_feature: MA Experiment 108556 PARAMETER Experiment Name: Zm_Drought_P Parameter: Timepoint (hr) Value: 24
  misc_feature: MA Experiment 108556 PARAMETER Experiment Name: Zm_Drought_P Parameter: Tissue Value: Aerial
  misc_feature: MA Experiment 108556 PARAMETER Experiment Name: Zm_Drought_P Parameter: Treatment Value: Drought vs. No Drought
  misc_feature: MA Experiment ID: 20000479 Result: Up-regulated in Transcription
  misc_feature: MA Experiment 20000479 PARAMETER Experiment Name: Zm_Drought_P Parameter: Age (day) Value: 10
  misc_feature: MA Experiment 20000479 PARAMETER Experiment Name: Zm_Drought_P Parameter: Organism Value: Zea mays
  misc_feature: MA Experiment 20000479 PARAMETER Experiment Name: Zm_Drought_P Parameter: Plant Line Value: 35A19
  misc_feature: MA Experiment 20000479 PARAMETER Experiment Name: Zm_Drought_P Parameter: Timepoint (hr) Value: 48
  misc_feature: MA Experiment 20000479 PARAMETER Experiment Name: Zm_Drought_P Parameter: Tissue Value: Aerial
  misc_feature: MA Experiment 20000479 PARAMETER Experiment Name: Zm_Drought_P Parameter: Treatment Value: Drought vs. No Drought
  misc_feature: MA Experiment ID: 20000480 Result: Up-regulated in Transcription
  misc_feature: MA Experiment 20000480 PARAMETER Experiment Name: Zm_Drought_P Parameter: Age (day) Value: 11
  misc_feature: MA Experiment 20000480 PARAMETER Experiment Name: Zm_Drought_P Parameter: Organism Value: Zea mays
  misc_feature: MA Experiment 20000480 PARAMETER Experiment Name: Zm_Drought_P Parameter: Plant Line Value: 35A19
  misc_feature: MA Experiment 20000480 PARAMETER Experiment Name: Zm_Drought_P Parameter: Timepoint (hr) Value: 72
  misc_feature: MA Experiment 20000480 PARAMETER Experiment Name: Zm_Drought_P Parameter: Tissue Value: Aerial
  misc_feature: MA Experiment 20000480 PARAMETER Experiment Name: Zm_Drought_P Parameter: Treatment Value: Drought vs. No Drought
atatatttatattagaaaagaaaactctgttcaaccacccgccgagttcagcagcactctcctccgccctcttccaggtccagcagagattgggggcgcgtgggcatcggagattgcctcgggagcgcgtttcctggtcaactaaggccggcatgaagggctgctcagagcgcttgctgtttctgctgctgctgctggcatcgtcgtcgttactgtccgctgtgattgccgcgcagcagacttgccccgccgacctcgacagcaaatgcgatggtggcgcgtctgatgatgattgggagggggagttcttccccggcgtcccgaaaatcaagtatgagggtccaacaagcaagaaccctcttgcttataagtggtataacaaggaggaagtgattctcggtaagaagatgaaggattggatgcgcttcagtgttgcgttctggcacacgttccgcggtactggcgctgatcctttcggtgctcctacaaagacttggccttgggaggatggcacaaattcgttggccatggctaagagaagaatgagagctcactttgagttcatggagaagttgggagtcgacaaatggtgcttccatgacagggatattgccccggatgggaagacacttgaagaaacaaattctaacttggatgagatagtccagctggcaaagcagctgcagggtgagaccaatataaagccattgtggggtaccgcacagctctttatgcatccacgttacatgcatggtgctgctacgagcccagaggttaaagtatatgcttatgcggctgcacaagttaagaaagctttggaggtcactcactacctaggtggtgaaaactatgtgttctggggtggaagagagggttaccaaactcttctgaatactgatatgaagagagaacttgaccatctggctaactttcttcaagctgctgttgactacaagaagaagattggattcaacggaacactattgatagagcctaaaccacaggaaccaacaaaacaccagtatgactgggatgttgcgactacgtttgcttttctacagaagtacggtcttacaggagagttcaagattaatgttgagtgcaaccatgctactctatctggacacagctgccatcatgaattggagactgcacggattaatgggctgcttggaaatatcgatgcaaacactggtgatcctcaagttggttgggacacagatcagttcatgacagacattgcagaggctactttggttatgtcaagtgtagttaagaatggtggacttgcacctggtggtttcaactttgatgccaaattgcggagggaaagtactgatgttgaggacatgtttcttgtccatatctccggaatggacaccctggcacgtggcctccgcaacgttgccaagctgattgaggatggttccctagatgatcttgtccgcaagcggtaccagagctttgatagtgatatcggtgccttgatcgaggctgggaaaggagactttgagacgctagaaaagaaggttctagagtggggtgagcccactgttgcatccggcaagcaggaactggcggagattctgttccagtctgccctatagatggtgccatgtccataggtccaggaataagcaagggtgcgccctcctccgaacacgcactcgtcctcctcatcacggggatgttatggttccgtgcgatggactacctacaataagcatggaactgagataattaggatgtaatctgtcagaaaatttccagaattgttacctccttttgtttagagtggattagtggaatcaaactggagttagttaaagcttatcctgcattttggtgtggcgatcgtgtttggtccttccttgaatgctgtttcatagcgtggcaacgatgttgctgcttagtcctacaactggtggtagtaatggatcatagttcgaatgtttcttccc

SEQ ID NO: 3387 - protein, 534 aa, Zea mays subsp. mays
  peptide (1)..(534): Ceres Seq. ID no. 12410266
  misc_feature (128)..(534): Pfam Name: Xylose isomerase Pfam Description: Xylose isomerase
  misc_feature (101)..(534): Homolog of NCBI NO: 2581797 NR Description: xylose isomerase; XylA [Thermoanaerobacter
  misc_feature (101)..(534): Homolog of NCBI NO: 139827 NR Description: Xylose isomerase
  misc_feature (101)..(532): Homolog of NCBI NO: 3319057 NR Description: Chain A, Xylose Isomerase From Thermotoga
  misc_feature (101)..(532): Homolog of NCBI NO: 1175034 NR Description: Xylose isomerase
  misc_feature (56)..(523): Homolog of NCBI NO: 17433690 NR Description: Xylose isomerase
  misc_feature (56)..(534): Homolog of NCBI NO: 21537178 NR Description: xylose isomerase [Arabidopsis thaliana]
  misc_feature (56)..(534): Homolog of NCBI NO: 30696904 NR Description: expressed protein [Arabidopsis thaliana]
  misc_feature (61)..(534): Homolog of NCBI NO: 2130051 NR Description: xylose isomerase (EC 5.3.1.5) - barley
  misc_feature (61)..(534): Homolog of NCBI NO: 6175480 NR Description: Xylose isomerase
  misc_feature (61)..(534): Homolog of NCBI NO: 34899308 NR Description: putative xylose isomerase [Oryza sativa (japonica
IFILEKKTLFNHPPSSAALSSALFQVQQRLGARGHRRLPRERVSWSTKAGMKGCSERLLFLLLLLASSSLLSAVIAAQQTCPADLDSKCDGGASDDDWEGEFFPGVPKIKYEGPTSKNPLAYKWYNKEEVILGKKMKDWMRFSVAFWHTFRGTGADPFGAPTKTWPWEDGTNSLAMAKRRMRAHFEFMEKLGVDKWCFHDRDIAPDGKTLEETNSNLDEIVQLAKQLQGETNIKPLWGTAQLFMHPRYMHGAATSPEVKVYAYAAAQVKKALEVTHYLGGENYVFWGGREGYQTLLNTDMKRELDHLANFLQAAVDYKKKIGFNGTLLIEPKPQEPTKHQYDWDVATTFAFLQKYGLTGEFKINVECNHATLSGHSCHHELETARINGLLGNIDANTGDPQVGWDTDQFMTDIAEATLVMSSVVKNGGLAPGGFNFDAKLRRESTDVEDMFLVHISGMDTLARGLRNVAKLIEDGSLDDLVRKRYQSFDSDIGALIEAGKGDFETLEKKVLEWGEPTVASGKQELAEILFQSAL

SEQ ID NO: 3388 - protein, 484 aa, Zea mays subsp. mays
  peptide (1)..(484): Ceres Seq. ID no. 12410267
  misc_feature (78)..(484): Pfam Name: Xylose isomerase Pfam Description: Xylose isomerase
  misc_feature (51)..(484): Homolog of NCBI NO: 2581797 NR Description: xylose isomerase; XylA [Thermoanaerobacter
  misc_feature (51)..(484): Homolog of NCBI NO: 139827 NR Description: Xylose isomerase
  misc_feature (51)..(482): Homolog of NCBI NO: 3319057 NR Description: Chain A, Xylose Isomerase From Thermotoga
  misc_feature (51)..(482): Homolog of NCBI NO: 1175034 NR Description: Xylose isomerase
  misc_feature (6)..(473): Homolog of NCBI NO: 17433690 NR Description: Xylose isomerase
  misc_feature (6)..(484): Homolog of NCBI NO: 21537178 NR Description: xylose isomerase [Arabidopsis thaliana]
  misc_feature (6)..(484): Homolog of NCBI NO: 30696904 NR Description: expressed protein [Arabidopsis thaliana]
  misc_feature (11)..(484): Homolog of NCBI NO: 2130051 NR Description: xylose isomerase (EC 5.3.1.5) - barley
  misc_feature (11)..(484): Homolog of NCBI NO: 6175480 NR Description: Xylose isomerase
  misc_feature (11)..(484): Homolog of NCBI NO: 34899308 NR Description: putative xylose isomerase [Oryza sativa (japonica
MKGCSERLLFLLLLLASSSLLSAVIAAQQTCPADLDSKCDGGASDDDWEGEFFPGVPKIKYEGPTSKNPLAYKWYNKEEVILGKKMKDWMRFSVAFWHTFRGTGADPFGAPTKTWPWEDGTNSLAMAKRRMRAHFEFMEKLGVDKWCFHDRDIAPDGKTLEETNSNLDEIVQLAKQLQGETNIKPLWGTAQLFMHPRYMHGAATSPEVKVYAYAAAQVKKALEVTHYLGGENYVFWGGREGYQTLLNTDMKRELDHLANFLQAAVDYKKKIGFNGTLLIEPKPQEPTKHQYDWDVATTFAFLQKYGLTGEFKINVECNHATLSGHSCHHELETARINGLLGNIDANTGDPQVGWDTDQFMTDIAEATLVMSSVVKNGGLAPGGFNFDAKLRRESTDVEDMFLVHISGMDTLARGLRNVAKLIEDGSLDDLVRKRYQSFDSDIGALIEAGKGDFETLEKKVLEWGEPTVASGKQELAEILFQSAL

SEQ ID NO: 3389 - protein, 399 aa, Zea mays subsp. mays
  peptide (1)..(399): Ceres Seq. ID no. 12410268
  misc_feature (1)..(399): Pfam Name: Xylose isomerase Pfam Description: Xylose isomerase
  misc_feature (1)..(397): Homolog of NCBI NO: 1175034 NR Description: Xylose isomerase
  misc_feature (1)..(388): Homolog of NCBI NO: 17433690 NR Description: Xylose isomerase
  misc_feature (1)..(399): Homolog of NCBI NO: 21537178 NR Description: xylose isomerase [Arabidopsis thaliana]
  misc_feature (1)..(399): Homolog of NCBI NO: 30696904 NR Description: expressed protein [Arabidopsis thaliana]
  misc_feature (1)..(399): Homolog of NCBI NO: 139827 NR Description: Xylose isomerase
  misc_feature (1)..(397): Homolog of NCBI NO: 3319057 NR Description: Chain A, Xylose Isomerase From Thermotoga
  misc_feature (1)..(399): Homolog of NCBI NO: 2581797 NR Description: xylose isomerase; XylA [Thermoanaerobacter
  misc_feature (1)..(399): Homolog of NCBI NO: 2130051 NR Description: xylose isomerase (EC 5.3.1.5) - barley
  misc_feature (1)..(399): Homolog of NCBI NO: 6175480 NR Description: Xylose isomerase
  misc_feature (1)..(399): Homolog of NCBI NO: 34899308 NR Description: putative xylose isomerase [Oryza sativa (japonica
MKDWMRFSVAFWHTFRGTGADPFGAPTKTWPWEDGTNSLAMAKRRMRAHFEFMEKLGVDKWCFHDRDIAPDGKTLEETNSNLDEIVQLAKQLQGETNIKPLWGTAQLFMHPRYMHGAATSPEVKVYAYAAAQVKKALEVTHYLGGENYVFWGGREGYQTLLNTDMKRELDHLANFLQAAVDYKKKIGFNGTLLIEPKPQEPTKHQYDWDVATTFAFLQKYGLTGEFKINVECNHATLSGHSCHHELETARINGLLGNIDANTGDPQVGWDTDQFMTDIAEATLVMSSVVKNGGLAPGGFNFDAKLRRESTDVEDMFLVHISGMDTLARGLRNVAKLIEDGSLDDLVRKRYQSFDSDIGALIEAGKGDFETLEKKVLEWGEPTVASGKQELAEILFQSAL

SEQ ID NO: 3390 - DNA, 1465 bp, Zea mays subsp. mays
  misc_feature (1)..(1465): Ceres Seq. ID no. 12410261
  misc_feature: MA Experiment ID: 108522 Result: Down-regulated in Transcription
  misc_feature: MA Experiment 108522 PARAMETER Experiment Name: Zm_42deg_Heat_P Parameter: Age (day) Value: 8
  misc_feature: MA Experiment 108522 PARAMETER Experiment Name: Zm_42deg_Heat_P Parameter: Organism Value: Zea mays
  misc_feature: MA Experiment 108522 PARAMETER Experiment Name: Zm_42deg_Heat_P Parameter: Plant Line Value: 35A19
  misc_feature: MA Experiment 108522 PARAMETER Experiment Name: Zm_42deg_Heat_P Parameter: Temperature (deg C) Value: 42 vs. 22
  misc_feature: MA Experiment 108522 PARAMETER Experiment Name: Zm_42deg_Heat_P Parameter: Timepoint (hr) Value: 1
  misc_feature: MA Experiment 108522 PARAMETER Experiment Name: Zm_42deg_Heat_P Parameter: Tissue Value: Aerial
  misc_feature: MA Experiment ID: 108527 Result: Down-regulated in Transcription
  misc_feature: MA Experiment 108527 PARAMETER Experiment Name: Zm_5mM_NO_P Parameter: Age (day) Value: 8
  misc_feature: MA Experiment 108527 PARAMETER Experiment Name: Zm_5mM_NO_P Parameter: Organism Value: Zea mays
  misc_feature: MA Experiment 108527 PARAMETER Experiment Name: Zm_5mM_NO_P Parameter: Plant Line Value: 35A19
  misc_feature: MA Experiment 108527 PARAMETER Experiment Name: Zm_5mM_NO_P Parameter: Timepoint (hr) Value: 6
  misc_feature: MA Experiment 108527 PARAMETER Experiment Name: Zm_5mM_NO_P Parameter: Tissue Value: Aerial
  misc_feature: MA Experiment 108527 PARAMETER Experiment Name: Zm_5mM_NO_P Parameter: Treatment Value: 5mM NO vs. No Treatment
  misc_feature: MA Experiment ID: 108535 Result: Down-regulated in Transcription
  misc_feature: MA Experiment 108535 PARAMETER Experiment Name: Zm_Meristem_P Parameter: Age (day) Value: 8
  misc_feature: MA Experiment 108535 PARAMETER Experiment Name: Zm_Meristem_P Parameter: Organism Value: Zea mays
  misc_feature: MA Experiment 108535 PARAMETER Experiment Name: Zm_Meristem_P Parameter: Plant Line Value: 35A19
  misc_feature: MA Experiment 108535 PARAMETER Experiment Name: Zm_Meristem_P Parameter: Tissue Value: Root Meristem vs. Above Root Meristem
acggcagagccaccaccagcagcagccccagaaatcgagcaaacacaagctgctccatggcctcaccaacccgaacaccatcgcctccgccggcggtcgagcccatcgcgccttctctctcttcagaacatccgcctgtcaacccctcctgtgacggatccttctcgccggagaacccagcgccagctccacctcctccccctgctactccgcatcctcatactcccggcgatagctctccttcctcaattccgcatccctcggcgccacagcctcttccatctccgcctcctcatactcccgacgatagctctccttcctcaactccgcatccctcggcgccacagcccccaccatctccgcctccgccgagcgctgatgtttctcctcccctctcgcgacagggcgaaacgtcaccgcggcgcccattgccccctccctcacccgctccagtatccccgcctactccagcgccggcgtcctcggaagccaagtcggagcaggaggaggcggaatcggctagcgaatcggggagcatgacgctagccatcgttctagccaaaactgaagatgcaacgccgcctaaggcctcctcggccgaggcgtccccaaccagatcgccgcagaaggaatcggccgtcaccatcgcgaagctcctctccgccgaagacctcgcggcgatggaggctaaggccacgccggacaaggttacacctccgagcgacgctgggtccctcgccgccgccgttactaccgttgggggagtcagtggcggcgtggggtccaagaggtggctcctaggcggcgtcccggagaaggtgcggcgcgctgagctgaggagggccgagctagggtttagggtttcggccgccgtgttctgcctggtcgcgctctccgtcatggcggccgataccacgacgggctggtccggcgactccttccgccgctacaacgagtacaggtacgtacttgctgcgagcgtcgtgacttttacctactgtggattccagttggtagccgaggtgcattacgttgtcacagggagacacatgattcgagccccattccgcagctacttcaatcttgccatggatcagatgttagcttacctcctgttgtcagcatcttcagcagcgctttctcgtaatggtgtttggatgtcacggtttggaggggatcagtttaccaaactgatcaatgtctcggcttccatggcattcctagctttcattgctctgggtcttaactcggtgatctctgcttactgcttcttcagcttggtttcatagagctaccgttgtgcattgcatgatgtgaataatactacctgtatgcttcttggagcactgaaccttgattcatgtgaaatttctacatgatttctgtgaaatccctaaactccaaagtgggcctatattgtagcagtacattgagtcaaggttggcctttaaaattttggaagcgg

SEQ ID NO: 3391 - protein, 428 aa, Zea mays subsp. mays
  peptide (1)..(428): Ceres Seq. ID no. 12410262
  misc_feature (278)..(411): Pfam Name: Domain of unknown function (DUF588) Pfam Description: Domain of unknown function (DUF588)
  misc_feature (22)..(158): Homolog of NCBI NO: 6523547 NR Description: hydroxyproline-rich glycoprotein DZ-HRGP
  misc_feature (3)..(219): Homolog of NCBI NO: 81286 NR Description: extensin - Volvox carteri (fragment)
  misc_feature (22)..(158): Homolog of NCBI NO: 6523547 NR Description: hydroxyproline-rich glycoprotein DZ-HRGP
  misc_feature (18)..(265): Homolog of NCBI NO: 20138131 NR Description: Vegetative cell wall protein gp1 precursor
  misc_feature (8)..(267): Homolog of NCBI NO: 20138131 NR Description: Vegetative cell wall protein gp1 precursor
  misc_feature (270)..(428): Homolog of NCBI NO: 15242642 NR Description: putative protein; protein id: At5g40300.1
  misc_feature (366)..(427): Homolog of NCBI NO: 34911616 NR Description: P0039G05.10 [Oryza sativa (japonica
  misc_feature (8)..(345): Homolog of NCBI NO: 34911616 NR Description: P0039G05.10 [Oryza sativa (japonica
  misc_feature (283)..(428): Homolog of NCBI NO: 15241975 NR Description: putative protein; protein id: At5g62820.1
  misc_feature (152)..(425): Homolog of NCBI NO: 27754604 NR Description: unknown protein [Arabidopsis thaliana]
GRATTSSSPRNRANTSCSMASPTRTPSPPPAVEPIAPSLSSEHPPVNPSCDGSFSPENPAPAPPPPPATPHPHTPGDSSPSSIPHPSAPQPLPSPPPHTPDDSSPSSTPHPSAPQPPPSPPPPSADVSPPLSRQGETSPRRPLPPPSPAPVSPPTPAPASSEAKSEQEEAESASESGSMTLAIVLAKTEDATPPKASSAEASPTRSPQKESAVTIAKLLSAEDLAAMEAKATPDKVTPPSDAGSLAAAVTTVGGVSGGVGSKRWLLGGVPEKVRRAELRRAELGFRVSAAVFCLVALSVMAADTTTGWSGDSFRRYNEYRYVLAASVVTFTYCGFQLVAEVHYVVTGRHMIRAPFRSYFNLAMDQMLAYLLLSASSAALSRNGVWMSRFGGDQFTKLINVSASMAFLAFIALGLNSVISAYCFFSLVS

SEQ ID NO: 3392 - protein, 410 aa, Zea mays subsp. mays
  peptide (1)..(410): Ceres Seq. ID no. 12410263
  misc_feature (260)..(393): Pfam Name: Domain of unknown function (DUF588) Pfam Description: Domain of unknown function (DUF588)
  misc_feature (4)..(140): Homolog of NCBI NO: 6523547 NR Description: hydroxyproline-rich glycoprotein DZ-HRGP
  misc_feature (1)..(201): Homolog of NCBI NO: 81286 NR Description: extensin - Volvox carteri (fragment)
  misc_feature (4)..(140): Homolog of NCBI NO: 6523547 NR Description: hydroxyproline-rich glycoprotein DZ-HRGP
  misc_feature (1)..(247): Homolog of NCBI NO: 20138131 NR Description: Vegetative cell wall protein gp1 precursor
  misc_feature (1)..(249): Homolog of NCBI NO: 20138131 NR Description: Vegetative cell wall protein gp1 precursor
  misc_feature (252)..(410): Homolog of NCBI NO: 15242642 NR Description: putative protein; protein id: At5g40300.1
  misc_feature (348)..(409): Homolog of NCBI NO: 34911616 NR Description: P0039G05.10 [Oryza sativa (japonica
  misc_feature (1)..(327): Homolog of NCBI NO: 34911616 NR Description: P0039G05.10 [Oryza sativa (japonica
  misc_feature (265)..(410): Homolog of NCBI NO: 15241975 NR Description: putative protein; protein id: At5g62820.1
  misc_feature (134)..(407): Homolog of NCBI NO: 27754604 NR Description: unknown protein [Arabidopsis thaliana]
MASPTRTPSPPPAVEPIAPSLSSEHPPVNPSCDGSFSPENPAPAPPPPPATPHPHTPGDSSPSSIPHPSAPQPLPSPPPHTPDDSSPSSTPHPSAPQPPPSPPPPSADVSPPLSRQGETSPRRPLPPPSPAPVSPPTPAPASSEAKSEQEEAESASESGSMTLAIVLAKTEDATPPKASSAEASPTRSPQKESAVTIAKLLSAEDLAAMEAKATPDKVTPPSDAGSLAAAVTTVGGVSGGVGSKRWLLGGVPEKVRRAELRRAELGFRVSAAVFCLVALSVMAADTTTGWSGDSFRRYNEYRYVLAASVVTFTYCGFQLVAEVHYVVTGRHMIRAPFRSYFNLAMDQMLAYLLLSASSAALSRNGVWMSRFGGDQFTKLINVSASMAFLAFIALGLNSVISAYCFFSLVS

SEQ ID NO: 3393 - protein, 250 aa, Zea mays subsp. mays
  peptide (1)..(250): Ceres Seq. ID no. 12410264
  misc_feature (100)..(233): Pfam Name: Domain of unknown function (DUF588) Pfam Description: Domain of unknown function (DUF588)
  misc_feature (1)..(83): Homolog of NCBI NO: 20138131 NR Description: Vegetative cell wall protein gp1 precursor
  misc_feature (1)..(70): Homolog of NCBI NO: 23017082 NR Description: hypothetical protein [Thermobifida fusca]
  misc_feature (1)..(41): Homolog of NCBI NO: 81286 NR Description: extensin - Volvox carteri (fragment)
  misc_feature (1)..(87): Homolog of NCBI NO: 20138131 NR Description: Vegetative cell wall protein gp1 precursor
  misc_feature (1)..(89): Homolog of NCBI NO: 20138131 NR Description: Vegetative cell wall protein gp1 precursor
  misc_feature (92)..(250): Homolog of NCBI NO: 15242642 NR Description: putative protein; protein id: At5g40300.1
  misc_feature (188)..(249): Homolog of NCBI NO: 34911616 NR Description: P0039G05.10 [Oryza sativa (japonica
  misc_feature (1)..(167): Homolog of NCBI NO: 34911616 NR Description: P0039G05.10 [Oryza sativa (japonica
  misc_feature (105)..(250): Homolog of NCBI NO: 15241975 NR Description: putative protein; protein id: At5g62820.1
  misc_feature (1)..(247): Homolog of NCBI NO: 27754604 NR Description: unknown protein [Arabidopsis thaliana]
MTLAIVLAKTEDATPPKASSAEASPTRSPQKESAVTIAKLLSAEDLAAMEAKATPDKVTPPSDAGSLAAAVTTVGGVSGGVGSKRWLLGGVPEKVRRAELRRAELGFRVSAAVFCLVALSVMAADTTTGWSGDSFRRYNEYRYVLAASVVTFTYCGFQLVAEVHYVVTGRHMIRAPFRSYFNLAMDQMLAYLLLSASSAALSRNGVWMSRFGGDQFTKLINVSASMAFLAFIALGLNSVISAYCFFSLVS

SEQ ID NO: 3394 - DNA, 1529 bp, Zea mays subsp. mays
  misc_feature (1)..(1529): Ceres Seq. ID no. 12407871
  misc_feature: MA Experiment ID: 108522 Result: Down-regulated in Transcription
  misc_feature: MA Experiment 108522 PARAMETER Experiment Name: Zm_42deg_Heat_P Parameter: Age (day) Value: 8
  misc_feature: MA Experiment 108522 PARAMETER Experiment Name: Zm_42deg_Heat_P Parameter: Organism Value: Zea mays
  misc_feature: MA Experiment 108522 PARAMETER Experiment Name: Zm_42deg_Heat_P Parameter: Plant Line Value: 35A19
  misc_feature: MA Experiment 108522 PARAMETER Experiment Name: Zm_42deg_Heat_P Parameter: Temperature (deg C) Value: 42 vs. 22
  misc_feature: MA Experiment 108522 PARAMETER Experiment Name: Zm_42deg_Heat_P Parameter: Timepoint (hr) Value: 1
  misc_feature: MA Experiment 108522 PARAMETER Experiment Name: Zm_42deg_Heat_P Parameter: Tissue Value: Aerial
  misc_feature: MA Experiment ID: 108526 Result: Down-regulated in Transcription
  misc_feature: MA Experiment 108526 PARAMETER Experiment Name: Zm_5mM_NO_P Parameter: Age (day) Value: 8
  misc_feature: MA Experiment 108526 PARAMETER Experiment Name: Zm_5mM_NO_P Parameter: Organism Value: Zea mays
  misc_feature: MA Experiment 108526 PARAMETER Experiment Name: Zm_5mM_NO_P Parameter: Plant Line Value: 35A19
  misc_feature: MA Experiment 108526 PARAMETER Experiment Name: Zm_5mM_NO_P Parameter: Timepoint (hr) Value: 1
  misc_feature: MA Experiment 108526 PARAMETER Experiment Name: Zm_5mM_NO_P Parameter: Tissue Value: Aerial
  misc_feature: MA Experiment 108526 PARAMETER Experiment Name: Zm_5mM_NO_P Parameter: Treatment Value: 5mM NO vs. No Treatment
  misc_feature: MA Experiment ID: 108527 Result: Down-regulated in Transcription
  misc_feature: MA Experiment 108527 PARAMETER Experiment Name: Zm_5mM_NO_P Parameter: Age (day) Value: 8
  misc_feature: MA Experiment 108527 PARAMETER Experiment Name: Zm_5mM_NO_P Parameter: Organism Value: Zea mays
  misc_feature: MA Experiment 108527 PARAMETER Experiment Name: Zm_5mM_NO_P Parameter: Plant Line Value: 35A19
  misc_feature: MA Experiment 108527 PARAMETER Experiment Name: Zm_5mM_NO_P Parameter: Timepoint (hr) Value: 6
  misc_feature: MA Experiment 108527 PARAMETER Experiment Name: Zm_5mM_NO_P Parameter: Tissue Value: Aerial
  misc_feature: MA Experiment 108527 PARAMETER Experiment Name: Zm_5mM_NO_P Parameter: Treatment Value: 5mM NO vs. No Treatment
  misc_feature: MA Experiment ID: 108533 Result: Down-regulated in Transcription
  misc_feature: MA Experiment 108533 PARAMETER Experiment Name: Zm_4deg_Cold_P Parameter: Age (hr) Value: 8
  misc_feature: MA Experiment 108533 PARAMETER Experiment Name: Zm_4deg_Cold_P Parameter: Organism Value: Zea mays
  misc_feature: MA Experiment 108533 PARAMETER Experiment Name: Zm_4deg_Cold_P Parameter: Plant Line Value: 35A19
  misc_feature: MA Experiment 108533 PARAMETER Experiment Name: Zm_4deg_Cold_P Parameter: Temperature (deg C) Value: 4 vs. 22
  misc_feature: MA Experiment 108533 PARAMETER Experiment Name: Zm_4deg_Cold_P Parameter: Timepoint (hr) Value: 1
  misc_feature: MA Experiment 108533 PARAMETER Experiment Name: Zm_4deg_Cold_P Parameter: Tissue Value: Aerial
  misc_feature: MA Experiment ID: 108535 Result: Down-regulated in Transcription
  misc_feature: MA Experiment 108535 PARAMETER Experiment Name: Zm_Meristem_P Parameter: Age (day) Value: 8
  misc_feature: MA Experiment 108535 PARAMETER Experiment Name: Zm_Meristem_P Parameter: Organism Value: Zea mays
  misc_feature: MA Experiment 108535 PARAMETER Experiment Name: Zm_Meristem_P Parameter: Plant Line Value: 35A19
  misc_feature: MA Experiment 108535 PARAMETER Experiment Name: Zm_Meristem_P Parameter: Tissue Value: Root Meristem vs. Above Root Meristem
  misc_feature: MA Experiment ID: 108536 Result: Up-regulated in Transcription
  misc_feature: MA Experiment 108536 PARAMETER Experiment Name: Zm_Meristem_P Parameter: Age (day) Value: 8
  misc_feature: MA Experiment 108536 PARAMETER Experiment Name: Zm_Meristem_P Parameter: Organism Value: Zea mays
  misc_feature: MA Experiment 108536 PARAMETER Experiment Name: Zm_Meristem_P Parameter: Plant Line Value: 35A19
  misc_feature: MA Experiment 108536 PARAMETER Experiment Name: Zm_Meristem_P Parameter: Tissue Value: Shoot Meristem vs. Above Shoot Meristem
  misc_feature: MA Experiment ID: 108542 Result: Up-regulated in Transcription
  misc_feature: MA Experiment 108542 PARAMETER Experiment Name: Zm_150mM_NaCl_P Parameter: Age (day) Value: 8
  misc_feature: MA Experiment 108542 PARAMETER Experiment Name: Zm_150mM_NaCl_P Parameter: Organism Value: Zea mays
  misc_feature: MA Experiment 108542 PARAMETER Experiment Name: Zm_150mM_NaCl_P Parameter: Plant Line Value: 35A19
  misc_feature: MA Experiment 108542 PARAMETER Experiment Name: Zm_150mM_NaCl_P Parameter: Timepoint (hr) Value: 6
  misc_feature: MA Experiment 108542 PARAMETER Experiment Name: Zm_150mM_NaCl_P Parameter: Tissue Value: Aerial
  misc_feature: MA Experiment 108542 PARAMETER Experiment Name: Zm_150mM_NaCl_P Parameter: Treatment Value: 150mM NaCl vs. No Treatment
  misc_feature: MA Experiment ID: 108556 Result: Down-regulated in Transcription
  misc_feature: MA Experiment 108556 PARAMETER Experiment Name: Zm_Drought_P Parameter: Age (day) Value: 9
  misc_feature: MA Experiment 108556 PARAMETER Experiment Name: Zm_Drought_P Parameter: Organism Value: Zea mays
  misc_feature: MA Experiment 108556 PARAMETER Experiment Name: Zm_Drought_P Parameter: Plant Line Value: 35A19
  misc_feature: MA Experiment 108556 PARAMETER Experiment Name: Zm_Drought_P Parameter: Timepoint (hr) Value: 24
  misc_feature: MA Experiment 108556 PARAMETER Experiment Name: Zm_Drought_P Parameter: Tissue Value: Aerial
  misc_feature: MA Experiment 108556 PARAMETER Experiment Name: Zm_Drought_P Parameter: Treatment Value: Drought vs. No Drought
  misc_feature: MA Experiment ID: 108597 Result: Down-regulated in Transcription
  misc_feature: MA Experiment 108597 PARAMETER Experiment Name: Zm_100uM_ABA_P Parameter: Age (day) Value: 9
  misc_feature: MA Experiment 108597 PARAMETER Experiment Name: Zm_100uM_ABA_P Parameter: Organism Value: Zea mays
  misc_feature: MA Experiment 108597 PARAMETER Experiment Name: Zm_100uM_ABA_P Parameter: Plant Line Value: 35A19
  misc_feature: MA Experiment 108597 PARAMETER Experiment Name: Zm_100uM_ABA_P Parameter: Timepoint (hr) Value: 24
  misc_feature: MA Experiment 108597 PARAMETER Experiment Name: Zm_100uM_ABA_P Parameter: Tissue Value: Aerial
  misc_feature: MA Experiment 108597 PARAMETER Experiment Name: Zm_100uM_ABA_P Parameter: Treatment Value: 100uM ABA vs. No Treatment
  misc_feature: MA Experiment ID: 20000477 Result: Down-regulated in Transcription
  misc_feature: MA Experiment 20000477 PARAMETER Experiment Name: Zm_5mM_SA_P Parameter: Age (day) Value: 10
  misc_feature: MA Experiment 20000477 PARAMETER Experiment Name: Zm_5mM_SA_P Parameter: Organism Value: Zea mays
  misc_feature: MA Experiment 20000477 PARAMETER Experiment Name: Zm_5mM_SA_P Parameter: Plant Line Value: 35A19
  misc_feature: MA Experiment 20000477 PARAMETER Experiment Name: Zm_5mM_SA_P Parameter: Timepoint (hr) Value: 48
  misc_feature: MA Experiment 20000477 PARAMETER Experiment Name: Zm_5mM_SA_P Parameter: Tissue Value: Aerial
  misc_feature: MA Experiment 20000477 PARAMETER Experiment Name: Zm_5mM_SA_P Parameter: Treatment Value: 5mM SA vs. No Treatment
  misc_feature: MA Experiment ID: 20000478 Result: Down-regulated in Transcription
  misc_feature: MA Experiment 20000478 PARAMETER Experiment Name: Zm_5mM_SA_P Parameter: Age (day) Value: 11
  misc_feature: MA Experiment 20000478 PARAMETER Experiment Name: Zm_5mM_SA_P Parameter: Organism Value: Zea mays
  misc_feature: MA Experiment 20000478 PARAMETER Experiment Name: Zm_5mM_SA_P Parameter: Plant Line Value: 35A19
  misc_feature: MA Experiment 20000478 PARAMETER Experiment Name: Zm_5mM_SA_P Parameter: Timepoint (hr) Value: 72
  misc_feature: MA Experiment 20000478 PARAMETER Experiment Name: Zm_5mM_SA_P Parameter: Tissue Value: Aerial
  misc_feature: MA Experiment 20000478 PARAMETER Experiment Name: Zm_5mM_SA_P Parameter: Treatment Value: 5mM SA vs. No Treatment
  misc_feature: MA Experiment ID: 20000479 Result: Down-regulated in Transcription
  misc_feature: MA Experiment 20000479 PARAMETER Experiment Name: Zm_Drought_P Parameter: Age (day) Value: 10
  misc_feature: MA Experiment 20000479 PARAMETER Experiment Name: Zm_Drought_P Parameter: Organism Value: Zea mays
  misc_feature: MA Experiment 20000479 PARAMETER Experiment Name: Zm_Drought_P Parameter: Plant Line Value: 35A19
  misc_feature: MA Experiment 20000479 PARAMETER Experiment Name: Zm_Drought_P Parameter: Timepoint (hr) Value: 48
  misc_feature: MA Experiment 20000479 PARAMETER Experiment Name: Zm_Drought_P Parameter: Tissue Value: Aerial
  misc_feature: MA Experiment 20000479 PARAMETER Experiment Name: Zm_Drought_P Parameter: Treatment Value: Drought vs. No Drought
  misc_feature: MA Experiment ID: 20000480 Result: Down-regulated in Transcription
  misc_feature: MA Experiment 20000480 PARAMETER Experiment Name: Zm_Drought_P Parameter: Age (day) Value: 11
  misc_feature: MA Experiment 20000480 PARAMETER Experiment Name: Zm_Drought_P Parameter: Organism Value: Zea mays
  misc_feature: MA Experiment 20000480 PARAMETER Experiment Name: Zm_Drought_P Parameter: Plant Line Value: 35A19
  misc_feature: MA Experiment 20000480 PARAMETER Experiment Name: Zm_Drought_P Parameter: Timepoint (hr) Value: 72
  misc_feature: MA Experiment 20000480 PARAMETER Experiment Name: Zm_Drought_P Parameter: Tissue Value: Aerial
  misc_feature: MA Experiment 20000480 PARAMETER Experiment Name: Zm_Drought_P Parameter: Treatment Value: Drought vs. No Drought
  misc_feature: MA Experiment ID: 20000626 Result: Up-regulated in Transcription
  misc_feature: MA Experiment 20000626 PARAMETER Experiment Name: Zm_Herbicide-Treatments_P Parameter: Timepoint (hr) Value: 12
  misc_feature: MA Experiment 20000626 PARAMETER Experiment Name: Zm_Herbicide-Treatments_P Parameter: Tissue Value: Aerial
  misc_feature: MA Experiment 20000626 PARAMETER Experiment Name: Zm_Herbicide-Treatments_P Parameter: Treatment Value: Roundup vs. No Treatment
  misc_feature: MA Experiment ID: 20000633 Result: Up-regulated in Transcription
  misc_feature: MA Experiment 20000633 PARAMETER Experiment Name: Zm_Herbicide-Treatments_P Parameter: Timepoint (hr) Value: 4
  misc_feature: MA Experiment 20000633 PARAMETER Experiment Name: Zm_Herbicide-Treatments_P Parameter: Tissue Value: Aerial
  misc_feature: MA Experiment 20000633 PARAMETER Experiment Name: Zm_Herbicide-Treatments_P Parameter: Treatment Value: Trimec vs. No Treatment
  misc_feature: MA Experiment ID: 20001610 Result: Down-regulated in Transcription
  misc_feature: MA Experiment 20001610 PARAMETER Experiment Name: Zm_50ppm_KNO3_L-to-H_P Parameter: Age (day) Value: 19
  misc_feature: MA Experiment 20001610 PARAMETER Experiment Name: Zm_50ppm_KNO3_L-to-H_P Parameter: Organism Value: Zea mays
  misc_feature: MA Experiment 20001610 PARAMETER Experiment Name: Zm_50ppm_KNO3_L-to-H_P Parameter: Plant Line Value: 35A19
  misc_feature: MA Experiment 20001610 PARAMETER Experiment Name: Zm_50ppm_KNO3_L-to-H_P Parameter: Timepoint (hr) Value: 2
  misc_feature: MA Experiment 20001610 PARAMETER Experiment Name: Zm_50ppm_KNO3_L-to-H_P Parameter: Tissue Value: Roots
  misc_feature: MA Experiment 20001610 PARAMETER Experiment Name: Zm_50ppm_KNO3_L-to-H_P Parameter: Treatment Value: 50ppm KNO3 vs. 50ppm KCl
  misc_feature: MA Experiment ID: 20001612 Result: Down-regulated in Transcription
  misc_feature: MA Experiment 20001612 PARAMETER Experiment Name: Zm_50ppm_KNO3_L-to-H_P Parameter: Age (day) Value: 19
  misc_feature: MA Experiment 20001612 PARAMETER Experiment Name: Zm_50ppm_KNO3_L-to-H_P Parameter: Organism Value: Zea mays
  misc_feature: MA Experiment 20001612 PARAMETER Experiment Name: Zm_50ppm_KNO3_L-to-H_P Parameter: Plant Line Value: 35A19
  misc_feature: MA Experiment 20001612 PARAMETER Experiment Name: Zm_50ppm_KNO3_L-to-H_P Parameter: Timepoint (hr) Value: 8
  misc_feature: MA Experiment 20001612 PARAMETER Experiment Name: Zm_50ppm_KNO3_L-to-H_P Parameter: Tissue Value: Roots
  misc_feature: MA Experiment 20001612 PARAMETER Experiment Name: Zm_50ppm_KNO3_L-to-H_P Parameter: Treatment Value: 50ppm KNO3 vs. 50ppm KCl
  misc_feature: MA Experiment ID: 20001613 Result: Down-regulated in Transcription
  misc_feature: MA Experiment 20001613 PARAMETER Experiment Name: Zm_50ppm_KNO3_L-to-H_P Parameter: Age (day) Value: 20
  misc_feature: MA Experiment 20001613 PARAMETER Experiment Name: Zm_50ppm_KNO3_L-to-H_P Parameter: Organism Value: Zea mays
  misc_feature: MA Experiment 20001613 PARAMETER Experiment Name: Zm_50ppm_KNO3_L-to-H_P Parameter: Plant Line Value: 35A19
  misc_feature: MA Experiment 20001613 PARAMETER Experiment Name: Zm_50ppm_KNO3_L-to-H_P Parameter: Timepoint (hr) Value: 24
  misc_feature: MA Experiment 20001613 PARAMETER Experiment Name: Zm_50ppm_KNO3_L-to-H_P Parameter: Tissue Value: Roots
  misc_feature: MA Experiment 20001613 PARAMETER Experiment Name: Zm_50ppm_KNO3_L-to-H_P Parameter: Treatment Value: 50ppm KNO3 vs. 50ppm KCl
accacacgaattgcacatctccacagctcacgattccaacactagctacatatatatgtagctttctaggctactatatacactcaccaccaagtgtgaagtgtgtatatatagtgacagctactgcaatatatacatacgcgtcacctatatattagccaagctagctatatgagcttggttgcggcgccaatggcgatcgtcgacgtggccaacgcccagctgcagcaagcagcagcagcagctgccaagaaagacgaggacggccatgagcagcaggagtcgtcctacgactacggcgcgctgatgaaaggcgtgaggcacctgtcggacagcggcattaccaggctgcccgacaggtacgtcctgcccgcgtccgaccgccccggcgtccttgccgtctcgtcgtccgtgggcgggcagcggcagggtcaagctccctgtcgtcaacctcgccggcctccgcgacccctgccagcgcgccgccgtgctggccacgctcgacgccgcgtgccgggagtacggcttctttcaggtggtaaaccacgggttcgggagcgacgtgagcggcgggatgctggacgtggcgcagcgcttcttcgagctgccgctggccgagcgagcgcggcacatgtcggcggacgtgcgggcgccggtgcgctacggcaccagcttcaaccaggccaaggacgacgtgctctgctggcgcgacttcctcaagctcgtctgccagccgctgcaggcggtgctcccgtactggccccagcagccggcggacctcagggacgtggccaccaggtacgccacggcgagccaccggctgttcatggaggtcatggaggcggcgctggaggccctgggcatccccacggccggcggcgtgctcggggagctggcagcgtcgtcgtcgcacatgatgacggtgaactgctacccggcttgcccgcagcctgagctcacgctggggatgccctcgcactcggactacggcctcttcacgttcgtcctgcaggaccacgtcgagggcctccaggtcatgcacgacggccgctggctcaccatcgaccccatcccgggatcgttcgtcgtcaacgtcggcgaccacctagagatctacagcaacgggcggtacaagagcgcgctgcaccgggtgcacgtgaactccacgcggccgcgcatctcggtggcgtcgttccacagcctgccggcggagcgagtgatcgggccggcgccggagctggtggacgacgaggccggcaacccgcggcggtacatggacaccgacttcgctaccttcctcgcctacctcgcatccgcggacggcaagaacaagaccttcctccagtcaaggaagctgcctgctgctgctcctccatgcctctagctaactagatagctgcttattaatctgacagaataaaattaatcagttcagcgcacaattccacaagcgaaaacaaacctggatttgttttaattagctctgcccttcattattacattcaagctagctcttggtcaacgcatgc

SEQ ID NO: 3395 - protein, 269 aa, Zea mays subsp. mays
  peptide (1)..(269): Ceres Seq. ID no. 12407872
  misc_feature (112)..(209): Pfam Name: 2OG-Fe(II) oxygenase superfamily Pfam Description: 2OG-Fe(II) oxygenase superfamily
  misc_feature (1)..(261): Homolog of NCBI NO: 15240797 NR Description: putative protein; protein id: At5g07480.1
  misc_feature (1)..(29): Homolog of NCBI NO: 15232291 NR Description: SRG1 - like protein; protein id: At3g60290.1
  misc_feature (64)..(260): Homolog of NCBI NO: 15232291 NR Description: SRG1 - like protein; protein id: At3g60290.1
  misc_feature (1)..(233): Homolog of NCBI NO: 38345873 NR Description: OSJNBa0064M23.15 [Oryza sativa (japonica
  misc_feature (1)..(227): Homolog of NCBI NO: 37536444 NR Description: unknown protein [Oryza sativa (japonica
  misc_feature (1)..(226): Homolog of NCBI NO: 15235126 NR Description: putative Fe(II)/ascorbate oxidase; protein id:
  misc_feature (1)..(241): Homolog of NCBI NO: 15235124 NR Description: putative flavanone 3-beta-hydroxylase; protein
  misc_feature (1)..(260): Homolog of NCBI NO: 30689834 NR Description: flavonol synthase family [Arabidopsis thaliana]
  misc_feature (1)..(260): Homolog of NCBI NO: 7433240 NR Description: probable flavonol synthase [imported] -
  misc_feature (1)..(261): Homolog of NCBI NO: 15228020 NR Description: putative giberellin beta-hydroxylase; protein id:
MLDVAQRFFELPLAERARHMSADVRAPVRYGTSFNQAKDDVLCWRDFLKLVCQPLQAVLPYWPQQPADLRDVATRYATASHRLFMEVMEAALEALGIPTAGGVLGELAASSSHMMTVNCYPACPQPELTLGMPSHSDYGLFTFVLQDHVEGLQVMHDGRWLTIDPIPGSFVVNVGDHLEIYSNGRYKSALHRVHVNSTRPRISVASFHSLPAERVIGPAPELVDDEAGNPRRYMDTDFATFLAYLASADGKNKTFLQSRKLPAAAPPCL

SEQ ID NO: 3396 - protein, 260 aa, Zea mays subsp. mays
  peptide (1)..(260): Ceres Seq. ID no. 12407873
  misc_feature (99)..(258): Pfam Name: Aminotransferase class-III Pfam Description: Aminotransferase class-III
  misc_feature (30)..(71): Homolog of NCBI NO: 119640 NR Description: 1-AMINOCYCLOPROPANE-1-CARBOXYLATE OXIDASE HOMOLOG
  misc_feature (52)..(82): Homolog of NCBI NO: 30689834 NR Description: flavonol synthase family [Arabidopsis thaliana]
  misc_feature (52)..(82): Homolog of NCBI NO: 7433240 NR Description: probable flavonol synthase [imported] -
  misc_feature (47)..(81): Homolog of NCBI NO: 15228020 NR Description: putative giberellin beta-hydroxylase; protein id:
MSLVAAPMAIVDVANAQLQQAAAAAAKKDEDGHEQQESSYDYGALMKGVRHLSDSGITRLPDRYVLPASDRPGVLAVSSSVGGQRQGQAPCRQPRRPPRPLPARRRAGHARRRVPGVRLLSGGKPRVRERRERRDAGRGAALLRAAAGRASAAHVGGRAGAGALRHQLQPGQGRRALLARLPQARLPAAAGGAPVLAPAAGGPQGRGHQVRHGEPPAVHGGHGGGAGGPGHPHGRRRARGAGSVVVAHDDGELLPGLPAA

SEQ ID NO: 3397 - protein, 253 aa, Zea mays subsp. mays
  peptide (1)..(253): Ceres Seq. ID no. 12407874
  misc_feature (92)..(251): Pfam Name: Aminotransferase class-III Pfam Description: Aminotransferase class-III
  misc_feature (23)..(64): Homolog of NCBI NO: 119640 NR Description: 1-AMINOCYCLOPROPANE-1-CARBOXYLATE OXIDASE HOMOLOG
  misc_feature (45)..(75): Homolog of NCBI NO: 30689834 NR Description: flavonol synthase family [Arabidopsis thaliana]
  misc_feature (45)..(75): Homolog of NCBI NO: 7433240 NR Description: probable flavonol synthase [imported] -
  misc_feature (40)..(74): Homolog of NCBI NO: 15228020 NR Description: putative giberellin beta-hydroxylase; protein id:
MAIVDVANAQLQQAAAAAAKKDEDGHEQQESSYDYGALMKGVRHLSDSGITRLPDRYVLPASDRPGVLAVSSSVGGQRQGQAPCRQPRRPPRPLPARRRAGHARRRVPGVRLLSGGKPRVRERRERRDAGRGAALLRAAAGRASAAHVGGRAGAGALRHQLQPGQGRRALLARLPQARLPAAAGGAPVLAPAAGGPQGRGHQVRHGEPPAVHGGHGGGAGGPGHPHGRRRARGAGSVVVAHDDGELLPGLPAA

SEQ ID NO: 3398 - DNA, 1334 bp, Zea mays subsp. mays
  misc_feature (1)..(1334): Ceres Seq. ID no. 12414173
  misc_feature: MA Experiment ID: 108523 Result: Up-regulated in Transcription
  misc_feature: MA Experiment 108523 PARAMETER Experiment Name: Zm_42deg_Heat_P Parameter: Age (day) Value: 8
  misc_feature: MA Experiment 108523 PARAMETER Experiment Name: Zm_42deg_Heat_P Parameter: Organism Value: Zea mays
  misc_feature: MA Experiment 108523 PARAMETER Experiment Name: Zm_42deg_Heat_P Parameter: Plant Line Value: 35A19
  misc_feature: MA Experiment 108523 PARAMETER Experiment Name: Zm_42deg_Heat_P Parameter: Temperature (deg C) Value: 42 vs. 22
  misc_feature: MA Experiment 108523 PARAMETER Experiment Name: Zm_42deg_Heat_P Parameter: Timepoint (hr) Value: 6
  misc_feature: MA Experiment 108523 PARAMETER Experiment Name: Zm_42deg_Heat_P Parameter: Tissue Value: Aerial
  misc_feature: MA Experiment ID: 108527 Result: Up-regulated in Transcription
  misc_feature: MA Experiment 108527 PARAMETER Experiment Name: Zm_5mM_NO_P Parameter: Age (day) Value: 8
  misc_feature: MA Experiment 108527 PARAMETER Experiment Name: Zm_5mM_NO_P Parameter: Organism Value: Zea mays
  misc_feature: MA Experiment 108527 PARAMETER Experiment Name: Zm_5mM_NO_P Parameter: Plant Line Value: 35A19
  misc_feature: MA Experiment 108527 PARAMETER Experiment Name: Zm_5mM_NO_P Parameter: Timepoint (hr) Value: 6
  misc_feature: MA Experiment 108527 PARAMETER Experiment Name: Zm_5mM_NO_P Parameter: Tissue Value: Aerial
  misc_feature: MA Experiment 108527 PARAMETER Experiment Name: Zm_5mM_NO_P Parameter: Treatment Value: 5mM NO vs. No Treatment
  misc_feature: MA Experiment ID: 108528 Result: Down-regulated in Transcription
  misc_feature: MA Experiment 108528 PARAMETER Experiment Name: Zm_Imbibed_Seeds_P Parameter: Age (day) Value: 5 vs. 2
  misc_feature: MA Experiment 108528 PARAMETER Experiment Name: Zm_Imbibed_Seeds_P Parameter: Organism Value: Zea mays
  misc_feature: MA Experiment 108528 PARAMETER Experiment Name: Zm_Imbibed_Seeds_P Parameter: Plant Line Value: 35A19
  misc_feature: MA Experiment 108528 PARAMETER Experiment Name: Zm_Imbibed_Seeds_P Parameter: Tissue Value: Aerial vs. Embryo
  misc_feature: MA Experiment ID: 108534 Result: Up-regulated in Transcription
  misc_feature: MA Experiment 108534 PARAMETER Experiment Name: Zm_4deg_Cold_P Parameter: Age (hr) Value: 8
  misc_feature: MA Experiment 108534 PARAMETER Experiment Name: Zm_4deg_Cold_P Parameter: Organism Value: Zea mays
  misc_feature: MA Experiment 108534 PARAMETER Experiment Name: Zm_4deg_Cold_P Parameter: Plant Line Value: 35A19
  misc_feature: MA Experiment 108534 PARAMETER Experiment Name: Zm_4deg_Cold_P Parameter: Temperature (deg C) Value: 4 vs. 22
  misc_feature: MA Experiment 108534 PARAMETER Experiment Name: Zm_4deg_Cold_P Parameter: Timepoint (hr) Value: 6
  misc_feature: MA Experiment 108534 PARAMETER Experiment Name: Zm_4deg_Cold_P Parameter: Tissue Value: Aerial
  misc_feature: MA Experiment ID: 108536 Result: Up-regulated in Transcription
  misc_feature: MA Experiment 108536 PARAMETER Experiment Name: Zm_Meristem_P Parameter: Age (day) Value: 8
  misc_feature: MA Experiment 108536 PARAMETER Experiment Name: Zm_Meristem_P Parameter: Organism Value: Zea mays
  misc_feature: MA Experiment 108536 PARAMETER Experiment Name: Zm_Meristem_P Parameter: Plant Line Value: 35A19
  misc_feature: MA Experiment 108536 PARAMETER Experiment Name: Zm_Meristem_P Parameter: Tissue Value: Shoot Meristem vs. Above Shoot Meristem
  misc_feature: MA Experiment ID: 108543 Result: Down-regulated in Transcription
  misc_feature: MA Experiment ID: 108556 Result: Up-regulated in Transcription
  misc_feature: MA Experiment 108556 PARAMETER Experiment Name: Zm_Drought_P Parameter: Age (day) Value: 9
  misc_feature: MA Experiment 108556 PARAMETER Experiment Name: Zm_Drought_P Parameter: Organism Value: Zea mays
  misc_feature: MA Experiment 108556 PARAMETER Experiment Name: Zm_Drought_P Parameter: Plant Line Value: 35A19
  misc_feature: MA Experiment 108556 PARAMETER Experiment Name: Zm_Drought_P Parameter: Timepoint (hr) Value: 24
  misc_feature: MA Experiment 108556 PARAMETER Experiment Name: Zm_Drought_P Parameter: Tissue Value: Aerial
  misc_feature: MA Experiment 108556 PARAMETER Experiment Name: Zm_Drought_P Parameter: Treatment Value: Drought vs. No Drought
  misc_feature: MA Experiment ID: 108559 Result: Up-regulated in Transcription
  misc_feature: MA Experiment 108559 PARAMETER Experiment Name: Zm_5mM_NO_P Parameter: Age (day) Value: 8
  misc_feature: MA Experiment 108559 PARAMETER Experiment Name: Zm_5mM_NO_P Parameter: Organism Value: Zea mays
  misc_feature: MA Experiment 108559 PARAMETER Experiment Name: Zm_5mM_NO_P Parameter: Plant Line Value: 35A19
  misc_feature: MA Experiment 108559 PARAMETER Experiment Name: Zm_5mM_NO_P Parameter: Timepoint (hr) Value: 12
  misc_feature: MA Experiment 108559 PARAMETER Experiment Name: Zm_5mM_NO_P Parameter: Tissue Value: Aerial
  misc_feature: MA Experiment 108559 PARAMETER Experiment Name: Zm_5mM_NO_P Parameter: Treatment Value: 5mM NO vs. No Treatment
  misc_feature: MA Experiment ID: 20000477 Result: Down-regulated in Transcription
  misc_feature: MA Experiment 20000477 PARAMETER Experiment Name: Zm_5mM_SA_P Parameter: Age (day) Value: 10
  misc_feature: MA Experiment 20000477 PARAMETER Experiment Name: Zm_5mM_SA_P Parameter: Organism Value: Zea mays
  misc_feature: MA Experiment 20000477 PARAMETER Experiment Name: Zm_5mM_SA_P Parameter: Plant Line Value: 35A19
  misc_feature: MA Experiment 20000477 PARAMETER Experiment Name: Zm_5mM_SA_P Parameter: Timepoint (hr) Value: 48
  misc_feature: MA Experiment 20000477 PARAMETER Experiment Name: Zm_5mM_SA_P Parameter: Tissue Value: Aerial
  misc_feature: MA Experiment 20000477 PARAMETER Experiment Name: Zm_5mM_SA_P Parameter: Treatment Value: 5mM SA vs. No Treatment
  misc_feature: MA Experiment ID: 20000478 Result: Down-regulated in Transcription
  misc_feature: MA Experiment 20000478 PARAMETER Experiment Name: Zm_5mM_SA_P Parameter: Age (day) Value: 11
  misc_feature: MA Experiment 20000478 PARAMETER Experiment Name: Zm_5mM_SA_P Parameter: Organism Value: Zea mays
  misc_feature: MA Experiment 20000478 PARAMETER Experiment Name: Zm_5mM_SA_P Parameter: Plant Line Value: 35A19
  misc_feature: MA Experiment 20000478 PARAMETER Experiment Name: Zm_5mM_SA_P Parameter: Timepoint (hr) Value: 72
  misc_feature: MA Experiment 20000478 PARAMETER Experiment Name: Zm_5mM_SA_P Parameter: Tissue Value: Aerial
  misc_feature: MA Experiment 20000478 PARAMETER Experiment Name: Zm_5mM_SA_P Parameter: Treatment Value: 5mM SA vs. No Treatment
  misc_feature: MA Experiment ID: 20000480 Result: Down-regulated in Transcription
  misc_feature: MA Experiment 20000480 PARAMETER Experiment Name: Zm_Drought_P Parameter: Age (day) Value: 11
  misc_feature: MA Experiment 20000480 PARAMETER Experiment Name: Zm_Drought_P Parameter: Organism Value: Zea mays
  misc_feature: MA Experiment 20000480 PARAMETER Experiment Name: Zm_Drought_P Parameter: Plant Line Value: 35A19
  misc_feature: MA Experiment 20000480 PARAMETER Experiment Name: Zm_Drought_P Parameter: Timepoint (hr) Value: 72
  misc_feature: MA Experiment 20000480 PARAMETER Experiment Name: Zm_Drought_P Parameter: Tissue Value: Aerial
  misc_feature: MA Experiment 20000480 PARAMETER Experiment Name: Zm_Drought_P Parameter: Treatment Value: Drought vs. No Drought
  misc_feature: MA Experiment ID: 20000533 Result: Up-regulated in Transcription
  misc_feature: MA Experiment 20000533 PARAMETER Experiment Name: Zm_0.001percent_MeJA_P Parameter: Age (day) Value: 11
  misc_feature: MA Experiment 20000533 PARAMETER Experiment Name: Zm_0.001percent_MeJA_P Parameter: Organism Value: Zea mays
  misc_feature: MA Experiment 20000533 PARAMETER Experiment Name: Zm_0.001percent_MeJA_P Parameter: Plant Line Value: 35A19
  misc_feature: MA Experiment 20000533 PARAMETER Experiment Name: Zm_0.001percent_MeJA_P Parameter: Timepoint (hr) Value: 72
  misc_feature: MA Experiment 20000533 PARAMETER Experiment Name: Zm_0.001percent_MeJA_P Parameter: Tissue Value: Aerial
  misc_feature: MA Experiment 20000533 PARAMETER Experiment Name: Zm_0.001percent_MeJA_P Parameter: Treatment Value: 0.001percent MeJA vs. No Treatment
  misc_feature: MA Experiment ID: 20000535 Result: Down-regulated in Transcription
  misc_feature: MA Experiment 20000535 PARAMETER Experiment Name: Zm_Hybrid_Seed_Dev_P Parameter: DAP Value: 30 vs. 12
  misc_feature: MA Experiment 20000535 PARAMETER Experiment Name: Zm_Hybrid_Seed_Dev_P Parameter: Organism Value: Zea mays
  misc_feature: MA Experiment 20000535 PARAMETER Experiment Name: Zm_Hybrid_Seed_Dev_P Parameter: Plant Line Value: 35A19
  misc_feature: MA Experiment 20000535 PARAMETER Experiment Name: Zm_Hybrid_Seed_Dev_P Parameter: Tissue Value: Embryo vs. Unfert Floret
  misc_feature: MA Experiment ID: 20000626 Result: Down-regulated in Transcription
  misc_feature: MA Experiment 20000626 PARAMETER Experiment Name: Zm_Herbicide-Treatments_P Parameter: Timepoint (hr) Value: 12
  misc_feature: MA Experiment 20000626 PARAMETER Experiment Name: Zm_Herbicide-Treatments_P Parameter: Tissue Value: Aerial
  misc_feature: MA Experiment 20000626 PARAMETER Experiment Name: Zm_Herbicide-Treatments_P Parameter: Treatment Value: Roundup vs. No Treatment
  misc_feature: MA Experiment ID: 20000629 Result: Down-regulated in Transcription
  misc_feature: MA Experiment 20000629 PARAMETER Experiment Name: Zm_Herbicide-Treatments_P Parameter: Timepoint (hr) Value: 12
  misc_feature: MA Experiment 20000629 PARAMETER Experiment Name: Zm_Herbicide-Treatments_P Parameter: Tissue Value: Aerial
  misc_feature: MA Experiment 20000629 PARAMETER Experiment Name: Zm_Herbicide-Treatments_P Parameter: Treatment Value: Trimec vs. No Treatment
aaacaacttgggcgcggccggattcgtataggttagcagcacacagtagcaagctcgcgatctgtgcgcccaccatcaccaccaccgccgggaggagaggaccgaccgaccgaccgaagatgcggatgagctgcaacggctgccgcgtcctgcgcaagggctgcagcgacgcctgcaccatccgcccctgcctgcagtggatcgacagccccgaggcgcaggcaaacgccaccgtcttcctcgccaagttctacggccgcgcggggctgctcaacctgctggccgccgcgcccgacgacgccgcccgcccggccgtcttccgctccctgctctacgaggcgtgcggccgcatcgtcaaccccgtctacggctccgtcggcctgctctggtcgcgccggtggcagagctgcgtcgacgccgtcgaggccgtgctcaagggggaccccgtcgtgcaggtcgacgccggctccgaggccgccgccgccccggcgccgctgctcggcgccagcaggccagccgcgccgccggccgcctacgacatccgccacgtcgccagggatcccgacgccgccgccgccgccgacctcctccgcgtcgcgcgcggcggcggccgcaggaggttcaagcgcgccggctcgccttccaacgcctgcaaggcgaaacccctcaagggaaaggctagcagcaacgagcgcgcgtcgcccagccctactcagaggcagcatcagcaggagacggaggagctggagctggaaccggtgccgatggtcgtcgagcttgagcacggcgaggagtccgccggcagccacgaccaccaccaccaccacttgcagccgcagggatcgtcggaggacaccgacgtggaggccgcctcccacgtgagcccaggcccgaggccgagccgccggtcagcagccagagccaggcgctggtggcggacccaggagggagaggaggtcaggctggagctcacgctcggcttcgagccagtcgtcaggcagcagccgaggctgtcgtgctgcgactcgagcggcttgagcgccgcgtcgagcctcatcggcttgcggctgcagctgccagccgcctgagcagaggaggtcatctcatttcacaaggcacagtggcacaccaagtgcagttttgcaaccaatgcggtgtttgcttaaagaaaaggttttggacgccgagcagccgactatttcctaggttttgttttttcattttcttttcttggctgtaattgtaaaggctgatgaactgcacagttttagcgtcgtcataataggagttttgcaattccatatgagattataagctattaaaaagtttgattg

SEQ ID NO: 3399 - protein, 361 aa, Zea mays subsp. mays
  peptide (1)..(361): Ceres Seq. ID no. 12414174
  misc_feature (43)..(149): Pfam Name: Protein of unknown function DUF260 Pfam Description: Protein of unknown function DUF260
  misc_feature (43)..(149): Pfam Name: Protein of unknown function DUF260 Pfam Description: Protein of unknown function DUF260
  misc_feature (42)..(164): Homolog of NCBI NO: 21593577 NR Description: unknown [Arabidopsis thaliana]
  misc_feature (42)..(164): Homolog of NCBI NO: 15240739 NR Description: putative protein
  misc_feature (42)..(164): Homolog of NCBI NO: 21553886 NR Description: unknown [Arabidopsis thaliana]
  misc_feature (42)..(164): Homolog of NCBI NO: 15229644 NR Description: putative protein
  misc_feature (40)..(186): Homolog of NCBI NO: 15219829 NR Description: hypothetical protein; protein id: At1g67100.1
  misc_feature (42)..(164): Homolog of NCBI NO: 21553886 NR Description: unknown [Arabidopsis thaliana]
  misc_feature (40)..(186): Homolog of NCBI NO: 15219829 NR Description: hypothetical protein; protein id: At1g67100.1
  misc_feature (40)..(216): Homolog of NCBI NO: 34895540 NR Description: unnamed protein product [Oryza sativa (japonica
  misc_feature (42)..(164): Homolog of NCBI NO: 15240739 NR Description: putative protein
  misc_feature (42)..(164): Homolog of NCBI NO: 21593577 NR Description: unknown [Arabidopsis thaliana]
  misc_feature (40)..(360): Homolog of NCBI NO: 34914608 NR Description: P0520B06.17 [Oryza sativa (japonica
  misc_feature (40)..(249): Homolog of NCBI NO: 18396229 NR Description: expressed protein
  misc_feature (40)..(249): Homolog of NCBI NO: 21554191 NR Description: unknown [Arabidopsis thaliana]
  misc_feature (40)..(187): Homolog of NCBI NO: 15221429 NR Description: expressed protein
  misc_feature (42)..(164): Homolog of NCBI NO: 15229644 NR Description: putative protein
  misc_feature (40)..(187): Homolog of NCBI NO: 15221429 NR Description: expressed protein
  misc_feature (40)..(216): Homolog of NCBI NO: 34895540 NR Description: unnamed protein product [Oryza sativa (japonica
  misc_feature (40)..(249): Homolog of NCBI NO: 21554191 NR Description: unknown [Arabidopsis thaliana]
  misc_feature (40)..(249): Homolog of NCBI NO: 18396229 NR Description: expressed protein
  misc_feature (40)..(360): Homolog of NCBI NO: 34914608 NR Description: P0520B06.17 [Oryza sativa (japonica
TTWARPDSYRLAAHSSKLAICAPTITTTAGRRGPTDRPKMRMSCNGCRVLRKGCSDACTIRPCLQWIDSPEAQANATVFLAKFYGRAGLLNLLAAAPDDAARPAVFRSLLYEACGRIVNPVYGSVGLLWSRRWQSCVDAVEAVLKGDPVVQVDAGSEAAAAPAPLLGASRPAAPPAAYDIRHVARDPDAAAAADLLRVARGGGRRRFKRAGSPSNACKAKPLKGKASSNERASPSPTQRQHQQETEELELEPVPMVVELEHGEESAGSHDHHHHHLQPQGSSEDTDVEAASHVSPGPRPSRRSAARARRWWRTQEGEEVRLELTLGFEPVVRQQPRLSCCDSSGLSAASSLIGLRLQLPAA

SEQ ID NO: 3400 - protein, 322 aa, Zea mays subsp. mays
  peptide (1)..(322): Ceres Seq. ID no. 12414175
  misc_feature (4)..(110): Pfam Name: Protein of unknown function DUF260 Pfam Description: Protein of unknown function DUF260
  misc_feature (4)..(110): Pfam Name: Protein of unknown function DUF260 Pfam Description: Protein of unknown function DUF260
  misc_feature (3)..(125): Homolog of NCBI NO: 21593577 NR Description: unknown [Arabidopsis thaliana]
  misc_feature (3)..(125): Homolog of NCBI NO: 15240739 NR Description: putative protein
  misc_feature (3)..(125): Homolog of NCBI NO: 21553886 NR Description: unknown [Arabidopsis thaliana]
  misc_feature (3)..(125): Homolog of NCBI NO: 15229644 NR Description: putative protein
  misc_feature (1)..(147): Homolog of NCBI NO: 15219829 NR Description: hypothetical protein; protein id: At1g67100.1
  misc_feature (3)..(125): Homolog of NCBI NO: 21593577 NR Description: unknown [Arabidopsis thaliana]
  misc_feature (3)..(125): Homolog of NCBI NO: 21553886 NR Description: unknown [Arabidopsis thaliana]
  misc_feature (1)..(147): Homolog of NCBI NO: 15219829 NR Description: hypothetical protein; protein id: At1g67100.1
  misc_feature (1)..(321): Homolog of NCBI NO: 34914608 NR Description: P0520B06.17 [Oryza sativa (japonica
  misc_feature (1)..(210): Homolog of NCBI NO: 18396229 NR Description: expressed protein
  misc_feature (1)..(210): Homolog of NCBI NO: 21554191 NR Description: unknown [Arabidopsis thaliana]
  misc_feature (1)..(177): Homolog of NCBI NO: 34895540 NR Description: unnamed protein product [Oryza sativa (japonica
  misc_feature (1)..(148): Homolog of NCBI NO: 15221429 NR Description: expressed protein
  misc_feature (3)..(125): Homolog of NCBI NO: 15229644 NR Description: putative protein
  misc_feature (3)..(125): Homolog of NCBI NO: 15240739 NR Description: putative protein
  misc_feature (1)..(148): Homolog of NCBI NO: 15221429 NR Description: expressed protein
  misc_feature (1)..(177): Homolog of NCBI NO: 34895540 NR Description: unnamed protein product [Oryza sativa (japonica
  misc_feature (1)..(210): Homolog of NCBI NO: 21554191 NR Description: unknown [Arabidopsis thaliana]
  misc_feature (1)..(210): Homolog of NCBI NO: 18396229 NR Description: expressed protein
  misc_feature (1)..(321): Homolog of NCBI NO: 34914608 NR Description: P0520B06.17 [Oryza sativa (japonica
MRMSCNGCRVLRKGCSDACTIRPCLQWIDSPEAQANATVFLAKFYGRAGLLNLLAAAPDDAARPAVFRSLLYEACGRIVNPVYGSVGLLWSRRWQSCVDAVEAVLKGDPVVQVDAGSEAAAAPAPLLGASRPAAPPAAYDIRHVARDPDAAAAADLLRVARGGGRRRFKRAGSPSNACKAKPLKGKASSNERASPSPTQRQHQQETEELELEPVPMVVELEHGEESAGSHDHHHHHLQPQGSSEDTDVEAASHVSPGPRPSRRSAARARRWWRTQEGEEVRLELTLGFEPVVRQQPRLSCCDSSGLSAASSLIGLRLQLPAA

SEQ ID NO: 3401 - protein, 320 aa, Zea mays subsp. mays
  peptide (1)..(320): Ceres Seq. ID no. 12414176
  misc_feature (2)..(108): Pfam Name: Protein of unknown function DUF260 Pfam Description: Protein of unknown function DUF260
  misc_feature (2)..(108): Pfam Name: Protein of unknown function DUF260 Pfam Description: Protein of unknown function DUF260
  misc_feature (1)..(145): Homolog of NCBI NO: 15219829 NR Description: hypothetical protein; protein id: At1g67100.1
  misc_feature (1)..(146): Homolog of NCBI NO: 15221429 NR Description: expressed protein
  misc_feature (1)..(175): Homolog of NCBI NO: 34895540 NR Description: unnamed protein product [Oryza sativa (japonica
  misc_feature (1)..(123): Homolog of NCBI NO: 21593577 NR Description: unknown [Arabidopsis thaliana]
  misc_feature (1)..(123): Homolog of NCBI NO: 21553886 NR Description: unknown [Arabidopsis thaliana]
  misc_feature (1)..(123): Homolog of NCBI NO: 21593577 NR Description: unknown [Arabidopsis thaliana]
  misc_feature (1)..(123): Homolog of NCBI NO: 21553886 NR Description: unknown [Arabidopsis thaliana]
  misc_feature (1)..(145): Homolog of NCBI NO: 15219829 NR Description: hypothetical protein; protein id: At1g67100.1
  misc_feature (1)..(319): Homolog of NCBI NO: 34914608 NR Description: P0520B06.17 [Oryza sativa (japonica
  misc_feature (1)..(208): Homolog of NCBI NO: 18396229 NR Description: expressed protein
  misc_feature (1)..(208): Homolog of NCBI NO: 21554191 NR Description: unknown [Arabidopsis thaliana]
  misc_feature (1)..(175): Homolog of NCBI NO: 34895540 NR Description: unnamed protein product [Oryza sativa (japonica
  misc_feature (1)..(146): Homolog of NCBI NO: 15221429 NR Description: expressed protein
  misc_feature (1)..(123): Homolog of NCBI NO: 15229644 NR Description: putative protein
  misc_feature (1)..(123): Homolog of NCBI NO: 15240739 NR Description: putative protein
  misc_feature (1)..(123): Homolog of NCBI NO: 15229644 NR Description: putative protein
  misc_feature (1)..(123): Homolog of NCBI NO: 15240739 NR Description: putative protein
  misc_feature (1)..(208): Homolog of NCBI NO: 21554191 NR Description: unknown [Arabidopsis thaliana]
  misc_feature (1)..(208): Homolog of NCBI NO: 18396229 NR Description: expressed protein
  misc_feature (1)..(319): Homolog of NCBI NO: 34914608 NR Description: P0520B06.17 [Oryza sativa (japonica
MSCNGCRVLRKGCSDACTIRPCLQWIDSPEAQANATVFLAKFYGRAGLLNLLAAAPDDAARPAVFRSLLYEACGRIVNPVYGSVGLLWSRRWQSCVDAVEAVLKGDPVVQVDAGSEAAAAPAPLLGASRPAAPPAAYDIRHVARDPDAAAAADLLRVARGGGRRRFKRAGSPSNACKAKPLKGKASSNERASPSPTQRQHQQETEELELEPVPMVVELEHGEESAGSHDHHHHHLQPQGSSEDTDVEAASHVSPGPRPSRRSAARARRWWRTQEGEEVRLELTLGFEPVVRQQPRLSCCDSSGLSAASSLIGLRLQLPAA

SEQ ID NO: 3402 - DNA, 890 bp, Zea mays subsp. mays
  misc_feature (1)..(890): Ceres Seq. ID no. 12595102
  misc_feature: MA Experiment ID: 108543 Result: Down-regulated in Transcription
  misc_feature: MA Experiment ID: 108544 Result: Down-regulated in Transcription
  misc_feature: MA Experiment ID: 108556 Result: Down-regulated in Transcription
  misc_feature: MA Experiment 108556 PARAMETER Experiment Name: Zm_Drought_P Parameter: Age (day) Value: 9
  misc_feature: MA Experiment 108556 PARAMETER Experiment Name: Zm_Drought_P Parameter: Organism Value: Zea mays
  misc_feature: MA Experiment 108556 PARAMETER Experiment Name: Zm_Drought_P Parameter: Plant Line Value: 35A19
  misc_feature: MA Experiment 108556 PARAMETER Experiment Name: Zm_Drought_P Parameter: Timepoint (hr) Value: 24
  misc_feature: MA Experiment 108556 PARAMETER Experiment Name: Zm_Drought_P Parameter: Tissue Value: Aerial
  misc_feature: MA Experiment 108556 PARAMETER Experiment Name: Zm_Drought_P Parameter: Treatment Value: Drought vs. No Drought
  misc_feature: MA Experiment ID: 20000487 Result: Up-regulated in Transcription
  misc_feature: MA Experiment 20000487 PARAMETER Experiment Name: Zm_50mM_NH4NO3_L_to_H_P Parameter: Organism Value: Zea mays
  misc_feature: MA Experiment 20000487 PARAMETER Experiment Name: Zm_50mM_NH4NO3_L_to_H_P Parameter: Timepoint (hr) Value: 4
  misc_feature: MA Experiment 20000487 PARAMETER Experiment Name: Zm_50mM_NH4NO3_L_to_H_P Parameter: Tissue Value: Leaves
  misc_feature: MA Experiment 20000487 PARAMETER Experiment Name: Zm_50mM_NH4NO3_L_to_H_P Parameter: Treatment Value: 50mM NH4NO3 vs. 100mM Mannitol
  misc_feature: MA Experiment ID: 20000488 Result: Up-regulated in Transcription
  misc_feature: MA Experiment 20000488 PARAMETER Experiment Name: Zm_50mM_NH4NO3_L_to_H_P Parameter: Organism Value: Zea mays
  misc_feature: MA Experiment 20000488 PARAMETER Experiment Name: Zm_50mM_NH4NO3_L_to_H_P Parameter: Timepoint (hr) Value: 8
  misc_feature: MA Experiment 20000488 PARAMETER Experiment Name: Zm_50mM_NH4NO3_L_to_H_P Parameter: Tissue Value: Leaves
  misc_feature: MA Experiment 20000488 PARAMETER Experiment Name: Zm_50mM_NH4NO3_L_to_H_P Parameter: Treatment Value: 50mM NH4NO3 vs. 100mM Mannitol
  misc_feature: MA Experiment ID: 20000534 Result: Down-regulated in Transcription
  misc_feature: MA Experiment 20000534 PARAMETER Experiment Name: Zm_Hybrid_Pollen_P Parameter: Age (day) Value: 8
  misc_feature: MA Experiment 20000534 PARAMETER Experiment Name: Zm_Hybrid_Pollen_P Parameter: Organism Value: Zea mays
  misc_feature: MA Experiment 20000534 PARAMETER Experiment Name: Zm_Hybrid_Pollen_P Parameter: Plant Line Value: 35A19
  misc_feature: MA Experiment 20000534 PARAMETER Experiment Name: Zm_Hybrid_Pollen_P Parameter: Tissue Value: Pollen vs. Aerial
  misc_feature: MA Experiment ID: 20000626 Result: Up-regulated in Transcription
  misc_feature: MA Experiment 20000626 PARAMETER Experiment Name: Zm_Herbicide-Treatments_P Parameter: Timepoint (hr) Value: 12
  misc_feature: MA Experiment 20000626 PARAMETER Experiment Name: Zm_Herbicide-Treatments_P Parameter: Tissue Value: Aerial
  misc_feature: MA Experiment 20000626 PARAMETER Experiment Name: Zm_Herbicide-Treatments_P Parameter: Treatment Value: Roundup vs. No Treatment
gcacgagaccattacctagaacatcctaatcgaaaacctaatcaaaaacagaatctctaattctctcaactcaaaaccctaacatccgtccccactccccaatcaacctgccgccgcccgccagcaccaaacttccatccgccccgagctctgcctccgccgccgccgcgccatgaggcctctcgacgagaaggagacgactcaggtattcgagaagctgttcaagttcacggggcccaacctgaagcacctcctggagcgccccgcagtggagggccccgacgcggagcccggccgctactgcctccggcttcaccgcaatcgcgtctactacgcctccgaggcgctcgtgcgccgcggccaccgccgtgtcccgaccgcgcctcgccggcgtggggacgcccatcggcaagttcacccaccacggcgcgttccaccttacggtccacgcgctcgacctcctcgctgcgcacgcgcgccgccgcgtctggctaaagcccgacaccgagcgttcctttctctttggcaactccgtgcccaagtcttctctcgctcgcatcaccgagaacaccaaggccggggacggggtggtcgtcatgtccatggctgacgtcccgctcgggttcggcattgcggcgaggtcggcgcaggattgcaggaaggccgacaccaacgccgtggtcgtgctgcaccagtcggacgccggggagtacctccgcaaggaggaggagctcatgtgaggtgagcgcataggcttggctggttaggtcatattcatgagtgaattatggaagattgtgccttactgttgtgtgttccaaggcttggggcatatatatatgtactgaatgattaatcactggttatgagatgcgattattgctgttgcc

SEQ ID NO: 3403 - protein, 145 aa, Zea mays subsp. mays
  peptide (1)..(145): Ceres Seq. ID no. 12595103
  misc_feature (1)..(62): Pfam Name: Uncharacterised protein family (UPF0113) Pfam Description: Uncharacterised protein family (UPF0113)
  misc_feature (1)..(62): Homolog of NCBI NO: 22831121 NR Description: putative 60S ribosome subunit biogenesis protein
  misc_feature (1)..(61): Homolog of NCBI NO: 20301988 NR Description: Saccharomyces cerevisiae Nip7p homolog [Rattus
  misc_feature (1)..(61): Homolog of NCBI NO: 7705437 NR Description: hypothetical protein HSPC031 [Homo sapiens]
  misc_feature (1)..(61): Homolog of NCBI NO: 12852038 NR Description: unnamed protein product [Mus musculus]
  misc_feature (1)..(61): Homolog of NCBI NO: 13928674 NR Description: RIKEN cDNA 1110017C15 [Mus musculus]
  misc_feature (1)..(62): Homolog of NCBI NO: 17506003 NR Description: 60S ribosome biogenesis (20.1 kD) [Caenorhabditis
  misc_feature (1)..(62): Homolog of NCBI NO: 39589582 NR Description: Hypothetical protein CBG12182 [Caenorhabditis
  misc_feature (1)..(61): Homolog of NCBI NO: 34876605 NR Description: similar to Saccharomyces cerevisiae Nip7p homolog
  misc_feature (1)..(61): Homolog of NCBI NO: 19075218 NR Description: putative protein involved in 60S ribosome subunit [Schizosaccharomyces pombe] >gi|7492919|pir||T41300 protein
  misc_feature (1)..(61): Homolog of NCBI NO: 6841580 NR Description: HSPC180 [Homo sapiens]
MRPLDEKETTQVFEKLFKFTGPNLKHLLERPAVEGPDAEPGRYCLRLHRNRVYYASEALVRRGHRRVPTAPRRRGDAHRQVHPPRRVPPYGPRARPPRCARAPPRLAKARHRAFLSLWQLRAQVFSRSHHREHQGRGRGGRHVHG

SEQ ID NO: 3404 - DNA, 872 bp, Zea mays subsp. mays
  misc_feature (1)..(872): Ceres Seq. ID no. 12406168
  misc_feature: MA Experiment ID: 108504 Result: Up-regulated in Transcription
  misc_feature: MA Experiment 108504 PARAMETER Experiment Name: Zm_Drought_P Parameter: Age (day) Value: 8
  misc_feature: MA Experiment 108504 PARAMETER Experiment Name: Zm_Drought_P Parameter: Organism Value: Zea mays
  misc_feature: MA Experiment 108504 PARAMETER Experiment Name: Zm_Drought_P Parameter: Plant Line Value: 35A19
  misc_feature: MA Experiment 108504 PARAMETER Experiment Name: Zm_Drought_P Parameter: Timepoint (hr) Value: 12
  misc_feature: MA Experiment 108504 PARAMETER Experiment Name: Zm_Drought_P Parameter: Tissue Value: Aerial
  misc_feature: MA Experiment 108504 PARAMETER Experiment Name: Zm_Drought_P Parameter: Treatment Value: Drought vs. No Drought
  misc_feature: MA Experiment ID: 108522 Result: Up-regulated in Transcription
  misc_feature: MA Experiment 108522 PARAMETER Experiment Name: Zm_42deg_Heat_P Parameter: Age (day) Value: 8
  misc_feature: MA Experiment 108522 PARAMETER Experiment Name: Zm_42deg_Heat_P Parameter: Organism Value: Zea mays
  misc_feature: MA Experiment 108522 PARAMETER Experiment Name: Zm_42deg_Heat_P Parameter: Plant Line Value: 35A19
  misc_feature: MA Experiment 108522 PARAMETER Experiment Name: Zm_42deg_Heat_P Parameter: Temperature (deg C) Value: 42 vs. 22
  misc_feature: MA Experiment 108522 PARAMETER Experiment Name: Zm_42deg_Heat_P Parameter: Timepoint (hr) Value: 1
  misc_feature: MA Experiment 108522 PARAMETER Experiment Name: Zm_42deg_Heat_P Parameter: Tissue Value: Aerial
  misc_feature: MA Experiment ID: 108523 Result: Up-regulated in Transcription
  misc_feature: MA Experiment 108523 PARAMETER Experiment Name: Zm_42deg_Heat_P Parameter: Age (day) Value: 8
  misc_feature: MA Experiment 108523 PARAMETER Experiment Name: Zm_42deg_Heat_P Parameter: Organism Value: Zea mays
  misc_feature: MA Experiment 108523 PARAMETER Experiment Name: Zm_42deg_Heat_P Parameter: Plant Line Value: 35A19
  misc_feature: MA Experiment 108523 PARAMETER Experiment Name: Zm_42deg_Heat_P Parameter: Temperature (deg C) Value: 42 vs. 22
  misc_feature: MA Experiment 108523 PARAMETER Experiment Name: Zm_42deg_Heat_P Parameter: Timepoint (hr) Value: 6
  misc_feature: MA Experiment 108523 PARAMETER Experiment Name: Zm_42deg_Heat_P Parameter: Tissue Value: Aerial
  misc_feature: MA Experiment ID: 108526 Result: Up-regulated in Transcription
  misc_feature: MA Experiment 108526 PARAMETER Experiment Name: Zm_5mM_NO_P Parameter: Age (day) Value: 8
  misc_feature: MA Experiment 108526 PARAMETER Experiment Name: Zm_5mM_NO_P Parameter: Organism Value: Zea mays
  misc_feature: MA Experiment 108526 PARAMETER Experiment Name: Zm_5mM_NO_P Parameter: Plant Line Value: 35A19
  misc_feature: MA Experiment 108526 PARAMETER Experiment Name: Zm_5mM_NO_P Parameter: Timepoint (hr) Value: 1
  misc_feature: MA Experiment 108526 PARAMETER Experiment Name: Zm_5mM_NO_P Parameter: Tissue Value: Aerial
  misc_feature: MA Experiment 108526 PARAMETER Experiment Name: Zm_5mM_NO_P Parameter: Treatment Value: 5mM NO vs. No Treatment
  misc_feature: MA Experiment ID: 108527 Result: Up-regulated in Transcription
  misc_feature: MA Experiment 108527 PARAMETER Experiment Name: Zm_5mM_NO_P Parameter: Age (day) Value: 8
  misc_feature: MA Experiment 108527 PARAMETER Experiment Name: Zm_5mM_NO_P Parameter: Organism Value: Zea mays
  misc_feature: MA Experiment 108527 PARAMETER Experiment Name: Zm_5mM_NO_P Parameter: Plant Line Value: 35A19
  misc_feature: MA Experiment 108527 PARAMETER Experiment Name: Zm_5mM_NO_P Parameter: Timepoint (hr) Value: 6
  misc_feature: MA Experiment 108527 PARAMETER Experiment Name: Zm_5mM_NO_P Parameter: Tissue Value: Aerial
  misc_feature: MA Experiment 108527 PARAMETER Experiment Name: Zm_5mM_NO_P Parameter: Treatment Value: 5mM NO vs. No Treatment
  misc_feature: MA Experiment ID: 108529 Result: Up-regulated in Transcription
  misc_feature: MA Experiment 108529 PARAMETER Experiment Name: Zm_Imbibed_Seeds_P Parameter: Age (day) Value: 5 vs. 2
  misc_feature: MA Experiment 108529 PARAMETER Experiment Name: Zm_Imbibed_Seeds_P Parameter: Organism Value: Zea mays
  misc_feature: MA Experiment 108529 PARAMETER Experiment Name: Zm_Imbibed_Seeds_P Parameter: Plant Line Value: 35A19
  misc_feature: MA Experiment 108529 PARAMETER Experiment Name: Zm_Imbibed_Seeds_P Parameter: Tissue Value: Roots vs. Embryo
  misc_feature: MA Experiment ID: 108530 Result: Up-regulated in Transcription
  misc_feature: MA Experiment 108530 PARAMETER Experiment Name: Zm_Imbibed_Seeds_P Parameter: Age (day) Value: 6 vs. 2
  misc_feature: MA Experiment 108530 PARAMETER Experiment Name: Zm_Imbibed_Seeds_P Parameter: Organism Value: Zea mays
  misc_feature: MA Experiment 108530 PARAMETER Experiment Name: Zm_Imbibed_Seeds_P Parameter: Plant Line Value: 35A19
  misc_feature: MA Experiment 108530 PARAMETER Experiment Name: Zm_Imbibed_Seeds_P Parameter: Tissue Value: Aerial vs. Embryo
  misc_feature: MA Experiment ID: 108533 Result: Up-regulated in Transcription
  misc_feature: MA Experiment 108533 PARAMETER Experiment Name: Zm_4deg_Cold_P Parameter: Age (hr) Value: 8
  misc_feature: MA Experiment 108533 PARAMETER Experiment Name: Zm_4deg_Cold_P Parameter: Organism Value: Zea mays
  misc_feature: MA Experiment 108533 PARAMETER Experiment Name: Zm_4deg_Cold_P Parameter: Plant Line Value: 35A19
  misc_feature: MA Experiment 108533 PARAMETER Experiment Name: Zm_4deg_Cold_P Parameter: Temperature (deg C) Value: 4 vs. 22
  misc_feature: MA Experiment 108533 PARAMETER Experiment Name: Zm_4deg_Cold_P Parameter: Timepoint (hr) Value: 1
  misc_feature: MA Experiment 108533 PARAMETER Experiment Name: Zm_4deg_Cold_P Parameter: Tissue Value: Aerial
  misc_feature: MA Experiment ID: 108534 Result: Up-regulated in Transcription
  misc_feature: MA Experiment 108534 PARAMETER Experiment Name: Zm_4deg_Cold_P Parameter: Age (hr) Value: 8
  misc_feature: MA Experiment 108534 PARAMETER Experiment Name: Zm_4deg_Cold_P Parameter: Organism Value: Zea mays
  misc_feature: MA Experiment 108534 PARAMETER Experiment Name: Zm_4deg_Cold_P Parameter: Plant Line Value: 35A19
  misc_feature: MA Experiment 108534 PARAMETER Experiment Name: Zm_4deg_Cold_P Parameter: Temperature (deg C) Value: 4 vs. 22
  misc_feature: MA Experiment 108534 PARAMETER Experiment Name: Zm_4deg_Cold_P Parameter: Timepoint (hr) Value: 6
  misc_feature: MA Experiment 108534 PARAMETER Experiment Name: Zm_4deg_Cold_P Parameter: Tissue Value: Aerial
  misc_feature: MA Experiment ID: 108535 Result: Down-regulated in Transcription
  misc_feature: MA Experiment 108535 PARAMETER Experiment Name: Zm_Meristem_P Parameter: Age (day) Value: 8
  misc_feature: MA Experiment 108535 PARAMETER Experiment Name: Zm_Meristem_P Parameter: Organism Value: Zea mays
  misc_feature: MA Experiment 108535 PARAMETER Experiment Name: Zm_Meristem_P Parameter: Plant Line Value: 35A19
  misc_feature: MA Experiment 108535 PARAMETER Experiment Name: Zm_Meristem_P Parameter: Tissue Value: Root Meristem vs. Above Root Meristem
  misc_feature: MA Experiment ID: 108543 Result: Up-regulated in Transcription
  misc_feature: MA Experiment ID: 108547 Result: Up-regulated in Transcription
  misc_feature: MA Experiment 108547 PARAMETER Experiment Name: Zm_Imbibed_Seeds_P Parameter: Age (day) Value: 4 vs. 2
  misc_feature: MA Experiment 108547 PARAMETER Experiment Name: Zm_Imbibed_Seeds_P Parameter: Organism Value: Zea mays
  misc_feature: MA Experiment 108547 PARAMETER Experiment Name: Zm_Imbibed_Seeds_P Parameter: Plant Line Value: 35A19
  misc_feature: MA Experiment 108547 PARAMETER Experiment Name: Zm_Imbibed_Seeds_P Parameter: Tissue Value: Aerial vs. Embryo
  misc_feature: MA Experiment ID: 108688 Result: Down-regulated in Transcription
  misc_feature: MA Experiment 108688 PARAMETER Experiment Name: Zm_Embryos-Flowers__P Parameter: Tissue Value: Immature Flowers vs. Aerial+
  misc_feature: MA Experiment ID: 20000478 Result: Up-regulated in Transcription
  misc_feature: MA Experiment 20000478 PARAMETER Experiment Name: Zm_5mM_SA_P Parameter: Age (day) Value: 11
  misc_feature: MA Experiment 20000478 PARAMETER Experiment Name: Zm_5mM_SA_P Parameter: Organism Value: Zea mays
  misc_feature: MA Experiment 20000478 PARAMETER Experiment Name: Zm_5mM_SA_P Parameter: Plant Line Value: 35A19
  misc_feature: MA Experiment 20000478 PARAMETER Experiment Name: Zm_5mM_SA_P Parameter: Timepoint (hr) Value: 72
  misc_feature: MA Experiment 20000478 PARAMETER Experiment Name: Zm_5mM_SA_P Parameter: Tissue Value: Aerial
  misc_feature: MA Experiment 20000478 PARAMETER Experiment Name: Zm_5mM_SA_P Parameter: Treatment Value: 5mM SA vs. No Treatment
  misc_feature: MA Experiment ID: 20000479 Result: Up-regulated in Transcription
  misc_feature: MA Experiment 20000479 PARAMETER Experiment Name: Zm_Drought_P Parameter: Age (day) Value: 10
  misc_feature: MA Experiment 20000479 PARAMETER Experiment Name: Zm_Drought_P Parameter: Organism Value: Zea mays
  misc_feature: MA Experiment 20000479 PARAMETER Experiment Name: Zm_Drought_P Parameter: Plant Line Value: 35A19
  misc_feature: MA Experiment 20000479 PARAMETER Experiment Name: Zm_Drought_P Parameter: Timepoint (hr) Value: 48
  misc_feature: MA Experiment 20000479 PARAMETER Experiment Name: Zm_Drought_P Parameter: Tissue Value: Aerial
  misc_feature: MA Experiment 20000479 PARAMETER Experiment Name: Zm_Drought_P Parameter: Treatment Value: Drought vs. No Drought
  misc_feature: MA Experiment ID: 20000492 Result: Down-regulated in Transcription
  misc_feature: MA Experiment 20000492 PARAMETER Experiment Name: Zm_Hybrid_Seed_Dev_P Parameter: DAP Value: 12
  misc_feature: MA Experiment 20000492 PARAMETER Experiment Name: Zm_Hybrid_Seed_Dev_P Parameter: Organism Value: Zea mays
  misc_feature: MA Experiment 20000492 PARAMETER Experiment Name: Zm_Hybrid_Seed_Dev_P Parameter: Plant Line Value: 35A19
  misc_feature: MA Experiment 20000492 PARAMETER Experiment Name: Zm_Hybrid_Seed_Dev_P Parameter: Tissue Value: Fert Kernel vs. Unfert Floret
  misc_feature: MA Experiment ID: 20000532 Result: Up-regulated in Transcription
  misc_feature: MA Experiment 20000532 PARAMETER Experiment Name: Zm_0.001percent_MeJA_P Parameter: Age (day) Value: 10
  misc_feature: MA Experiment 20000532 PARAMETER Experiment Name: Zm_0.001percent_MeJA_P Parameter: Organism Value: Zea mays
  misc_feature: MA Experiment 20000532 PARAMETER Experiment Name: Zm_0.001percent_MeJA_P Parameter: Plant Line Value: 35A19
  misc_feature: MA Experiment 20000532 PARAMETER Experiment Name: Zm_0.001percent_MeJA_P Parameter: Timepoint (hr) Value: 48
  misc_feature: MA Experiment 20000532 PARAMETER Experiment Name: Zm_0.001percent_MeJA_P Parameter: Tissue Value: Aerial
  misc_feature: MA Experiment 20000532 PARAMETER Experiment Name: Zm_0.001percent_MeJA_P Parameter: Treatment Value: 0.001percent MeJA vs. No Treatment
  misc_feature: MA Experiment ID: 20000533 Result: Up-regulated in Transcription
  misc_feature: MA Experiment 20000533 PARAMETER Experiment Name: Zm_0.001percent_MeJA_P Parameter: Age (day) Value: 11
  misc_feature: MA Experiment 20000533 PARAMETER Experiment Name: Zm_0.001percent_MeJA_P Parameter: Organism Value: Zea mays
  misc_feature: MA Experiment 20000533 PARAMETER Experiment Name: Zm_0.001percent_MeJA_P Parameter: Plant Line Value: 35A19
  misc_feature: MA Experiment 20000533 PARAMETER Experiment Name: Zm_0.001percent_MeJA_P Parameter: Timepoint (hr) Value: 72
  misc_feature: MA Experiment 20000533 PARAMETER Experiment Name: Zm_0.001percent_MeJA_P Parameter: Tissue Value: Aerial
  misc_feature: MA Experiment 20000533 PARAMETER Experiment Name: Zm_0.001percent_MeJA_P Parameter: Treatment Value: 0.001percent MeJA vs. No Treatment
  misc_feature: MA Experiment ID: 20000534 Result: Up-regulated in Transcription
  misc_feature: MA Experiment 20000534 PARAMETER Experiment Name: Zm_Hybrid_Pollen_P Parameter: Age (day) Value: 8
  misc_feature: MA Experiment 20000534 PARAMETER Experiment Name: Zm_Hybrid_Pollen_P Parameter: Organism Value: Zea mays
  misc_feature: MA Experiment 20000534 PARAMETER Experiment Name: Zm_Hybrid_Pollen_P Parameter: Plant Line Value: 35A19
  misc_feature: MA Experiment 20000534 PARAMETER Experiment Name: Zm_Hybrid_Pollen_P Parameter: Tissue Value: Pollen vs. Aerial
atccattcccacagcaccaagcaagagcaaagagcaacacaaggcaaggcagcacacgacccgcggcgacgcaacaagagaagccagcagtcgtctggatccatcgattgacatggccatggcggcggcagcggagggcaagagccggaggttcgcgctggcctgcggggtgctgagccagtacgtgaaggccgagcagcagatggcggccgccggggcccctgccccgcgcgccccggccacgacgctgagcctcatgcccggcgcggacgtcggcgccgagcaggagccggccgccgcgagggggcaggagacggccgggtccgcctccacggcggcgccgctcaccatcttctacggcggcagggtggtcgtgttcgacgacttcccggcggagaaggcagccgaggtcatgcgcctcgcagctggcgccgagcgcccggcggccccggccccggcgccggcgccgcgcgacgacctgcctatcgcccggaaggcgtcgctgcagcggttcctggccaagcgcaaggaccgcctcgtggagcgcgccccctacgcccgcccgtccccatccgaggaggcggagaaggcgaagccggcctcctggctcgggctcggcggcacggacgccgagcgcctcaacatcgcgctgtgatttggatctcggttgctacccacccggatcgaccggtggcgatttgattggctgggttcctggcttcttttgggtcttgctggattggggttggtgtggagatcggagacggaggattgtagaaacgtattcttgttttttttctctctcccttacgagagagtttggctgttaattgattcgataatagaaagatggaggatgtacaattcgtgtc

SEQ ID NO: 3405 - protein, 217 aa, Zea mays subsp. mays
  peptide (1)..(217): Ceres Seq. ID no. 12406169
  misc_feature (108)..(142): Pfam Name: ZIM motif Pfam Description: ZIM motif
  misc_feature (110)..(141): Homolog of NCBI NO: 18410737 NR Description: expressed protein
  misc_feature (144)..(203): Homolog of NCBI NO: 18410737 NR Description: expressed protein
  misc_feature (110)..(141): Homolog of NCBI NO: 21592605 NR Description: unknown [Arabidopsis thaliana]
  misc_feature (144)..(203): Homolog of NCBI NO: 21592605 NR Description: unknown [Arabidopsis thaliana]
  misc_feature (46)..(202): Homolog of NCBI NO: 37533952 NR Description: hypothetical protein [Oryza sativa (japonica
  misc_feature (42)..(206): Homolog of NCBI NO: 24960744 NR Description: Unknown protein [Oryza sativa (japonica
  misc_feature (39)..(208): Homolog of NCBI NO: 24960745 NR Description: Unknown protein [Oryza sativa (japonica
  misc_feature (43)..(205): Homolog of NCBI NO: 37533958 NR Description: unknown protein [Oryza sativa (japonica
  misc_feature (40)..(187): Homolog of NCBI NO: 37533948 NR Description: hypothetical protein [Oryza sativa (japonica
  misc_feature (45)..(208): Homolog of NCBI NO: 24960746 NR Description: Unknown protein [Oryza sativa (japonica
SIPTAPSKSKEQHKARQHTTRGDATREASSRLDPSIDMAMAAAAEGKSRRFALACGVLSQYVKAEQQMAAAGAPAPRAPATTLSLMPGADVGAEQEPAAARGQETAGSASTAAPLTIFYGGRVVVFDDFPAEKAAEVMRLAAGAERPAAPAPAPAPRDDLPIARKASLQRFLAKRKDRLVERAPYARPSPSEEAEKAKPASWLGLGGTDAERLNIAL

SEQ ID NO: 3406 - protein, 180 aa, Zea mays subsp. mays
  peptide (1)..(180): Ceres Seq. ID no. 12406170
  misc_feature (71)..(105): Pfam Name: ZIM motif Pfam Description: ZIM motif
  misc_feature (73)..(104): Homolog of NCBI NO: 18410737 NR Description: expressed protein
  misc_feature (107)..(166): Homolog of NCBI NO: 18410737 NR Description: expressed protein
  misc_feature (73)..(104): Homolog of NCBI NO: 21592605 NR Description: unknown [Arabidopsis thaliana]
  misc_feature (107)..(166): Homolog of NCBI NO: 21592605 NR Description: unknown [Arabidopsis thaliana]
  misc_feature (9)..(165): Homolog of NCBI NO: 37533952 NR Description: hypothetical protein [Oryza sativa (japonica
  misc_feature (5)..(169): Homolog of NCBI NO: 24960744 NR Description: Unknown protein [Oryza sativa (japonica
  misc_feature (2)..(171): Homolog of NCBI NO: 24960745 NR Description: Unknown protein [Oryza sativa (japonica
  misc_feature (6)..(168): Homolog of NCBI NO: 37533958 NR Description: unknown protein [Oryza sativa (japonica
  misc_feature (3)..(150): Homolog of NCBI NO: 37533948 NR Description: hypothetical protein [Oryza sativa (japonica
  misc_feature (8)..(171): Homolog of NCBI NO: 24960746 NR Description: Unknown protein [Oryza sativa (japonica
MAMAAAAEGKSRRFALACGVLSQYVKAEQQMAAAGAPAPRAPATTLSLMPGADVGAEQEPAAARGQETAGSASTAAPLTIFYGGRVVVFDDFPAEKAAEVMRLAAGAERPAAPAPAPAPRDDLPIARKASLQRFLAKRKDRLVERAPYARPSPSEEAEKAKPASWLGLGGTDAERLNIAL

SEQ ID NO: 3407 - protein, 178 aa, Zea mays subsp. mays
  peptide (1)..(178): Ceres Seq. ID no. 12406171
  misc_feature (69)..(103): Pfam Name: ZIM motif Pfam Description: ZIM motif
  misc_feature (71)..(102): Homolog of NCBI NO: 18410737 NR Description: expressed protein
  misc_feature (105)..(164): Homolog of NCBI NO: 18410737 NR Description: expressed protein
  misc_feature (71)..(102): Homolog of NCBI NO: 21592605 NR Description: unknown [Arabidopsis thaliana]
  misc_feature (105)..(164): Homolog of NCBI NO: 21592605 NR Description: unknown [Arabidopsis thaliana]
  misc_feature (7)..(163): Homolog of NCBI NO: 37533952 NR Description: hypothetical protein [Oryza sativa (japonica
  misc_feature (3)..(167): Homolog of NCBI NO: 24960744 NR Description: Unknown protein [Oryza sativa (japonica
  misc_feature (1)..(169): Homolog of NCBI NO: 24960745 NR Description: Unknown protein [Oryza sativa (japonica
  misc_feature (4)..(166): Homolog of NCBI NO: 37533958 NR Description: unknown protein [Oryza sativa (japonica
  misc_feature (1)..(148): Homolog of NCBI NO: 37533948 NR Description: hypothetical protein [Oryza sativa (japonica
  misc_feature (6)..(169): Homolog of NCBI NO: 24960746 NR Description: Unknown protein [Oryza sativa (japonica
MAAAAEGKSRRFALACGVLSQYVKAEQQMAAAGAPAPRAPATTLSLMPGADVGAEQEPAAARGQETAGSASTAAPLTIFYGGRVVVFDDFPAEKAAEVMRLAAGAERPAAPAPAPAPRDDLPIARKASLQRFLAKRKDRLVERAPYARPSPSEEAEKAKPASWLGLGGTDAERLNIAL

SEQ ID NO: 3408 - DNA, 1393 bp, Zea mays subsp. mays
  misc_feature (1)..(1393): Ceres Seq. ID no. 12359989
  misc_feature: MA Experiment ID: 108523 Result: Up-regulated in Transcription
  misc_feature: MA Experiment 108523 PARAMETER Experiment Name: Zm_42deg_Heat_P Parameter: Age (day) Value: 8
  misc_feature: MA Experiment 108523 PARAMETER Experiment Name: Zm_42deg_Heat_P Parameter: Organism Value: Zea mays
  misc_feature: MA Experiment 108523 PARAMETER Experiment Name: Zm_42deg_Heat_P Parameter: Plant Line Value: 35A19
  misc_feature: MA Experiment 108523 PARAMETER Experiment Name: Zm_42deg_Heat_P Parameter: Temperature (deg C) Value: 42 vs. 22
  misc_feature: MA Experiment 108523 PARAMETER Experiment Name: Zm_42deg_Heat_P Parameter: Timepoint (hr) Value: 6
  misc_feature: MA Experiment 108523 PARAMETER Experiment Name: Zm_42deg_Heat_P Parameter: Tissue Value: Aerial
  misc_feature: MA Experiment ID: 108527 Result: Down-regulated in Transcription
  misc_feature: MA Experiment 108527 PARAMETER Experiment Name: Zm_5mM_NO_P Parameter: Age (day) Value: 8
  misc_feature: MA Experiment 108527 PARAMETER Experiment Name: Zm_5mM_NO_P Parameter: Organism Value: Zea mays
  misc_feature: MA Experiment 108527 PARAMETER Experiment Name: Zm_5mM_NO_P Parameter: Plant Line Value: 35A19
  misc_feature: MA Experiment 108527 PARAMETER Experiment Name: Zm_5mM_NO_P Parameter: Timepoint (hr) Value: 6
  misc_feature: MA Experiment 108527 PARAMETER Experiment Name: Zm_5mM_NO_P Parameter: Tissue Value: Aerial
  misc_feature: MA Experiment 108527 PARAMETER Experiment Name: Zm_5mM_NO_P Parameter: Treatment Value: 5mM NO vs. No Treatment
  misc_feature: MA Experiment ID: 108535 Result: Up-regulated in Transcription
  misc_feature: MA Experiment 108535 PARAMETER Experiment Name: Zm_Meristem_P Parameter: Age (day) Value: 8
  misc_feature: MA Experiment 108535 PARAMETER Experiment Name: Zm_Meristem_P Parameter: Organism Value: Zea mays
  misc_feature: MA Experiment 108535 PARAMETER Experiment Name: Zm_Meristem_P Parameter: Plant Line Value: 35A19
  misc_feature: MA Experiment 108535 PARAMETER Experiment Name: Zm_Meristem_P Parameter: Tissue Value: Root Meristem vs. Above Root Meristem
  misc_feature: MA Experiment ID: 108543 Result: Up-regulated in Transcription
  misc_feature: MA Experiment ID: 108556 Result: Down-regulated in Transcription
  misc_feature: MA Experiment 108556 PARAMETER Experiment Name: Zm_Drought_P Parameter: Age (day) Value: 9
  misc_feature: MA Experiment 108556 PARAMETER Experiment Name: Zm_Drought_P Parameter: Organism Value: Zea mays
  misc_feature: MA Experiment 108556 PARAMETER Experiment Name: Zm_Drought_P Parameter: Plant Line Value: 35A19
  misc_feature: MA Experiment 108556 PARAMETER Experiment Name: Zm_Drought_P Parameter: Timepoint (hr) Value: 24
  misc_feature: MA Experiment 108556 PARAMETER Experiment Name: Zm_Drought_P Parameter: Tissue Value: Aerial
  misc_feature: MA Experiment 108556 PARAMETER Experiment Name: Zm_Drought_P Parameter: Treatment Value: Drought vs. No Drought
  misc_feature: MA Experiment ID: 20000108 Result: Up-regulated in Transcription
  misc_feature: MA Experiment 20000108 PARAMETER Experiment Name: Zm_Root-Tips_P Parameter: Age (day) Value: 12
  misc_feature: MA Experiment 20000108 PARAMETER Experiment Name: Zm_Root-Tips_P Parameter: Organism Value: Zea mays
  misc_feature: MA Experiment 20000108 PARAMETER Experiment Name: Zm_Root-Tips_P Parameter: Tissue Value: Root tips vs. Root mid region    35
  misc_feature: MA Experiment 20000108 PARAMETER Experiment Name: Zm_Root-Tips_P Parameter: Tissue Value: Root tips vs. Root mid region   Sequence Listing-Misc Features (4)
  misc_feature: MA Experiment ID: 20000479 Result: Down-regulated in Transcription
  misc_feature: MA Experiment 20000479 PARAMETER Experiment Name: Zm_Drought_P Parameter: Age (day) Value: 10
  misc_feature: MA Experiment 20000479 PARAMETER Experiment Name: Zm_Drought_P Parameter: Organism Value: Zea mays
  misc_feature: MA Experiment 20000479 PARAMETER Experiment Name: Zm_Drought_P Parameter: Plant Line Value: 35A19
  misc_feature: MA Experiment 20000479 PARAMETER Experiment Name: Zm_Drought_P Parameter: Timepoint (hr) Value: 48
  misc_feature: MA Experiment 20000479 PARAMETER Experiment Name: Zm_Drought_P Parameter: Tissue Value: Aerial
  misc_feature: MA Experiment 20000479 PARAMETER Experiment Name: Zm_Drought_P Parameter: Treatment Value: Drought vs. No Drought
  misc_feature: MA Experiment ID: 20000480 Result: Down-regulated in Transcription
  misc_feature: MA Experiment 20000480 PARAMETER Experiment Name: Zm_Drought_P Parameter: Age (day) Value: 11
  misc_feature: MA Experiment 20000480 PARAMETER Experiment Name: Zm_Drought_P Parameter: Organism Value: Zea mays
  misc_feature: MA Experiment 20000480 PARAMETER Experiment Name: Zm_Drought_P Parameter: Plant Line Value: 35A19
  misc_feature: MA Experiment 20000480 PARAMETER Experiment Name: Zm_Drought_P Parameter: Timepoint (hr) Value: 72
  misc_feature: MA Experiment 20000480 PARAMETER Experiment Name: Zm_Drought_P Parameter: Tissue Value: Aerial
  misc_feature: MA Experiment 20000480 PARAMETER Experiment Name: Zm_Drought_P Parameter: Treatment Value: Drought vs. No Drought
  misc_feature: MA Experiment ID: 20000492 Result: Up-regulated in Transcription
  misc_feature: MA Experiment 20000492 PARAMETER Experiment Name: Zm_Hybrid_Seed_Dev_P Parameter: DAP Value: 12
  misc_feature: MA Experiment 20000492 PARAMETER Experiment Name: Zm_Hybrid_Seed_Dev_P Parameter: Organism Value: Zea mays
  misc_feature: MA Experiment 20000492 PARAMETER Experiment Name: Zm_Hybrid_Seed_Dev_P Parameter: Plant Line Value: 35A19
  misc_feature: MA Experiment 20000492 PARAMETER Experiment Name: Zm_Hybrid_Seed_Dev_P Parameter: Tissue Value: Fert Kernel vs. Unfert Floret
  misc_feature: MA Experiment ID: 20000534 Result: Down-regulated in Transcription
  misc_feature: MA Experiment 20000534 PARAMETER Experiment Name: Zm_Hybrid_Pollen_P Parameter: Age (day) Value: 8
  misc_feature: MA Experiment 20000534 PARAMETER Experiment Name: Zm_Hybrid_Pollen_P Parameter: Organism Value: Zea mays
  misc_feature: MA Experiment 20000534 PARAMETER Experiment Name: Zm_Hybrid_Pollen_P Parameter: Plant Line Value: 35A19
  misc_feature: MA Experiment 20000534 PARAMETER Experiment Name: Zm_Hybrid_Pollen_P Parameter: Tissue Value: Pollen vs. Aerial
  misc_feature: MA Experiment ID: 20000535 Result: Up-regulated in Transcription
  misc_feature: MA Experiment 20000535 PARAMETER Experiment Name: Zm_Hybrid_Seed_Dev_P Parameter: DAP Value: 30 vs. 12
  misc_feature: MA Experiment 20000535 PARAMETER Experiment Name: Zm_Hybrid_Seed_Dev_P Parameter: Organism Value: Zea mays
  misc_feature: MA Experiment 20000535 PARAMETER Experiment Name: Zm_Hybrid_Seed_Dev_P Parameter: Plant Line Value: 35A19
  misc_feature: MA Experiment 20000535 PARAMETER Experiment Name: Zm_Hybrid_Seed_Dev_P Parameter: Tissue Value: Embryo vs. Unfert Floret
  misc_feature: MA Experiment ID: 20000626 Result: Down-regulated in Transcription
  misc_feature: MA Experiment 20000626 PARAMETER Experiment Name: Zm_Herbicide-Treatments_P Parameter: Timepoint (hr) Value: 12
  misc_feature: MA Experiment 20000626 PARAMETER Experiment Name: Zm_Herbicide-Treatments_P Parameter: Tissue Value: Aerial
  misc_feature: MA Experiment 20000626 PARAMETER Experiment Name: Zm_Herbicide-Treatments_P Parameter: Treatment Value: Roundup vs. No Treatment
aatcctaccaggcaccactcgcatcgtgtgctcagtcagatccccgtcccgcatttcctaaggccagctgctggtgtgcagatggtggctgcacgcccttgcatttcggcctcgccaggaattcttaccgcacgggtagcagtttctaggactgattgcatgctcagttaccactgctacattccccaaaatcagctgctcctggcctctaaggtttaagcgcaatgatgttgttgtaagagcaatatcggaagagtgtggcccgcaggggcttcccattgatctcagaggtaaaagggcattcattgctggagttgctgatgataatggctatggatgggcaattgcgaaggcacttgctgcggctggtgctgaaattcttgtgggtacatgggtgccggcacttaacatatttgagacaagtctgaggcgtggaaagtttgatgaatcacggaagctgccagatggatctcttatggatattgttaaagtctatccacttgatgctgtctacgattcccctgatgatgttcctgaagatgtcaaatcgaacaaaagatatgcaggggcatcaaactggacagtaaaggaagttgttgaatcagtgaggaatgattttggcagcattgacatactagtgcattctcttgctaatggcccagaggtaacgaagcctttgttggaaacctcaagaagaggctatcttgcggcaatttctgcatccagttactcctatgtttcattgcttcagcacttccttcctataatgaatcccggtggtgctagcatctctctaacatacattgcatctgaaagggcgattcctgggtatggtggtgggatgagttctgctaaagcagctcttgagagtgatacacgggtgcttgcattcgaagctgggcgaaaaggcaaaatcagagttaacaccatatcagcaggccctcttgggagccgagctgctaaggcaattggatttattgagaagatgatagagtactcatatgttaatgcaccattgcagaaggagctgttggctgatgaggtggggaacacagctgcattcctggtttcttcattggcttctgccatcaccggctcgactgtttatgttgacaatgggctcaatacaatggggcttgcaattgacagccctaccataacgtcatagatgtggttgtggtagatagacgacctttcctgctgcattgcggtatcatccttgaataaagatcatagttagttattagtatgagaggtaagggcaggaaagggggaaaattatgaactggtcttttgcgctttctttgctggagaggaacattagagcgatttccagaatgatgggatgctattatgtgatttcatatgattcagaagcagtacaataactccc

SEQ ID NO: 3409 - protein, 230 aa, Zea mays subsp. mays
  peptide (1)..(230): Ceres Seq. ID no. 12359990
  misc_feature (1)..(226): Homolog of NCBI NO: 6573651 NR Description: Chain A, Crystal Structure Of Brassica Napus
  misc_feature (1)..(226): Homolog of NCBI NO: 99805 NR Description: enoyl-
  misc_feature (1)..(226): Homolog of NCBI NO: 1827677 NR Description: Brassica Napus Enoyl Acp ReductaseNADH BINARY
  misc_feature (1)..(226): Homolog of NCBI NO: 14422257 NR Description: enoyl-[acyl-carrier protein] reductase [Brassica
  misc_feature (1)..(226): Homolog of NCBI NO: 461461 NR Description: Enoyl-
  misc_feature (1)..(226): Homolog of NCBI NO: 14422261 NR Description: enoyl-[acyl carrier-protein] reductase [Brassica
  misc_feature (1)..(226): Homolog of NCBI NO: 14422259 NR Description: enoyl-[acyl-carrier protein] reductase [Brassica
  misc_feature (1)..(226): Homolog of NCBI NO: 14422255 NR Description: enoyl-[acyl-carrier protein] reductase [Brassica
  misc_feature (1)..(230): Homolog of NCBI NO: 7489537 NR Description: probable enoyl-
  misc_feature (1)..(230): Homolog of NCBI NO: 38637198 NR Description: putative enoyl-ACP reductase
MDIVKVYPLDAVYDSPDDVPEDVKSNKRYAGASNWTVKEVVESVRNDFGSIDILVHSLANGPEVTKPLLETSRRGYLAAISASSYSYVSLLQHFLPIMNPGGASISLTYIASERAIPGYGGGMSSAKAALESDTRVLAFEAGRKGKIRVNTISAGPLGSRAAKAIGFIEKMIEYSYVNAPLQKELLADEVGNTAAFLVSSLASAITGSTVYVDNGLNTMGLAIDSPTITS

SEQ ID NO: 3410 - protein, 133 aa, Zea mays subsp. mays
  peptide (1)..(133): Ceres Seq. ID no. 12359991
  misc_feature (1)..(129): Homolog of NCBI NO: 6573651 NR Description: Chain A, Crystal Structure Of Brassica Napus
  misc_feature (1)..(129): Homolog of NCBI NO: 99805 NR Description: enoyl-
  misc_feature (1)..(129): Homolog of NCBI NO: 1827677 NR Description: Brassica Napus Enoyl Acp ReductaseNADH BINARY
  misc_feature (1)..(129): Homolog of NCBI NO: 14422257 NR Description: enoyl-[acyl-carrier protein] reductase [Brassica
  misc_feature (1)..(129): Homolog of NCBI NO: 461461 NR Description: Enoyl-
  misc_feature (1)..(129): Homolog of NCBI NO: 14422261 NR Description: enoyl-[acyl carrier-protein] reductase [Brassica
  misc_feature (1)..(129): Homolog of NCBI NO: 14422259 NR Description: enoyl-[acyl-carrier protein] reductase [Brassica
  misc_feature (1)..(129): Homolog of NCBI NO: 14422255 NR Description: enoyl-[acyl-carrier protein] reductase [Brassica
  misc_feature (1)..(133): Homolog of NCBI NO: 7489537 NR Description: probable enoyl-
  misc_feature (1)..(133): Homolog of NCBI NO: 38637198 NR Description: putative enoyl-ACP reductase
MNPGGASISLTYIASERAIPGYGGGMSSAKAALESDTRVLAFEAGRKGKIRVNTISAGPLGSRAAKAIGFIEKMIEYSYVNAPLQKELLADEVGNTAAFLVSSLASAITGSTVYVDNGLNTMGLAIDSPTITS

SEQ ID NO: 3411 - DNA, 1725 bp, Zea mays subsp. mays
  misc_feature (1)..(1725): Ceres Seq. ID no. 12410243
  misc_feature: MA Experiment ID: 108689 Result: Up-regulated in Transcription
  misc_feature: MA Experiment 108689 PARAMETER Experiment Name: Zm_Drought_Roots_P Parameter: Age (day) Value: 9
  misc_feature: MA Experiment 108689 PARAMETER Experiment Name: Zm_Drought_Roots_P Parameter: Organism Value: Zea mays
  misc_feature: MA Experiment 108689 PARAMETER Experiment Name: Zm_Drought_Roots_P Parameter: Plant Line Value: 35A19
  misc_feature: MA Experiment 108689 PARAMETER Experiment Name: Zm_Drought_Roots_P Parameter: Timepoint (hr) Value: 24
  misc_feature: MA Experiment 108689 PARAMETER Experiment Name: Zm_Drought_Roots_P Parameter: Tissue Value: Roots
  misc_feature: MA Experiment 108689 PARAMETER Experiment Name: Zm_Drought_Roots_P Parameter: Treatment Value: Drought vs. No Drought
  misc_feature: MA Experiment ID: 20000480 Result: Up-regulated in Transcription
  misc_feature: MA Experiment 20000480 PARAMETER Experiment Name: Zm_Drought_P Parameter: Age (day) Value: 11
  misc_feature: MA Experiment 20000480 PARAMETER Experiment Name: Zm_Drought_P Parameter: Organism Value: Zea mays
  misc_feature: MA Experiment 20000480 PARAMETER Experiment Name: Zm_Drought_P Parameter: Plant Line Value: 35A19
  misc_feature: MA Experiment 20000480 PARAMETER Experiment Name: Zm_Drought_P Parameter: Timepoint (hr) Value: 72
  misc_feature: MA Experiment 20000480 PARAMETER Experiment Name: Zm_Drought_P Parameter: Tissue Value: Aerial
  misc_feature: MA Experiment 20000480 PARAMETER Experiment Name: Zm_Drought_P Parameter: Treatment Value: Drought vs. No Drought
  misc_feature: MA Experiment ID: 20000535 Result: Up-regulated in Transcription
  misc_feature: MA Experiment 20000535 PARAMETER Experiment Name: Zm_Hybrid_Seed_Dev_P Parameter: DAP Value: 30 vs. 12
  misc_feature: MA Experiment 20000535 PARAMETER Experiment Name: Zm_Hybrid_Seed_Dev_P Parameter: Organism Value: Zea mays
  misc_feature: MA Experiment 20000535 PARAMETER Experiment Name: Zm_Hybrid_Seed_Dev_P Parameter: Plant Line Value: 35A19
  misc_feature: MA Experiment 20000535 PARAMETER Experiment Name: Zm_Hybrid_Seed_Dev_P Parameter: Tissue Value: Embryo vs. Unfert Floret
aggaggtggggtgagttcgcgggtcgagcggaggagaagcttctggtggtggtggctctcgtcgtcaagcaggaggggagagaggagccggcggcggaggtgaatggcggtggagtaccactgctgctcggcggcctttttcgagcacatcgtcatcatcatcgtgctcgtgctcttcgcgggcctcatgtcgggcctcaccctgggcctcatgtcccttagcctcgtcgatctcgaggtcctcgccaagtccggcaccgagcaggatcgcaagcacgcagctaagattttacctgttgtgaagaaccagcaccttctgctatgcactcttctaatctgcaatgcggctgcaatggaggctttgcccatattccttgatagcttggtgacagcttggggtgctattttaatatcagtgacactgattctgctttttggtgagatcttaccacagtccatctgctcacattatgggctggctattggtgcctcagttgctccattagtccgtgtgcttgtttgggtctgctttcctattgcctatcctataagcaagctattggactatgtgctgggtcatggtcagacagctctcttccgtagagctgaactaaaaacacttgtcactctgcacgggaatgaggctggcaaaggtggagaattaacccatgatgaaactaccataatatcaggagctcttgaactgactgaaaagaaagctaaagatgctatgacacccttgtgtcaaacatttgcaattgatataaatgcaaaacttgacaggaatctaatgcaagaggtacttgagaaagggcatagcagagttcctgtgtattatgaaaagaaaacgaatattattggattgatattggtgaagaatttattatcagttagtgctgatgatgaggttcctataaaaagtgtaactatccgcaaaattcctcgtgttctagaagaaatgcccctctatgacatcctaaacgaatttcagaaaggtcacagccacatggctgtagtcataaggaaaaacaatccaagttaccaaccagctgaacaagctgctaatgatggtggaacttttgaggtgtccattgctattgatgataagaacaacgaaaaggtcgtgaaaaaccttccgccaccactgcaaagatggaagagctaccctaacactcagaacacatcaaatagaggaaataggcctaaaaaatggtccaaagatcaagcagacgttctgcaggtccataaagagcccttgcccacactgagcgaagatgaagaggctgttggtatcataaccatggaggatgtcatagaggagctcctgcaggaggagatatacgacgagacagacgtacatgaggaacaatgacgctggccttgcgccctccctccagctgttagaaagtgcgcttttatgcaaaacttatgtatagataggcagatacactgagagatattttagccgtagcccgtagccgttcattgtagtactataggtggctggctgtctcgagtattggtaaagactgttcggagtgcgtcgttcgttctcgtccagaacagctgggttctgggcatccggggaagaaacggaggcgttgacgcgtgtgtgtaggttcagaagaaaccccaataagataattgcgttgttatatgatgccgctcgcattattaggacgaatctgttgacatatagtcttataaattaaaaacaatgtttcg

SEQ ID NO: 3412 - protein, 422 aa, Zea mays subsp. mays
  peptide (1)..(422): Ceres Seq. ID no. 12410244
  misc_feature (14)..(191): Pfam Name: Domain of unknown function DUF21 Pfam Description: Domain of unknown function DUF21
  misc_feature (7)..(323): Homolog of NCBI NO: 15237264 NR Description: putative protein; protein id: At5g52790.1
  misc_feature (377)..(417): Homolog of NCBI NO: 22330087 NR Description: unknown protein
  misc_feature (1)..(321): Homolog of NCBI NO: 22330087 NR Description: unknown protein
  misc_feature (1)..(257): Homolog of NCBI NO: 12039276 NR Description: putative ancient conserved domain protein [Oryza
  misc_feature (1)..(151): Homolog of NCBI NO: 25411569 NR Description: hypothetical protein At2g14520 [imported] -
  misc_feature (180)..(409): Homolog of NCBI NO: 25411569 NR Description: hypothetical protein At2g14520 [imported] -
  misc_feature (29)..(421): Homolog of NCBI NO: 7487085 NR Description: hypothetical protein T16L1.190 - Arabidopsis
  misc_feature (1)..(421): Homolog of NCBI NO: 22329131 NR Description: putative protein
  misc_feature (1)..(421): Homolog of NCBI NO: 30679136 NR Description: CBS domain containing protein [Arabidopsis
  misc_feature (1)..(422): Homolog of NCBI NO: 40538933 NR Description: expressed protein [Oryza sativa (japonica
MAVEYHCCSAAFFEHIVIIIVLVLFAGLMSGLTLGLMSLSLVDLEVLAKSGTEQDRKHAAKILPVVKNQHLLLCTLLICNAAAMEALPIFLDSLVTAWGAILISVTLILLFGEILPQSICSHYGLAIGASVAPLVRVLVWVCFPIAYPISKLLDYVLGHGQTALFRRAELKTLVTLHGNEAGKGGELTHDETTIISGALELTEKKAKDAMTPLCQTFAIDINAKLDRNLMQEVLEKGHSRVPVYYEKKTNIIGLILVKNLLSVSADDEVPIKSVTIRKIPRVLEEMPLYDILNEFQKGHSHMAVVIRKNNPSYQPAEQAANDGGTFEVSIAIDDKNNEKVVKNLPPPLQRWKSYPNTQNTSNRGNRPKKWSKDQADVLQVHKEPLPTLSEDEEAVGIITMEDVIEELLQEEIYDETDVHEEQ

SEQ ID NO: 3413 - protein, 394 aa, Zea mays subsp. mays
  peptide (1)..(394): Ceres Seq. ID no. 12410245
  misc_feature (1)..(163): Pfam Name: Domain of unknown function DUF21 Pfam Description: Domain of unknown function DUF21
  misc_feature (1)..(123): Homolog of NCBI NO: 25411569 NR Description: hypothetical protein At2g14520 [imported] -
  misc_feature (152)..(381): Homolog of NCBI NO: 25411569 NR Description: hypothetical protein At2g14520 [imported] -
  misc_feature (1)..(393): Homolog of NCBI NO: 7487085 NR Description: hypothetical protein T16L1.190 - Arabidopsis
  misc_feature (1)..(295): Homolog of NCBI NO: 15237264 NR Description: putative protein; protein id: At5g52790.1
  misc_feature (1)..(293): Homolog of NCBI NO: 22330087 NR Description: unknown protein
  misc_feature (1)..(229): Homolog of NCBI NO: 12039276 NR Description: putative ancient conserved domain protein [Oryza
  misc_feature (349)..(389): Homolog of NCBI NO: 22330087 NR Description: unknown protein
  misc_feature (1)..(393): Homolog of NCBI NO: 22329131 NR Description: putative protein
  misc_feature (1)..(393): Homolog of NCBI NO: 30679136 NR Description: CBS domain containing protein [Arabidopsis
  misc_feature (1)..(394): Homolog of NCBI NO: 40538933 NR Description: expressed protein [Oryza sativa (japonica
MSGLTLGLMSLSLVDLEVLAKSGTEQDRKHAAKILPVVKNQHLLLCTLLICNAAAMEALPIFLDSLVTAWGAILISVTLILLFGEILPQSICSHYGLAIGASVAPLVRVLVWVCFPIAYPISKLLDYVLGHGQTALFRRAELKTLVTLHGNEAGKGGELTHDETTIISGALELTEKKAKDAMTPLCQTFAIDINAKLDRNLMQEVLEKGHSRVPVYYEKKTNIIGLILVKNLLSVSADDEVPIKSVTIRKIPRVLEEMPLYDILNEFQKGHSHMAVVIRKNNPSYQPAEQAANDGGTFEVSIAIDDKNNEKVVKNLPPPLQRWKSYPNTQNTSNRGNRPKKWSKDQADVLQVHKEPLPTLSEDEEAVGIITMEDVIEELLQEEIYDETDVHEEQ

SEQ ID NO: 3414 - protein, 386 aa, Zea mays subsp. mays
  peptide (1)..(386): Ceres Seq. ID no. 12410246
  misc_feature (1)..(155): Pfam Name: Domain of unknown function DUF21 Pfam Description: Domain of unknown function DUF21
  misc_feature (1)..(287): Homolog of NCBI NO: 15237264 NR Description: putative protein; protein id: At5g52790.1
  misc_feature (341)..(381): Homolog of NCBI NO: 22330087 NR Description: unknown protein
  misc_feature (1)..(285): Homolog of NCBI NO: 22330087 NR Description: unknown protein
  misc_feature (1)..(221): Homolog of NCBI NO: 12039276 NR Description: putative ancient conserved domain protein [Oryza
  misc_feature (1)..(115): Homolog of NCBI NO: 25411569 NR Description: hypothetical protein At2g14520 [imported] -
  misc_feature (144)..(373): Homolog of NCBI NO: 25411569 NR Description: hypothetical protein At2g14520 [imported] -
  misc_feature (1)..(385): Homolog of NCBI NO: 7487085 NR Description: hypothetical protein T16L1.190 - Arabidopsis
  misc_feature (1)..(385): Homolog of NCBI NO: 22329131 NR Description: putative protein
  misc_feature (1)..(385): Homolog of NCBI NO: 30679136 NR Description: CBS domain containing protein [Arabidopsis
  misc_feature (1)..(386): Homolog of NCBI NO: 40538933 NR Description: expressed protein [Oryza sativa (japonica
MSLSLVDLEVLAKSGTEQDRKHAAKILPVVKNQHLLLCTLLICNAAAMEALPIFLDSLVTAWGAILISVTLILLFGEILPQSICSHYGLAIGASVAPLVRVLVWVCFPIAYPISKLLDYVLGHGQTALFRRAELKTLVTLHGNEAGKGGELTHDETTIISGALELTEKKAKDAMTPLCQTFAIDINAKLDRNLMQEVLEKGHSRVPVYYEKKTNIIGLILVKNLLSVSADDEVPIKSVTIRKIPRVLEEMPLYDILNEFQKGHSHMAVVIRKNNPSYQPAEQAANDGGTFEVSIAIDDKNNEKVVKNLPPPLQRWKSYPNTQNTSNRGNRPKKWSKDQADVLQVHKEPLPTLSEDEEAVGIITMEDVIEELLQEEIYDETDVHEEQ

SEQ ID NO: 3415 - DNA, 1632 bp, Zea mays subsp. mays
  misc_feature (1)..(1632): Ceres Seq. ID no. 12410235
  misc_feature: MA Experiment ID: 108544 Result: Down-regulated in Transcription
agccctcttcctcgggaagatttcaaatccccgcggcctcttccatctcctgctcggcacggcacctccggctgcccgaaaaatttcgcacatcccagattcccgcccgctctggttcgcgccctcgtctggttcccttgccaacccggtcattcaacgtcgcagccaccccgcgcggctagggctgggactcgaggcctagggtttggctgtaagtttggtaacacgatggcgggggccgcgggggagagcagcggcgagcggcaggggacggtggagcggcggatgctgcggtcgcggtaccacgccgtgaagagcatcatcagcgatgagcgggatgagatgtcgagggcggattcggacaggttcacagccatcatccagcaggtggattgcctacacgagctcgtgcagaggcctagggagcaaatagcggatgcagaagctctgcttggcattacaaacactttggtaacttcggtgaggtcccactcaagtgaaggaatcagcccttctgatttcataacagctttactcaagaagtttgggcagcaagggaatcatgatgatgagtctgtctcattacgatggggtgatcttgggctttctgtttcacatatcttcaggcctgtgcctggatgctgtaccatgcttggtcctatgaatactgaagtaaagcaacggaaagttgtagctgtcggtaggaaacggactgcacggccaacagaaaatacctgtcctgaagagcttgctgagtcttcagaggaagtaaagacagacactgacaggaatgtcttagttatgtttgatatcctcaggcgaaagaagagcgcaaaattggaaaaccttgtgttgaataggctttcatttgcccaaacagttgaaaatgtttttgcactatctttcttagtgaaagatggtagggtggaaataactgtagatgatagcgggcatatagtacggccaaggaatgcacctgctgctagcgctatagcctcaggagaagtctcatacagtcattttgtttttagatttgacttcaaggactggaagcttatgaaagaagttgttacagagggagaagagctgttgccacataggacttcccagagcaatctttgcaacgaagaaaacgaccaaccaaatctggaggcacgtgcgcaaataacacctatcaggaaactcacccggaaccgaggattggtctttcaggatcatgtagtcgaggaaactcctgaagagaaccaagcgtctaagcgcaggcgccttttcaggaatcaagattgacctagcaattgcttggcatgagtagtgtaggcaggcaacctggcttgtgttgtatgcaaaaaattgcctgagcctgagtaacgtgtctttcactaggtctgttgtgccatgctgtcttgttcttggcacagctcgtgcttatctgaacttccagttgtgccagcggagtagagctgtaattataaattgtttgaagttctggtcacatcttgcaactacagaatggtgtttgtagggctgagtgtaactagctagcttggctcggtctggtctgggtcattaactcatttattatcatggcaagatgtgcctcgggtcagcttgttaggctgtcatagcttactg

SEQ ID NO: 3416 - protein, 428 aa, Zea mays subsp. mays
  peptide (1)..(428): Ceres Seq. ID no. 12410236
  misc_feature (216)..(372): Homolog of NCBI NO: 40741562 NR Description: hypothetical protein AN4710.2 [Aspergillus
  misc_feature (247)..(381): Homolog of NCBI NO: 38344630 NR Description: OSJNBb0003A12.16 [Oryza sativa (japonica
  misc_feature (80)..(139): Homolog of NCBI NO: 5441894 NR Description: EST AU030111(E50640) corresponds to a region of
  misc_feature (311)..(427): Homolog of NCBI NO: 5441894 NR Description: EST AU030111(E50640) corresponds to a region of
  misc_feature (78)..(422): Homolog of NCBI NO: 28411875 NR Description: OSJNBa0016N23.27 [Oryza sativa (japonica
  misc_feature (87)..(370): Homolog of NCBI NO: 15232359 NR Description: hypothetical protein; protein id: At3g20760.1
  misc_feature (87)..(370): Homolog of NCBI NO: 9294403 NR Description: gene_id:MOE17.7~unknown protein [Arabidopsis
  misc_feature (87)..(425): Homolog of NCBI NO: 15223745 NR Description: hypothetical protein; protein id: At1g51130.1
SPLPREDFKSPRPLPSPARHGTSGCPKNFAHPRFPPALVRALVWFPCQPGHSTSQPPRAARAGTRGLGFGCKFGNTMAGAAGESSGERQGTVERRMLRSRYHAVKSIISDERDEMSRADSDRFTAIIQQVDCLHELVQRPREQIADAEALLGITNTLVTSVRSHSSEGISPSDFITALLKKFGQQGNHDDESVSLRWGDLGLSVSHIFRPVPGCCTMLGPMNTEVKQRKVVAVGRKRTARPTENTCPEELAESSEEVKTDTDRNVLVMFDILRRKKSAKLENLVLNRLSFAQTVENVFALSFLVKDGRVEITVDDSGHIVRPRNAPAASAIASGEVSYSHFVFRFDFKDWKLMKEVVTEGEELLPHRTSQSNLCNEENDQPNLEARAQITPIRKLTRNRGLVFQDHVVEETPEENQASKRRRLFRNQD

SEQ ID NO: 3417 - protein, 352 aa, Zea mays subsp. mays
  peptide (1)..(352): Ceres Seq. ID no. 12410237
  misc_feature (140)..(296): Homolog of NCBI NO: 40741562 NR Description: hypothetical protein AN4710.2 [Aspergillus
  misc_feature (171)..(305): Homolog of NCBI NO: 38344630 NR Description: OSJNBb0003A12.16 [Oryza sativa (japonica
  misc_feature (4)..(63): Homolog of NCBI NO: 5441894 NR Description: EST AU030111(E50640) corresponds to a region of
  misc_feature (235)..(351): Homolog of NCBI NO: 5441894 NR Description: EST AU030111(E50640) corresponds to a region of
  misc_feature (2)..(346): Homolog of NCBI NO: 28411875 NR Description: OSJNBa0016N23.27 [Oryza sativa (japonica
  misc_feature (11)..(294): Homolog of NCBI NO: 15232359 NR Description: hypothetical protein; protein id: At3g20760.1
  misc_feature (11)..(294): Homolog of NCBI NO: 9294403 NR Description: gene_id:MOE17.7~unknown protein [Arabidopsis
  misc_feature (11)..(349): Homolog of NCBI NO: 15223745 NR Description: hypothetical protein; protein id: At1g51130.1
MAGAAGESSGERQGTVERRMLRSRYHAVKSIISDERDEMSRADSDRFTAIIQQVDCLHELVQRPREQIADAEALLGITNTLVTSVRSHSSEGISPSDFITALLKKFGQQGNHDDESVSLRWGDLGLSVSHIFRPVPGCCTMLGPMNTEVKQRKVVAVGRKRTARPTENTCPEELAESSEEVKTDTDRNVLVMFDILRRKKSAKLENLVLNRLSFAQTVENVFALSFLVKDGRVEITVDDSGHIVRPRNAPAASAIASGEVSYSHFVFRFDFKDWKLMKEVVTEGEELLPHRTSQSNLCNEENDQPNLEARAQITPIRKLTRNRGLVFQDHVVEETPEENQASKRRRLFRNQD

SEQ ID NO: 3418 - protein, 333 aa, Zea mays subsp. mays
  peptide (1)..(333): Ceres Seq. ID no. 12410238
  misc_feature (121)..(277): Homolog of NCBI NO: 40741562 NR Description: hypothetical protein AN4710.2 [Aspergillus
  misc_feature (152)..(286): Homolog of NCBI NO: 38344630 NR Description: OSJNBb0003A12.16 [Oryza sativa (japonica
  misc_feature (1)..(44): Homolog of NCBI NO: 5441894 NR Description: EST AU030111(E50640) corresponds to a region of
  misc_feature (216)..(332): Homolog of NCBI NO: 5441894 NR Description: EST AU030111(E50640) corresponds to a region of
  misc_feature (1)..(327): Homolog of NCBI NO: 28411875 NR Description: OSJNBa0016N23.27 [Oryza sativa (japonica
  misc_feature (1)..(275): Homolog of NCBI NO: 15232359 NR Description: hypothetical protein; protein id: At3g20760.1
  misc_feature (1)..(275): Homolog of NCBI NO: 9294403 NR Description: gene_id:MOE17.7~unknown protein [Arabidopsis
  misc_feature (1)..(330): Homolog of NCBI NO: 15223745 NR Description: hypothetical protein; protein id: At1g51130.1
MLRSRYHAVKSIISDERDEMSRADSDRFTAIIQQVDCLHELVQRPREQIADAEALLGITNTLVTSVRSHSSEGISPSDFITALLKKFGQQGNHDDESVSLRWGDLGLSVSHIFRPVPGCCTMLGPMNTEVKQRKVVAVGRKRTARPTENTCPEELAESSEEVKTDTDRNVLVMFDILRRKKSAKLENLVLNRLSFAQTVENVFALSFLVKDGRVEITVDDSGHIVRPRNAPAASAIASGEVSYSHFVFRFDFKDWKLMKEVVTEGEELLPHRTSQSNLCNEENDQPNLEARAQITPIRKLTRNRGLVFQDHVVEETPEENQASKRRRLFRNQD

SEQ ID NO: 3419 - DNA, 711 bp, Zea mays subsp. mays
  misc_feature (1)..(711): Ceres Seq. ID no. 12345309
  misc_feature: MA Experiment ID: 20000534 Result: Down-regulated in Transcription
  misc_feature: MA Experiment 20000534 PARAMETER Experiment Name: Zm_Hybrid_Pollen_P Parameter: Age (day) Value: 8
  misc_feature: MA Experiment 20000534 PARAMETER Experiment Name: Zm_Hybrid_Pollen_P Parameter: Organism Value: Zea mays
  misc_feature: MA Experiment 20000534 PARAMETER Experiment Name: Zm_Hybrid_Pollen_P Parameter: Plant Line Value: 35A19
  misc_feature: MA Experiment 20000534 PARAMETER Experiment Name: Zm_Hybrid_Pollen_P Parameter: Tissue Value: Pollen vs. Aerial
cccgtctaggcgacgacgacgacgaagcagcgggaggagcataagcgccgccgatcccgagcctccgagcgtgttctcccctcatcctccgcctcgtgccgcagatccctacgtactccgcccgccagccatggcccgctcctcctcgcagtcgcagtcctccgttggcgccggcgccggcgccggcgcgcgcccggccaccgtcgggccgcgcggcacggccgcggcggccgccgggatgcgccgccgccgcgccaccgcgtccggcgggggtggcggattctcggggggcggcgggagcaacatgctccgcttctacaccgacgaggcgccggggctccggctctcgcctaccatggtgctcgtcatgtcgctctgcttcatcggcttcgtcaccgccctccacatcttcggcaagctctaccgctcccggacggccgcggcctccgcgtgatccgatccgatccgaccgctcttgctcccacacatcggatcagacagacagatcagacggtgaaggttttggtttttgggtgatgaatttgtgtatggcgagacgcgcagcttgttgtgttgcctagcttttggttggtccttactttcgatctgcagatggaaaccctagtactggtcaacttaatgcgccctttctgttattttcttcccttgctttgagaattattactggaataactatgactagtttcttcc

SEQ ID NO: 3420 - protein, 150 aa, Zea mays subsp. mays
  peptide (1)..(150): Ceres Seq. ID no. 12345310
  misc_feature (96)..(141): Pfam Name: Sec61beta family Pfam Description: Sec61beta family
  misc_feature (45)..(143): Homolog of NCBI NO: 21356199 NR Description: CG10130-PA [Drosophila melanogaster]
  misc_feature (59)..(143): Homolog of NCBI NO: 27370895 NR Description: Similar to protein translocation complex beta
  misc_feature (51)..(143): Homolog of NCBI NO: 31212591 NR Description: ENSANGP00000022309 [Anopheles gambiae]
  misc_feature (38)..(143): Homolog of NCBI NO: 31226926 NR Description: ENSANGP00000014901 [Anopheles gambiae]
  misc_feature (71)..(141): Homolog of NCBI NO: 26450635 NR Description: putative transport protein subunit [Arabidopsis
  misc_feature (71)..(141): Homolog of NCBI NO: 15232357 NR Description: transport protein subunit - like; protein id:
  misc_feature (71)..(143): Homolog of NCBI NO: 34914212 NR Description: P0697C12.13 [Oryza sativa (japonica
  misc_feature (71)..(141): Homolog of NCBI NO: 15225401 NR Description: putative transport protein SEC61 beta-subunit
  misc_feature (44)..(147): Homolog of NCBI NO: 15239337 NR Description: protein transport protein subunit - like; protein
PSRRRRRRSSGRSISAADPEPPSVFSPHPPPRAADPYVLRPPAMARSSSQSQSSVGAGAGAGARPATVGPRGTAAAAAGMRRRRATASGGGGGFSGGGGSNMLRFYTDEAPGLRLSPTMVLVMSLCFIGFVTALHIFGKLYRSRTAAASA

SEQ ID NO: 3421 - protein, 107 aa, Zea mays subsp. mays
  peptide (1)..(107): Ceres Seq. ID no. 12345311
  misc_feature (53)..(98): Pfam Name: Sec61beta family Pfam Description: Sec61beta family
  misc_feature (2)..(100): Homolog of NCBI NO: 21356199 NR Description: CG10130-PA [Drosophila melanogaster]
  misc_feature (16)..(100): Homolog of NCBI NO: 27370895 NR Description: Similar to protein translocation complex beta
  misc_feature (8)..(100): Homolog of NCBI NO: 31212591 NR Description: ENSANGP00000022309 [Anopheles gambiae]
  misc_feature (1)..(100): Homolog of NCBI NO: 31226926 NR Description: ENSANGP00000014901 [Anopheles gambiae]
  misc_feature (28)..(98): Homolog of NCBI NO: 26450635 NR Description: putative transport protein subunit [Arabidopsis
  misc_feature (28)..(98): Homolog of NCBI NO: 15232357 NR Description: transport protein subunit - like; protein id:
  misc_feature (28)..(100): Homolog of NCBI NO: 34914212 NR Description: P0697C12.13 [Oryza sativa (japonica
  misc_feature (28)..(98): Homolog of NCBI NO: 15225401 NR Description: putative transport protein SEC61 beta-subunit
  misc_feature (1)..(104): Homolog of NCBI NO: 15239337 NR Description: protein transport protein subunit - like; protein
MARSSSQSQSSVGAGAGAGARPATVGPRGTAAAAAGMRRRRATASGGGGGFSGGGGSNMLRFYTDEAPGLRLSPTMVLVMSLCFIGFVTALHIFGKLYRSRTAAASA

SEQ ID NO: 3422 - DNA, 1751 bp, Zea mays subsp. mays
  misc_feature (1)..(1751): Ceres Seq. ID no. 12373788
  misc_feature: MA Experiment ID: 108527 Result: Up-regulated in Transcription
  misc_feature: MA Experiment 108527 PARAMETER Experiment Name: Zm_5mM_NO_P Parameter: Age (day) Value: 8
  misc_feature: MA Experiment 108527 PARAMETER Experiment Name: Zm_5mM_NO_P Parameter: Organism Value: Zea mays
  misc_feature: MA Experiment 108527 PARAMETER Experiment Name: Zm_5mM_NO_P Parameter: Plant Line Value: 35A19
  misc_feature: MA Experiment 108527 PARAMETER Experiment Name: Zm_5mM_NO_P Parameter: Timepoint (hr) Value: 6
  misc_feature: MA Experiment 108527 PARAMETER Experiment Name: Zm_5mM_NO_P Parameter: Tissue Value: Aerial
  misc_feature: MA Experiment 108527 PARAMETER Experiment Name: Zm_5mM_NO_P Parameter: Treatment Value: 5mM NO vs. No Treatment
  misc_feature: MA Experiment ID: 108529 Result: Up-regulated in Transcription
  misc_feature: MA Experiment 108529 PARAMETER Experiment Name: Zm_Imbibed_Seeds_P Parameter: Age (day) Value: 5 vs. 2
  misc_feature: MA Experiment 108529 PARAMETER Experiment Name: Zm_Imbibed_Seeds_P Parameter: Organism Value: Zea mays
  misc_feature: MA Experiment 108529 PARAMETER Experiment Name: Zm_Imbibed_Seeds_P Parameter: Plant Line Value: 35A19
  misc_feature: MA Experiment 108529 PARAMETER Experiment Name: Zm_Imbibed_Seeds_P Parameter: Tissue Value: Roots vs. Embryo
  misc_feature: MA Experiment ID: 108534 Result: Up-regulated in Transcription
  misc_feature: MA Experiment 108534 PARAMETER Experiment Name: Zm_4deg_Cold_P Parameter: Age (hr) Value: 8
  misc_feature: MA Experiment 108534 PARAMETER Experiment Name: Zm_4deg_Cold_P Parameter: Organism Value: Zea mays
  misc_feature: MA Experiment 108534 PARAMETER Experiment Name: Zm_4deg_Cold_P Parameter: Plant Line Value: 35A19
  misc_feature: MA Experiment 108534 PARAMETER Experiment Name: Zm_4deg_Cold_P Parameter: Temperature (deg C) Value: 4 vs. 22
  misc_feature: MA Experiment 108534 PARAMETER Experiment Name: Zm_4deg_Cold_P Parameter: Timepoint (hr) Value: 6
  misc_feature: MA Experiment 108534 PARAMETER Experiment Name: Zm_4deg_Cold_P Parameter: Tissue Value: Aerial
  misc_feature: MA Experiment ID: 108535 Result: Down-regulated in Transcription
  misc_feature: MA Experiment 108535 PARAMETER Experiment Name: Zm_Meristem_P Parameter: Age (day) Value: 8
  misc_feature: MA Experiment 108535 PARAMETER Experiment Name: Zm_Meristem_P Parameter: Organism Value: Zea mays
  misc_feature: MA Experiment 108535 PARAMETER Experiment Name: Zm_Meristem_P Parameter: Plant Line Value: 35A19
  misc_feature: MA Experiment 108535 PARAMETER Experiment Name: Zm_Meristem_P Parameter: Tissue Value: Root Meristem vs. Above Root Meristem
  misc_feature: MA Experiment ID: 20000492 Result: Down-regulated in Transcription
  misc_feature: MA Experiment 20000492 PARAMETER Experiment Name: Zm_Hybrid_Seed_Dev_P Parameter: DAP Value: 12
  misc_feature: MA Experiment 20000492 PARAMETER Experiment Name: Zm_Hybrid_Seed_Dev_P Parameter: Organism Value: Zea mays
  misc_feature: MA Experiment 20000492 PARAMETER Experiment Name: Zm_Hybrid_Seed_Dev_P Parameter: Plant Line Value: 35A19
  misc_feature: MA Experiment 20000492 PARAMETER Experiment Name: Zm_Hybrid_Seed_Dev_P Parameter: Tissue Value: Fert Kernel vs. Unfert Floret
  misc_feature: MA Experiment ID: 20000535 Result: Down-regulated in Transcription
  misc_feature: MA Experiment 20000535 PARAMETER Experiment Name: Zm_Hybrid_Seed_Dev_P Parameter: DAP Value: 30 vs. 12
  misc_feature: MA Experiment 20000535 PARAMETER Experiment Name: Zm_Hybrid_Seed_Dev_P Parameter: Organism Value: Zea mays
  misc_feature: MA Experiment 20000535 PARAMETER Experiment Name: Zm_Hybrid_Seed_Dev_P Parameter: Plant Line Value: 35A19
  misc_feature: MA Experiment 20000535 PARAMETER Experiment Name: Zm_Hybrid_Seed_Dev_P Parameter: Tissue Value: Embryo vs. Unfert Floret
atccctccacgttctcagaaaagtcgtccacgcgtctataaaccacaccaatcttttggcccttcgcttctccgttctcccccaattcgccttcacctcgccgcttcctccttgaccgccaccgttgacgtcgtcttccggcgaggtagctcgccggaagacctcacctggacttttccgacgcaccctccacacactctttaaccctccggaatggccgcctgcttctagctcgtcgacgccccaatctccgcttgcttcctcgacagccccatccgcctcttctcggctctcgctacggctcctctgcctgttcgccatggcggatccgcatcaccgtctcctactccggctacgtggcgcagaacctcgccgcgtcgctcggccaccgcttctcctccgcctccgcctcgggcagccgcctcctccatgacggcgcctggcgccccttctgcatcttcacctccacccgccagcccgagcagcaccgcggcagcggcagcgaccgccatgacggaggcgactacaaccacccgaagccccaggccatcgccgccggagctcactcgttgctgctcacgcgtgcgtgcttatcgtccaagtcgccgccgccgtctcttgccgtggggctgctctcggtgcttgcgcagaggacgggaccgacgcctggaaccaccggatcggcggcttctctctcaggctcgtcgccgatttccctcggtttcaaccccacctccttcctcccgttcctgcagacagcgaggtggctcccgtgcagcgaccttgcccacctcgtcgtcttcggcaccctcttcccctccccgctcgctggcgccttcggctccccccaagaaggcgttgattggtgcttctactggttctaccggaattgcgacgagcagtggtgctggtgcagcgatgagcaggagcaactggctgtcgaggtgggtcagctcctgctccgatgacgccaagacggcgtttgcggctgtgaccgtgccacttctctacgggtcgtccctggccgagccgaagtccatcccgtccaagtccatgtacccgaccttcgatgtcggtgatcggatacttgctgagaaggtctcatacatattccgggatccagaaatttcggacatcgtgatcttccgggctcccccaggacttcaggtttatggctacagctcaggtgatgtgttcatcaagagagttgtggccaagggaggagactatgttgaagtgcgtgatggcaagctgtttgttaatggagtagttcaggatgaggattttgtgctggagccacacaactacgagatggaaccagtgcttgtgccggaaggttatgtgttcgtgttgggagacaaccgcaacaacagctttgattcccacaactggggtccacttccagtgaggaacattgtcgggagatctatcctccggtattggccaccatcgaagatcaatgatacaatttatgagcctgatgtgtcccgcctcacggtgccgtcctcgtagtagtcgctgcagtgatgctggatatccagtgtgtgtacaatgaccttatacttcgtggagcctcatttgatgagttgagctccagttccaattctctcagaatattgtctcctgagtgttccctgtaaattctctttgcctgactgatttgttttcgctgccggttggcagatgcttgttcaaagcacgggaaagtgcagtaccttgcatcttgcaatacaaactaattaaaccggttg

SEQ ID NO: 3423 - protein, 360 aa, Zea mays subsp. mays
  peptide (1)..(360): Ceres Seq. ID no. 12373789
  misc_feature (170)..(331): Pfam Name: Signal peptidase I Pfam Description: Signal peptidase I
  misc_feature (169)..(343): Homolog of NCBI NO: 23042815 NR Description: hypothetical protein [Trichodesmium erythraeum
  misc_feature (187)..(343): Homolog of NCBI NO: 17230467 NR Description: signal peptidase I [Nostoc sp. PCC 7120]
  misc_feature (164)..(342): Homolog of NCBI NO: 16329254 NR Description: leader peptidase I [Synechocystis sp. PCC 6803]
  misc_feature (145)..(349): Homolog of NCBI NO: 25082936 NR Description: chloroplast thylakoidal processing peptidase,
  misc_feature (145)..(349): Homolog of NCBI NO: 30687572 NR Description: chloroplast thylakoidal processing peptidase
  misc_feature (145)..(349): Homolog of NCBI NO: 9294054 NR Description: contains similarity to signal peptidase (leader
  misc_feature (167)..(354): Homolog of NCBI NO: 21553622 NR Description: chloroplast thylakoidal processing peptidase,
  misc_feature (167)..(354): Homolog of NCBI NO: 15222236 NR Description: chloroplast thylakoidal processing peptidase,
  misc_feature (167)..(348): Homolog of NCBI NO: 30684587 NR Description: signal peptidase I -related [Arabidopsis
  misc_feature (167)..(348): Homolog of NCBI NO: 25408074 NR Description: probable signal peptidase I [imported] -
MTAPGAPSASSPPPASPSSTAAAAATAMTEATTTTRSPRPSPPELTRCCSRVRAYRPSRRRRLLPWGCSRCLRRGRDRRLEPPDRRLLSQARRRFPSVSTPPPSSRSCRQRGGSRAATLPTSSSSAPSSPPRSLAPSAPPKKALIGASTGSTGIATSSGAGAAMSRSNWLSRWVSSCSDDAKTAFAAVTVPLLYGSSLAEPKSIPSKSMYPTFDVGDRILAEKVSYIFRDPEISDIVIFRAPPGLQVYGYSSGDVFIKRVVAKGGDYVEVRDGKLFVNGVVQDEDFVLEPHNYEMEPVLVPEGYVFVLGDNRNNSFDSHNWGPLPVRNIVGRSILRYWPPSKINDTIYEPDVSRLTVPSS

SEQ ID NO: 3424 - protein, 333 aa, Zea mays subsp. mays
  peptide (1)..(333): Ceres Seq. ID no. 12373790
  misc_feature (143)..(304): Pfam Name: Signal peptidase I Pfam Description: Signal peptidase I
  misc_feature (142)..(316): Homolog of NCBI NO: 23042815 NR Description: hypothetical protein [Trichodesmium erythraeum
  misc_feature (160)..(316): Homolog of NCBI NO: 17230467 NR Description: signal peptidase I [Nostoc sp. PCC 7120]
  misc_feature (137)..(315): Homolog of NCBI NO: 16329254 NR Description: leader peptidase I [Synechocystis sp. PCC 6803]
  misc_feature (118)..(322): Homolog of NCBI NO: 25082936 NR Description: chloroplast thylakoidal processing peptidase,
  misc_feature (118)..(322): Homolog of NCBI NO: 30687572 NR Description: chloroplast thylakoidal processing peptidase
  misc_feature (118)..(322): Homolog of NCBI NO: 9294054 NR Description: contains similarity to signal peptidase (leader
  misc_feature (140)..(327): Homolog of NCBI NO: 21553622 NR Description: chloroplast thylakoidal processing peptidase,
  misc_feature (140)..(327): Homolog of NCBI NO: 15222236 NR Description: chloroplast thylakoidal processing peptidase,
  misc_feature (140)..(321): Homolog of NCBI NO: 30684587 NR Description: signal peptidase I -related [Arabidopsis
  misc_feature (140)..(321): Homolog of NCBI NO: 25408074 NR Description: probable signal peptidase I [imported] -
MTEATTTTRSPRPSPPELTRCCSRVRAYRPSRRRRLLPWGCSRCLRRGRDRRLEPPDRRLLSQARRRFPSVSTPPPSSRSCRQRGGSRAATLPTSSSSAPSSPPRSLAPSAPPKKALIGASTGSTGIATSSGAGAAMSRSNWLSRWVSSCSDDAKTAFAAVTVPLLYGSSLAEPKSIPSKSMYPTFDVGDRILAEKVSYIFRDPEISDIVIFRAPPGLQVYGYSSGDVFIKRVVAKGGDYVEVRDGKLFVNGVVQDEDFVLEPHNYEMEPVLVPEGYVFVLGDNRNNSFDSHNWGPLPVRNIVGRSILRYWPPSKINDTIYEPDVSRLTVPSS

SEQ ID NO: 3425 - protein, 197 aa, Zea mays subsp. mays
  peptide (1)..(197): Ceres Seq. ID no. 12373791
  misc_feature (7)..(168): Pfam Name: Signal peptidase I Pfam Description: Signal peptidase I
  misc_feature (4)..(191): Homolog of NCBI NO: 15222236 NR Description: chloroplast thylakoidal processing peptidase,
  misc_feature (4)..(185): Homolog of NCBI NO: 30684587 NR Description: signal peptidase I -related [Arabidopsis
  misc_feature (24)..(180): Homolog of NCBI NO: 17230467 NR Description: signal peptidase I [Nostoc sp. PCC 7120]
  misc_feature (1)..(186): Homolog of NCBI NO: 25082936 NR Description: chloroplast thylakoidal processing peptidase,
  misc_feature (1)..(186): Homolog of NCBI NO: 9294054 NR Description: contains similarity to signal peptidase (leader
  misc_feature (4)..(191): Homolog of NCBI NO: 21553622 NR Description: chloroplast thylakoidal processing peptidase,
  misc_feature (1)..(186): Homolog of NCBI NO: 30687572 NR Description: chloroplast thylakoidal processing peptidase
  misc_feature (1)..(179): Homolog of NCBI NO: 16329254 NR Description: leader peptidase I [Synechocystis sp. PCC 6803]
  misc_feature (6)..(180): Homolog of NCBI NO: 23042815 NR Description: hypothetical protein [Trichodesmium erythraeum
  misc_feature (4)..(185): Homolog of NCBI NO: 25408074 NR Description: probable signal peptidase I [imported] -
MSRSNWLSRWVSSCSDDAKTAFAAVTVPLLYGSSLAEPKSIPSKSMYPTFDVGDRILAEKVSYIFRDPEISDIVIFRAPPGLQVYGYSSGDVFIKRVVAKGGDYVEVRDGKLFVNGVVQDEDFVLEPHNYEMEPVLVPEGYVFVLGDNRNNSFDSHNWGPLPVRNIVGRSILRYWPPSKINDTIYEPDVSRLTVPSS

SEQ ID NO: 3426 - DNA, 1420 bp, Zea mays subsp. mays
  misc_feature (1)..(1420): Ceres Seq. ID no. 12344013
  misc_feature: MA Experiment ID: 108504 Result: Down-regulated in Transcription
  misc_feature: MA Experiment 108504 PARAMETER Experiment Name: Zm_Drought_P Parameter: Age (day) Value: 8
  misc_feature: MA Experiment 108504 PARAMETER Experiment Name: Zm_Drought_P Parameter: Organism Value: Zea mays
  misc_feature: MA Experiment 108504 PARAMETER Experiment Name: Zm_Drought_P Parameter: Plant Line Value: 35A19
  misc_feature: MA Experiment 108504 PARAMETER Experiment Name: Zm_Drought_P Parameter: Timepoint (hr) Value: 12
  misc_feature: MA Experiment 108504 PARAMETER Experiment Name: Zm_Drought_P Parameter: Tissue Value: Aerial
  misc_feature: MA Experiment 108504 PARAMETER Experiment Name: Zm_Drought_P Parameter: Treatment Value: Drought vs. No Drought
  misc_feature: MA Experiment ID: 108515 Result: Down-regulated in Transcription
  misc_feature: MA Experiment 108515 PARAMETER Experiment Name: Zm_2mM_SA_P Parameter: Age (day) Value: 8
  misc_feature: MA Experiment 108515 PARAMETER Experiment Name: Zm_2mM_SA_P Parameter: Organism Value: Zea mays
  misc_feature: MA Experiment 108515 PARAMETER Experiment Name: Zm_2mM_SA_P Parameter: Plant Line Value: 35A19
  misc_feature: MA Experiment 108515 PARAMETER Experiment Name: Zm_2mM_SA_P Parameter: Timepoint (hr) Value: 12
  misc_feature: MA Experiment 108515 PARAMETER Experiment Name: Zm_2mM_SA_P Parameter: Tissue Value: Aerial
  misc_feature: MA Experiment 108515 PARAMETER Experiment Name: Zm_2mM_SA_P Parameter: Treatment Value: 2mM SA vs. No Treatment
  misc_feature: MA Experiment ID: 108523 Result: Down-regulated in Transcription
  misc_feature: MA Experiment 108523 PARAMETER Experiment Name: Zm_42deg_Heat_P Parameter: Age (day) Value: 8
  misc_feature: MA Experiment 108523 PARAMETER Experiment Name: Zm_42deg_Heat_P Parameter: Organism Value: Zea mays
  misc_feature: MA Experiment 108523 PARAMETER Experiment Name: Zm_42deg_Heat_P Parameter: Plant Line Value: 35A19
  misc_feature: MA Experiment 108523 PARAMETER Experiment Name: Zm_42deg_Heat_P Parameter: Temperature (deg C) Value: 42 vs. 22
  misc_feature: MA Experiment 108523 PARAMETER Experiment Name: Zm_42deg_Heat_P Parameter: Timepoint (hr) Value: 6
  misc_feature: MA Experiment 108523 PARAMETER Experiment Name: Zm_42deg_Heat_P Parameter: Tissue Value: Aerial
  misc_feature: MA Experiment ID: 108527 Result: Down-regulated in Transcription
  misc_feature: MA Experiment 108527 PARAMETER Experiment Name: Zm_5mM_NO_P Parameter: Age (day) Value: 8
  misc_feature: MA Experiment 108527 PARAMETER Experiment Name: Zm_5mM_NO_P Parameter: Organism Value: Zea mays
  misc_feature: MA Experiment 108527 PARAMETER Experiment Name: Zm_5mM_NO_P Parameter: Plant Line Value: 35A19
  misc_feature: MA Experiment 108527 PARAMETER Experiment Name: Zm_5mM_NO_P Parameter: Timepoint (hr) Value: 6
  misc_feature: MA Experiment 108527 PARAMETER Experiment Name: Zm_5mM_NO_P Parameter: Tissue Value: Aerial
  misc_feature: MA Experiment 108527 PARAMETER Experiment Name: Zm_5mM_NO_P Parameter: Treatment Value: 5mM NO vs. No Treatment
  misc_feature: MA Experiment ID: 108535 Result: Down-regulated in Transcription
  misc_feature: MA Experiment 108535 PARAMETER Experiment Name: Zm_Meristem_P Parameter: Age (day) Value: 8
  misc_feature: MA Experiment 108535 PARAMETER Experiment Name: Zm_Meristem_P Parameter: Organism Value: Zea mays
  misc_feature: MA Experiment 108535 PARAMETER Experiment Name: Zm_Meristem_P Parameter: Plant Line Value: 35A19
  misc_feature: MA Experiment 108535 PARAMETER Experiment Name: Zm_Meristem_P Parameter: Tissue Value: Root Meristem vs. Above Root Meristem
  misc_feature: MA Experiment ID: 108536 Result: Down-regulated in Transcription
  misc_feature: MA Experiment 108536 PARAMETER Experiment Name: Zm_Meristem_P Parameter: Age (day) Value: 8
  misc_feature: MA Experiment 108536 PARAMETER Experiment Name: Zm_Meristem_P Parameter: Organism Value: Zea mays
  misc_feature: MA Experiment 108536 PARAMETER Experiment Name: Zm_Meristem_P Parameter: Plant Line Value: 35A19
  misc_feature: MA Experiment 108536 PARAMETER Experiment Name: Zm_Meristem_P Parameter: Tissue Value: Shoot Meristem vs. Above Shoot Meristem
  misc_feature: MA Experiment ID: 108540 Result: Down-regulated in Transcription
  misc_feature: MA Experiment 108540 PARAMETER Experiment Name: Zm_20percent_PEG_P Parameter: Age (day) Value: 8
  misc_feature: MA Experiment 108540 PARAMETER Experiment Name: Zm_20percent_PEG_P Parameter: Organism Value: Zea mays
  misc_feature: MA Experiment 108540 PARAMETER Experiment Name: Zm_20percent_PEG_P Parameter: Plant Line Value: 35A19
  misc_feature: MA Experiment 108540 PARAMETER Experiment Name: Zm_20percent_PEG_P Parameter: Timepoint (hr) Value: 6
  misc_feature: MA Experiment 108540 PARAMETER Experiment Name: Zm_20percent_PEG_P Parameter: Tissue Value: Aerial
  misc_feature: MA Experiment 108540 PARAMETER Experiment Name: Zm_20percent_PEG_P Parameter: Treatment Value: 20percent PEG vs. No Treatment
  misc_feature: MA Experiment ID: 108543 Result: Up-regulated in Transcription
  misc_feature: MA Experiment ID: 108556 Result: Down-regulated in Transcription
  misc_feature: MA Experiment 108556 PARAMETER Experiment Name: Zm_Drought_P Parameter: Age (day) Value: 9
  misc_feature: MA Experiment 108556 PARAMETER Experiment Name: Zm_Drought_P Parameter: Organism Value: Zea mays
  misc_feature: MA Experiment 108556 PARAMETER Experiment Name: Zm_Drought_P Parameter: Plant Line Value: 35A19
  misc_feature: MA Experiment 108556 PARAMETER Experiment Name: Zm_Drought_P Parameter: Timepoint (hr) Value: 24
  misc_feature: MA Experiment 108556 PARAMETER Experiment Name: Zm_Drought_P Parameter: Tissue Value: Aerial
  misc_feature: MA Experiment 108556 PARAMETER Experiment Name: Zm_Drought_P Parameter: Treatment Value: Drought vs. No Drought
  misc_feature: MA Experiment ID: 108559 Result: Down-regulated in Transcription
  misc_feature: MA Experiment 108559 PARAMETER Experiment Name: Zm_5mM_NO_P Parameter: Age (day) Value: 8
  misc_feature: MA Experiment 108559 PARAMETER Experiment Name: Zm_5mM_NO_P Parameter: Organism Value: Zea mays
  misc_feature: MA Experiment 108559 PARAMETER Experiment Name: Zm_5mM_NO_P Parameter: Plant Line Value: 35A19
  misc_feature: MA Experiment 108559 PARAMETER Experiment Name: Zm_5mM_NO_P Parameter: Timepoint (hr) Value: 12
  misc_feature: MA Experiment 108559 PARAMETER Experiment Name: Zm_5mM_NO_P Parameter: Tissue Value: Aerial
  misc_feature: MA Experiment 108559 PARAMETER Experiment Name: Zm_5mM_NO_P Parameter: Treatment Value: 5mM NO vs. No Treatment
  misc_feature: MA Experiment ID: 108597 Result: Down-regulated in Transcription
  misc_feature: MA Experiment 108597 PARAMETER Experiment Name: Zm_100uM_ABA_P Parameter: Age (day) Value: 9
  misc_feature: MA Experiment 108597 PARAMETER Experiment Name: Zm_100uM_ABA_P Parameter: Organism Value: Zea mays
  misc_feature: MA Experiment 108597 PARAMETER Experiment Name: Zm_100uM_ABA_P Parameter: Plant Line Value: 35A19
  misc_feature: MA Experiment 108597 PARAMETER Experiment Name: Zm_100uM_ABA_P Parameter: Timepoint (hr) Value: 24
  misc_feature: MA Experiment 108597 PARAMETER Experiment Name: Zm_100uM_ABA_P Parameter: Tissue Value: Aerial
  misc_feature: MA Experiment 108597 PARAMETER Experiment Name: Zm_100uM_ABA_P Parameter: Treatment Value: 100uM ABA vs. No Treatment
  misc_feature: MA Experiment ID: 20000477 Result: Down-regulated in Transcription
  misc_feature: MA Experiment 20000477 PARAMETER Experiment Name: Zm_5mM_SA_P Parameter: Age (day) Value: 10
  misc_feature: MA Experiment 20000477 PARAMETER Experiment Name: Zm_5mM_SA_P Parameter: Organism Value: Zea mays
  misc_feature: MA Experiment 20000477 PARAMETER Experiment Name: Zm_5mM_SA_P Parameter: Plant Line Value: 35A19
  misc_feature: MA Experiment 20000477 PARAMETER Experiment Name: Zm_5mM_SA_P Parameter: Timepoint (hr) Value: 48
  misc_feature: MA Experiment 20000477 PARAMETER Experiment Name: Zm_5mM_SA_P Parameter: Tissue Value: Aerial
  misc_feature: MA Experiment 20000477 PARAMETER Experiment Name: Zm_5mM_SA_P Parameter: Treatment Value: 5mM SA vs. No Treatment
  misc_feature: MA Experiment ID: 20000479 Result: Down-regulated in Transcription
  misc_feature: MA Experiment 20000479 PARAMETER Experiment Name: Zm_Drought_P Parameter: Age (day) Value: 10
  misc_feature: MA Experiment 20000479 PARAMETER Experiment Name: Zm_Drought_P Parameter: Organism Value: Zea mays
  misc_feature: MA Experiment 20000479 PARAMETER Experiment Name: Zm_Drought_P Parameter: Plant Line Value: 35A19
  misc_feature: MA Experiment 20000479 PARAMETER Experiment Name: Zm_Drought_P Parameter: Timepoint (hr) Value: 48
  misc_feature: MA Experiment 20000479 PARAMETER Experiment Name: Zm_Drought_P Parameter: Tissue Value: Aerial
  misc_feature: MA Experiment 20000479 PARAMETER Experiment Name: Zm_Drought_P Parameter: Treatment Value: Drought vs. No Drought
  misc_feature: MA Experiment ID: 20000480 Result: Down-regulated in Transcription
  misc_feature: MA Experiment 20000480 PARAMETER Experiment Name: Zm_Drought_P Parameter: Age (day) Value: 11
  misc_feature: MA Experiment 20000480 PARAMETER Experiment Name: Zm_Drought_P Parameter: Organism Value: Zea mays
  misc_feature: MA Experiment 20000480 PARAMETER Experiment Name: Zm_Drought_P Parameter: Plant Line Value: 35A19
  misc_feature: MA Experiment 20000480 PARAMETER Experiment Name: Zm_Drought_P Parameter: Timepoint (hr) Value: 72
  misc_feature: MA Experiment 20000480 PARAMETER Experiment Name: Zm_Drought_P Parameter: Tissue Value: Aerial
  misc_feature: MA Experiment 20000480 PARAMETER Experiment Name: Zm_Drought_P Parameter: Treatment Value: Drought vs. No Drought
  misc_feature: MA Experiment ID: 20000488 Result: Down-regulated in Transcription
  misc_feature: MA Experiment 20000488 PARAMETER Experiment Name: Zm_50mM_NH4NO3_L_to_H_P Parameter: Organism Value: Zea mays
  misc_feature: MA Experiment 20000488 PARAMETER Experiment Name: Zm_50mM_NH4NO3_L_to_H_P Parameter: Timepoint (hr) Value: 8
  misc_feature: MA Experiment 20000488 PARAMETER Experiment Name: Zm_50mM_NH4NO3_L_to_H_P Parameter: Tissue Value: Leaves
  misc_feature: MA Experiment 20000488 PARAMETER Experiment Name: Zm_50mM_NH4NO3_L_to_H_P Parameter: Treatment Value: 50mM NH4NO3 vs. 100mM Mannitol
  misc_feature: MA Experiment ID: 20000535 Result: Down-regulated in Transcription
  misc_feature: MA Experiment 20000535 PARAMETER Experiment Name: Zm_Hybrid_Seed_Dev_P Parameter: DAP Value: 30 vs. 12
  misc_feature: MA Experiment 20000535 PARAMETER Experiment Name: Zm_Hybrid_Seed_Dev_P Parameter: Organism Value: Zea mays
  misc_feature: MA Experiment 20000535 PARAMETER Experiment Name: Zm_Hybrid_Seed_Dev_P Parameter: Plant Line Value: 35A19
  misc_feature: MA Experiment 20000535 PARAMETER Experiment Name: Zm_Hybrid_Seed_Dev_P Parameter: Tissue Value: Embryo vs. Unfert Floret
  misc_feature: MA Experiment ID: 20000626 Result: Down-regulated in Transcription
  misc_feature: MA Experiment 20000626 PARAMETER Experiment Name: Zm_Herbicide-Treatments_P Parameter: Timepoint (hr) Value: 12
  misc_feature: MA Experiment 20000626 PARAMETER Experiment Name: Zm_Herbicide-Treatments_P Parameter: Tissue Value: Aerial
  misc_feature: MA Experiment 20000626 PARAMETER Experiment Name: Zm_Herbicide-Treatments_P Parameter: Treatment Value: Roundup vs. No Treatment
  misc_feature: MA Experiment ID: 20000630 Result: Down-regulated in Transcription
  misc_feature: MA Experiment 20000630 PARAMETER Experiment Name: Zm_Herbicide-Treatments_P Parameter: Timepoint (hr) Value: 4
  misc_feature: MA Experiment 20000630 PARAMETER Experiment Name: Zm_Herbicide-Treatments_P Parameter: Tissue Value: Aerial
  misc_feature: MA Experiment 20000630 PARAMETER Experiment Name: Zm_Herbicide-Treatments_P Parameter: Treatment Value: Roundup vs. No Treatment
attcaacgtagggtacattatataataataagctaatagcagcgccacgcaccgacaccaatacgccatgggttccatcatggagcaacgctgcaacaacgatcagcaggcgctgctcgacgctcagctcgagctctggcacagcacgttcgcgttcatcaagtccatggcgttcaagtcggcgctggagctcggcatcgccgacgccatccactgccacggcggcaccgccacgctcacccagatagccaccaaggccgcgctccacccgtccaagacaccgtgcctgcgcaggctcatgcgcgcgctcacagtcgccggcatcttcagcgtcgccaagaactcgtccgacgatgacggcgatcagcacgtctacggcctcactccggcctcccgacttcttgtcggctcgtcacagaacttggctccaacactgagcctcatccttaacaacgtcttcgtggccccgttccttgacctcggcacgtggttcgagagcgcgctgccggccacagacctgccgctcttcgagctgtcccaccggaagaacgtgtgggacgtcgtcggccacgacccgtccgtgagccagctcttcaacgccgggatggtcgcggatacccgcttcctcatggacatcgccgtcagggagtgcggcgacgtgtttcaggggatacgctccctggtcgacgttggcggcggccatggcgcggcggcgcaggccatctctgcggcgttccctgccatacagtgcaccgtgctggaccttgcacacgtggtcgcaaccgctcccgcttgcgctgggctcagcttcgttgctggcgacatgtttgaggccattccgccagcgaatgctgtcttcctcaagtggatcatgcacgactggggtgacactgagtgtgtcacgatactaaagaactgcaagaaagctatacctccacgagatgcaggcggcaaggtgataatagtagataccgtggttggtgcagggcctccaaaccttaagaacaaagagacacaggtcatgtctgatctcttctttatgatcgtcaacggccttgagagagatgagcaggaatggaggaacgtcatctttgaagctggtttcagtgactacataatcataccagttttaggtgttcgatcaatcatcgagctatacccctgaaatataatccagcttcctcagccggcggccagctcatcacctacatgttgaatgctttggcgtgtggatctgtgtgtgtgttttttcctttaagaacagtgtgcatgtgtgtttaataaattggtatatatagttatatactcactaaaaggatggtttatgtatgcatgtatgcaagtgttccaaccattattatgtctccaaagtgaagaagttgcgtttttcaattttaaggaatgaactccaggattttct

SEQ ID NO: 3427 - protein, 365 aa, Zea mays subsp. mays
  peptide (1)..(365): Ceres Seq. ID no. 12344014
  misc_feature (96)..(340): Pfam Name: O-methyltransferase Pfam Description: O-methyltransferase
  misc_feature (17)..(365): Homolog of NCBI NO: 38175602 NR Description: putative catechol O-methyltransferase
  misc_feature (7)..(356): Homolog of NCBI NO: 27527926 NR Description: orcinol O-methyltransferase [Rosa hybrid cultivar]
  misc_feature (7)..(356): Homolog of NCBI NO: 27527928 NR Description: orcinol O-methyltransferase [Rosa hybrid cultivar]
  misc_feature (12)..(365): Homolog of NCBI NO: 22093735 NR Description: putative o-methyltransferase
  misc_feature (5)..(365): Homolog of NCBI NO: 20514367 NR Description: orcinol O-methyltransferase [Rosa hybrid
  misc_feature (5)..(365): Homolog of NCBI NO: 20514369 NR Description: orcinol O-methyltransferase [Rosa hybrid
  misc_feature (16)..(365): Homolog of NCBI NO: 4098238 NR Description: o-methyltransferase [Triticum aestivum]
  misc_feature (6)..(365): Homolog of NCBI NO: 37530606 NR Description: putative o-methyltransferase ZRP4
  misc_feature (6)..(365): Homolog of NCBI NO: 37530600 NR Description: putative o-methyltransferase ZRP4
  misc_feature (5)..(365): Homolog of NCBI NO: 1353193 NR Description: O-METHYLTRANSFERASE ZRP4 (OMT)
MGSIMEQRCNNDQQALLDAQLELWHSTFAFIKSMAFKSALELGIADAIHCHGGTATLTQIATKAALHPSKTPCLRRLMRALTVAGIFSVAKNSSDDDGDQHVYGLTPASRLLVGSSQNLAPTLSLILNNVFVAPFLDLGTWFESALPATDLPLFELSHRKNVWDVVGHDPSVSQLFNAGMVADTRFLMDIAVRECGDVFQGIRSLVDVGGGHGAAAQAISAAFPAIQCTVLDLAHVVATAPACAGLSFVAGDMFEAIPPANAVFLKWIMHDWGDTECVTILKNCKKAIPPRDAGGKVIIVDTVVGAGPPNLKNKETQVMSDLFFMIVNGLERDEQEWRNVIFEAGFSDYIIIPVLGVRSIIELYP

SEQ ID NO: 3428 - protein, 361 aa, Zea mays subsp. mays
  peptide (1)..(361): Ceres Seq. ID no. 12344015
  misc_feature (92)..(336): Pfam Name: O-methyltransferase Pfam Description: O-methyltransferase
  misc_feature (13)..(361): Homolog of NCBI NO: 38175602 NR Description: putative catechol O-methyltransferase
  misc_feature (3)..(352): Homolog of NCBI NO: 27527926 NR Description: orcinol O-methyltransferase [Rosa hybrid cultivar]
  misc_feature (3)..(352): Homolog of NCBI NO: 27527928 NR Description: orcinol O-methyltransferase [Rosa hybrid cultivar]
  misc_feature (8)..(361): Homolog of NCBI NO: 22093735 NR Description: putative o-methyltransferase
  misc_feature (1)..(361): Homolog of NCBI NO: 20514367 NR Description: orcinol O-methyltransferase [Rosa hybrid
  misc_feature (1)..(361): Homolog of NCBI NO: 20514369 NR Description: orcinol O-methyltransferase [Rosa hybrid
  misc_feature (12)..(361): Homolog of NCBI NO: 4098238 NR Description: o-methyltransferase [Triticum aestivum]
  misc_feature (2)..(361): Homolog of NCBI NO: 37530606 NR Description: putative o-methyltransferase ZRP4
  misc_feature (2)..(361): Homolog of NCBI NO: 37530600 NR Description: putative o-methyltransferase ZRP4
  misc_feature (1)..(361): Homolog of NCBI NO: 1353193 NR Description: O-METHYLTRANSFERASE ZRP4 (OMT)
MEQRCNNDQQALLDAQLELWHSTFAFIKSMAFKSALELGIADAIHCHGGTATLTQIATKAALHPSKTPCLRRLMRALTVAGIFSVAKNSSDDDGDQHVYGLTPASRLLVGSSQNLAPTLSLILNNVFVAPFLDLGTWFESALPATDLPLFELSHRKNVWDVVGHDPSVSQLFNAGMVADTRFLMDIAVRECGDVFQGIRSLVDVGGGHGAAAQAISAAFPAIQCTVLDLAHVVATAPACAGLSFVAGDMFEAIPPANAVFLKWIMHDWGDTECVTILKNCKKAIPPRDAGGKVIIVDTVVGAGPPNLKNKETQVMSDLFFMIVNGLERDEQEWRNVIFEAGFSDYIIIPVLGVRSIIELYP

SEQ ID NO: 3429 - protein, 332 aa, Zea mays subsp. mays
  peptide (1)..(332): Ceres Seq. ID no. 12344016
  misc_feature (63)..(307): Pfam Name: O-methyltransferase Pfam Description: O-methyltransferase
  misc_feature (1)..(332): Homolog of NCBI NO: 38175602 NR Description: putative catechol O-methyltransferase
  misc_feature (1)..(323): Homolog of NCBI NO: 27527926 NR Description: orcinol O-methyltransferase [Rosa hybrid cultivar]
  misc_feature (1)..(323): Homolog of NCBI NO: 27527928 NR Description: orcinol O-methyltransferase [Rosa hybrid cultivar]
  misc_feature (1)..(332): Homolog of NCBI NO: 22093735 NR Description: putative o-methyltransferase
  misc_feature (1)..(332): Homolog of NCBI NO: 20514367 NR Description: orcinol O-methyltransferase [Rosa hybrid
  misc_feature (1)..(332): Homolog of NCBI NO: 20514369 NR Description: orcinol O-methyltransferase [Rosa hybrid
  misc_feature (1)..(332): Homolog of NCBI NO: 4098238 NR Description: o-methyltransferase [Triticum aestivum]
  misc_feature (1)..(332): Homolog of NCBI NO: 37530606 NR Description: putative o-methyltransferase ZRP4
  misc_feature (1)..(332): Homolog of NCBI NO: 37530600 NR Description: putative o-methyltransferase ZRP4
  misc_feature (1)..(332): Homolog of NCBI NO: 1353193 NR Description: O-METHYLTRANSFERASE ZRP4 (OMT)
MAFKSALELGIADAIHCHGGTATLTQIATKAALHPSKTPCLRRLMRALTVAGIFSVAKNSSDDDGDQHVYGLTPASRLLVGSSQNLAPTLSLILNNVFVAPFLDLGTWFESALPATDLPLFELSHRKNVWDVVGHDPSVSQLFNAGMVADTRFLMDIAVRECGDVFQGIRSLVDVGGGHGAAAQAISAAFPAIQCTVLDLAHVVATAPACAGLSFVAGDMFEAIPPANAVFLKWIMHDWGDTECVTILKNCKKAIPPRDAGGKVIIVDTVVGAGPPNLKNKETQVMSDLFFMIVNGLERDEQEWRNVIFEAGFSDYIIIPVLGVRSIIELYP

SEQ ID NO: 3430 - DNA, 933 bp, Zea mays subsp. mays
  misc_feature (1)..(933): Ceres Seq. ID no. 12344431
  misc_feature: MA Experiment ID: 108528 Result: Up-regulated in Transcription
  misc_feature: MA Experiment 108528 PARAMETER Experiment Name: Zm_Imbibed_Seeds_P Parameter: Age (day) Value: 5 vs. 2
  misc_feature: MA Experiment 108528 PARAMETER Experiment Name: Zm_Imbibed_Seeds_P Parameter: Organism Value: Zea mays
  misc_feature: MA Experiment 108528 PARAMETER Experiment Name: Zm_Imbibed_Seeds_P Parameter: Plant Line Value: 35A19
  misc_feature: MA Experiment 108528 PARAMETER Experiment Name: Zm_Imbibed_Seeds_P Parameter: Tissue Value: Aerial vs. Embryo
  misc_feature: MA Experiment ID: 108530 Result: Up-regulated in Transcription
  misc_feature: MA Experiment 108530 PARAMETER Experiment Name: Zm_Imbibed_Seeds_P Parameter: Age (day) Value: 6 vs. 2
  misc_feature: MA Experiment 108530 PARAMETER Experiment Name: Zm_Imbibed_Seeds_P Parameter: Organism Value: Zea mays
  misc_feature: MA Experiment 108530 PARAMETER Experiment Name: Zm_Imbibed_Seeds_P Parameter: Plant Line Value: 35A19
  misc_feature: MA Experiment 108530 PARAMETER Experiment Name: Zm_Imbibed_Seeds_P Parameter: Tissue Value: Aerial vs. Embryo
  misc_feature: MA Experiment ID: 108543 Result: Up-regulated in Transcription
  misc_feature: MA Experiment ID: 108544 Result: Up-regulated in Transcription
  misc_feature: MA Experiment ID: 108547 Result: Up-regulated in Transcription
  misc_feature: MA Experiment 108547 PARAMETER Experiment Name: Zm_Imbibed_Seeds_P Parameter: Age (day) Value: 4 vs. 2
  misc_feature: MA Experiment 108547 PARAMETER Experiment Name: Zm_Imbibed_Seeds_P Parameter: Organism Value: Zea mays
  misc_feature: MA Experiment 108547 PARAMETER Experiment Name: Zm_Imbibed_Seeds_P Parameter: Plant Line Value: 35A19
  misc_feature: MA Experiment 108547 PARAMETER Experiment Name: Zm_Imbibed_Seeds_P Parameter: Tissue Value: Aerial vs. Embryo
  misc_feature: MA Experiment ID: 20000480 Result: Down-regulated in Transcription
  misc_feature: MA Experiment 20000480 PARAMETER Experiment Name: Zm_Drought_P Parameter: Age (day) Value: 11
  misc_feature: MA Experiment 20000480 PARAMETER Experiment Name: Zm_Drought_P Parameter: Organism Value: Zea mays
  misc_feature: MA Experiment 20000480 PARAMETER Experiment Name: Zm_Drought_P Parameter: Plant Line Value: 35A19
  misc_feature: MA Experiment 20000480 PARAMETER Experiment Name: Zm_Drought_P Parameter: Timepoint (hr) Value: 72
  misc_feature: MA Experiment 20000480 PARAMETER Experiment Name: Zm_Drought_P Parameter: Tissue Value: Aerial
  misc_feature: MA Experiment 20000480 PARAMETER Experiment Name: Zm_Drought_P Parameter: Treatment Value: Drought vs. No Drought
cagtcacccaccccatccaaggccctcccaaagtcccaaaggccgccgccgcccgccagcccaccatggccgcgcagtccttcctcctcgccgccactgccgccgccaggtcccccgcggtcttcgccgctccctattcctccgcacgccctttccactcggtccacttcgtcgccggcccgtggggcgccgccgccgccagggcgctcgtcgtcgcggacgccactaagaaggccgtagccgtcctcaagggcgcgtctgaggtcgagggcgtggtcacgctcacgcaggacgacgatggacctacaactgtgaatgtccgtatcactggacttacccctggacttcatggcttccacctccacgagtttggtgatactaccaatgggtgcatatcgacaggaccacattttaatccaaacaatctgacgcacggtgcaccagaagacgaagtccgtcatgcgggtgacctgggaaacattgttgcaaatgctgagggcatagccgaggcaaccattgttgatacccagattcctttgactggcccaaattcagttgttgggagagcatttgtggttcatgagcttgaagatgatttggggaaagggggccatgagctcagcctctctactggaaatgctggtggaagactggcatgtggtgttgttggcctgactccattgtaggttgctcgccgggtgcccgggttgcagttgcagctacgctgttacatccttgccttggtggacttttgtcttcaatcgtgttattgggacagtgacctttttgtattacttggattcattccatgcatgtggtatggtgcgtaatagcctttgcaggtcgactgtataaaaagcaatatttagttgaggaaataagtgttgccacatatccaaatcgatctatgaagcactatgaacatcaaatgtc

SEQ ID NO: 3431 - protein, 227 aa, Zea mays subsp. mays
  peptide (1)..(227): Ceres Seq. ID no. 12344432
  misc_feature (22)..(227): Homolog of NCBI NO: 38073257 NR Description: superoxide dismutase [Trifolium pratense]
  misc_feature (64)..(227): Homolog of NCBI NO: 5689611 NR Description: copper/zinc superoxide dismutase [Arabidopsis
  misc_feature (67)..(227): Homolog of NCBI NO: 134683 NR Description: Superoxide dismutase [Cu-Zn], chloroplast
  misc_feature (64)..(227): Homolog of NCBI NO: 18401659 NR Description: copper/zinc superoxide dismutase (CSD2)
  misc_feature (64)..(227): Homolog of NCBI NO: 11358868 NR Description: superoxide dismutase (EC 1.15.1.1) (Cu-Zn)
  misc_feature (67)..(227): Homolog of NCBI NO: 20900 NR Description: Cu/Zn superoxide dismutase II [Pisum sativum]
  misc_feature (22)..(227): Homolog of NCBI NO: 7433305 NR Description: probable superoxide dismutase (EC 1.15.1.1)
  misc_feature (22)..(227): Homolog of NCBI NO: 7433318 NR Description: superoxide dismutase (EC 1.15.1.1) (Cu-Zn) 2,
  misc_feature (22)..(227): Homolog of NCBI NO: 14326463 NR Description: copper/zinc superoxide dismutase precursor
  misc_feature (22)..(227): Homolog of NCBI NO: 3915008 NR Description: Superoxide dismutase [Cu-Zn], chloroplast
VTHPIQGPPKVPKAAAARQPTMAAQSFLLAATAAARSPAVFAAPYSSARPFHSVHFVAGPWGAAAARALVVADATKKAVAVLKGASEVEGVVTLTQDDDGPTTVNVRITGLTPGLHGFHLHEFGDTTNGCISTGPHFNPNNLTHGAPEDEVRHAGDLGNIVANAEGIAEATIVDTQIPLTGPNSVVGRAFVVHELEDDLGKGGHELSLSTGNAGGRLACGVVGLTPL

SEQ ID NO: 3432 - protein, 206 aa, Zea mays subsp. mays
  peptide (1)..(206): Ceres Seq. ID no. 12344433
  misc_feature (1)..(206): Homolog of NCBI NO: 38073257 NR Description: superoxide dismutase [Trifolium pratense]
  misc_feature (43)..(206): Homolog of NCBI NO: 5689611 NR Description: copper/zinc superoxide dismutase [Arabidopsis
  misc_feature (46)..(206): Homolog of NCBI NO: 134683 NR Description: Superoxide dismutase [Cu-Zn], chloroplast
  misc_feature (43)..(206): Homolog of NCBI NO: 18401659 NR Description: copper/zinc superoxide dismutase (CSD2)
  misc_feature (43)..(206): Homolog of NCBI NO: 11358868 NR Description: superoxide dismutase (EC 1.15.1.1) (Cu-Zn)
  misc_feature (46)..(206): Homolog of NCBI NO: 20900 NR Description: Cu/Zn superoxide dismutase II [Pisum sativum]
  misc_feature (1)..(206): Homolog of NCBI NO: 7433305 NR Description: probable superoxide dismutase (EC 1.15.1.1)
  misc_feature (1)..(206): Homolog of NCBI NO: 7433318 NR Description: superoxide dismutase (EC 1.15.1.1) (Cu-Zn) 2,
  misc_feature (1)..(206): Homolog of NCBI NO: 14326463 NR Description: copper/zinc superoxide dismutase precursor
  misc_feature (1)..(206): Homolog of NCBI NO: 3915008 NR Description: Superoxide dismutase [Cu-Zn], chloroplast
MAAQSFLLAATAAARSPAVFAAPYSSARPFHSVHFVAGPWGAAAARALVVADATKKAVAVLKGASEVEGVVTLTQDDDGPTTVNVRITGLTPGLHGFHLHEFGDTTNGCISTGPHFNPNNLTHGAPEDEVRHAGDLGNIVANAEGIAEATIVDTQIPLTGPNSVVGRAFVVHELEDDLGKGGHELSLSTGNAGGRLACGVVGLTPL

SEQ ID NO: 3433 - DNA, 1848 bp, Zea mays subsp. mays
  misc_feature (1)..(1848): Ceres Seq. ID no. 12363175
  misc_feature: MA Experiment ID: 108687 Result: Down-regulated in Transcription
  misc_feature: MA Experiment 108687 PARAMETER Experiment Name: Zm_Embryos-Flowers__P Parameter: Tissue Value: Embryo vs. Aerial+
gcacgagaccattacctagaacatcctaatcgaaaagaggatagggaaggcatgcatgatagggacttcaaagacccaggtgagagctcagtcgacggtaatgccgccgcagctcctttagtcgccaggcgattggcatgccacggttcctggttcatctcgcagagttagtttgagttcgaggcttgtgtggtgttgctgattgcgcacaagaggtccaggaacatataggcggcggatctggctgcgttctttctgtttcgtcagagaaggggtttcagcgctgccagctttcacataaacaagttggggaagcagttgaggttttctaattcttcttggaaggattgagatctccagttctgataatgggttcttttgggatgaactggaatcagaaggaccccatggtgtgggattgggaacatctagtaccgtctgtctcaaatgcagttacaaggcacggatctgctaattcatctggtggtactcttacttctaactcagagctagggcatggttcatccaagagctctatttcagcgtccattgattcaccctctggagtagggaacagcttagagttcaacttcgccgctgttgagaggcatgttaagaacacgggcacgaacggcagagtcgatgactcggggaattctccatcgtcaatgatagctttcaaccaaggagagccattaatcagcctgaaacttgggaagagggcttacttcgaaaacgcctgcggaggacaggatgccaaggtttctgcagcttcagacgttacttctgcagccagcgtggtcaagaagactaaggtgtctcagcagaatgcaaagaactggtactgtcaggttgaagggtgcaaagttgacctgtcttctgctaaagattacaatcgcaagcacaaggtctgtgtagtccattctaaagctaccaaggtggttgttgctggtctagagcgtcggttttgtcaacagtgtagccgttttcatggtttagcggagtttgatcagaacaaacgaagctgtcgtaggcgtctgatgcatcataatgcacggaggaggaaacctcaggcagacacaatttcattcaattcatcgacaatgttttatgatacaaggcagcggacaaatcttttctttagtcaaccactttatggccaagtgaggagcaatgcagggtcttcatgggataacttgggaggcttaaaattcatggagacgaaacatccgccagtgcatccaacaaaaacagcatcccctgatgaactgcatttctcagccctccagataactagtgctgcggctcacaccgggacatcatcatgatctcgatgggttcatggcgttcaagggaaccagcacaaaggtccttaaccaaggcgtggaggcttgggcggccgcttccagctcgaacaacggaggcccagaaggtgggcgtgctctctctcttctgtcagacggctcgtggggctcgagttcagccgtcatccagcagcccacatctcacgcggacgccggtgcattgctgccgcccctcgccaccgttgccgtctccaacgccgccgccgccgccgggcatcctctggacccgtccccgggaaggttctggccgcaagacgatcatcccccgctcgtcgacggacccgccacgcagattccggagctggcgcacctccggatatggtgaaaggaaacgcatgtgatgcggtgactggtgacatgccagttcgagggcctggctgggaacacatctggttggttagcctgccgctctggcttgaatttgccggcgacgacagtctttgtttgtatcttttgatcagaacggacacagacatgtttgcgc

SEQ ID NO: 3434 - protein, 319 aa, Zea mays subsp. mays
  peptide (1)..(319): Ceres Seq. ID no. 12363176
  misc_feature (160)..(235): Pfam Name: SBP domain Pfam Description: SBP domain
  misc_feature (94)..(315): Homolog of NCBI NO: 15230904 NR Description: squamosa promoter-binding protein homolog
  misc_feature (160)..(319): Homolog of NCBI NO: 25352582 NR Description: squamosa promoter binding protein-homolog 5
  misc_feature (110)..(319): Homolog of NCBI NO: 25352584 NR Description: squamosa promoter binding protein-homolog 4
  misc_feature (1)..(276): Homolog of NCBI NO: 25403307 NR Description: protein F17L21.14 [imported] - Arabidopsis
  misc_feature (1)..(276): Homolog of NCBI NO: 18396302 NR Description: putative squamosa-promoter binding protein 2
  misc_feature (1)..(319): Homolog of NCBI NO: 18650611 NR Description: At1g27370/F17L21_16 [Arabidopsis thaliana]
  misc_feature (1)..(319): Homolog of NCBI NO: 22329813 NR Description: putative squamosa-promoter binding protein 2
  misc_feature (1)..(319): Homolog of NCBI NO: 9802546 NR Description: F17L21.15 [Arabidopsis thaliana]
  misc_feature (13)..(234): Homolog of NCBI NO: 15239820 NR Description: squamosa promoter binding protein-like 2
  misc_feature (13)..(234): Homolog of NCBI NO: 25456646 NR Description: squamosa promoter binding protein 2
MGSFGMNWNQKDPMVWDWEHLVPSVSNAVTRHGSANSSGGTLTSNSELGHGSSKSSISASIDSPSGVGNSLEFNFAAVERHVKNTGTNGRVDDSGNSPSSMIAFNQGEPLISLKLGKRAYFENACGGQDAKVSAASDVTSAASVVKKTKVSQQNAKNWYCQVEGCKVDLSSAKDYNRKHKVCVVHSKATKVVVAGLERRFCQQCSRFHGLAEFDQNKRSCRRRLMHHNARRRKPQADTISFNSSTMFYDTRQRTNLFFSQPLYGQVRSNAGSSWDNLGGLKFMETKHPPVHPTKTASPDELHFSALQITSAAAHTGTSS

SEQ ID NO: 3435 - protein, 314 aa, Zea mays subsp. mays
  peptide (1)..(314): Ceres Seq. ID no. 12363177
  misc_feature (155)..(230): Pfam Name: SBP domain Pfam Description: SBP domain
  misc_feature (89)..(310): Homolog of NCBI NO: 15230904 NR Description: squamosa promoter-binding protein homolog
  misc_feature (155)..(314): Homolog of NCBI NO: 25352582 NR Description: squamosa promoter binding protein-homolog 5
  misc_feature (105)..(314): Homolog of NCBI NO: 25352584 NR Description: squamosa promoter binding protein-homolog 4
  misc_feature (1)..(271): Homolog of NCBI NO: 25403307 NR Description: protein F17L21.14 [imported] - Arabidopsis
  misc_feature (1)..(271): Homolog of NCBI NO: 18396302 NR Description: putative squamosa-promoter binding protein 2
  misc_feature (1)..(314): Homolog of NCBI NO: 18650611 NR Description: At1g27370/F17L21_16 [Arabidopsis thaliana]
  misc_feature (1)..(314): Homolog of NCBI NO: 22329813 NR Description: putative squamosa-promoter binding protein 2
  misc_feature (1)..(314): Homolog of NCBI NO: 9802546 NR Description: F17L21.15 [Arabidopsis thaliana]
  misc_feature (8)..(229): Homolog of NCBI NO: 15239820 NR Description: squamosa promoter binding protein-like 2
  misc_feature (8)..(229): Homolog of NCBI NO: 25456646 NR Description: squamosa promoter binding protein 2
MNWNQKDPMVWDWEHLVPSVSNAVTRHGSANSSGGTLTSNSELGHGSSKSSISASIDSPSGVGNSLEFNFAAVERHVKNTGTNGRVDDSGNSPSSMIAFNQGEPLISLKLGKRAYFENACGGQDAKVSAASDVTSAASVVKKTKVSQQNAKNWYCQVEGCKVDLSSAKDYNRKHKVCVVHSKATKVVVAGLERRFCQQCSRFHGLAEFDQNKRSCRRRLMHHNARRRKPQADTISFNSSTMFYDTRQRTNLFFSQPLYGQVRSNAGSSWDNLGGLKFMETKHPPVHPTKTASPDELHFSALQITSAAAHTGTSS

SEQ ID NO: 3436 - protein, 306 aa, Zea mays subsp. mays
  peptide (1)..(306): Ceres Seq. ID no. 12363178
  misc_feature (147)..(222): Pfam Name: SBP domain Pfam Description: SBP domain
  misc_feature (1)..(306): Homolog of NCBI NO: 22329813 NR Description: putative squamosa-promoter binding protein 2
  misc_feature (1)..(306): Homolog of NCBI NO: 9802546 NR Description: F17L21.15 [Arabidopsis thaliana]
  misc_feature (81)..(302): Homolog of NCBI NO: 15230904 NR Description: squamosa promoter-binding protein homolog
  misc_feature (97)..(306): Homolog of NCBI NO: 25352584 NR Description: squamosa promoter binding protein-homolog 4
  misc_feature (1)..(263): Homolog of NCBI NO: 18396302 NR Description: putative squamosa-promoter binding protein 2
  misc_feature (1)..(306): Homolog of NCBI NO: 18650611 NR Description: At1g27370/F17L21_16 [Arabidopsis thaliana]
  misc_feature (1)..(263): Homolog of NCBI NO: 25403307 NR Description: protein F17L21.14 [imported] - Arabidopsis
  misc_feature (147)..(306): Homolog of NCBI NO: 25352582 NR Description: squamosa promoter binding protein-homolog 5
  misc_feature (1)..(221): Homolog of NCBI NO: 15239820 NR Description: squamosa promoter binding protein-like 2
  misc_feature (1)..(221): Homolog of NCBI NO: 25456646 NR Description: squamosa promoter binding protein 2
MVWDWEHLVPSVSNAVTRHGSANSSGGTLTSNSELGHGSSKSSISASIDSPSGVGNSLEFNFAAVERHVKNTGTNGRVDDSGNSPSSMIAFNQGEPLISLKLGKRAYFENACGGQDAKVSAASDVTSAASVVKKTKVSQQNAKNWYCQVEGCKVDLSSAKDYNRKHKVCVVHSKATKVVVAGLERRFCQQCSRFHGLAEFDQNKRSCRRRLMHHNARRRKPQADTISFNSSTMFYDTRQRTNLFFSQPLYGQVRSNAGSSWDNLGGLKFMETKHPPVHPTKTASPDELHFSALQITSAAAHTGTSS

SEQ ID NO: 3437 - DNA, 1471 bp, Zea mays subsp. mays
  misc_feature (1)..(1471): Ceres Seq. ID no. 12410223
  misc_feature: MA Experiment ID: 108504 Result: Up-regulated in Transcription
  misc_feature: MA Experiment 108504 PARAMETER Experiment Name: Zm_Drought_P Parameter: Age (day) Value: 8
  misc_feature: MA Experiment 108504 PARAMETER Experiment Name: Zm_Drought_P Parameter: Organism Value: Zea mays
  misc_feature: MA Experiment 108504 PARAMETER Experiment Name: Zm_Drought_P Parameter: Plant Line Value: 35A19
  misc_feature: MA Experiment 108504 PARAMETER Experiment Name: Zm_Drought_P Parameter: Timepoint (hr) Value: 12
  misc_feature: MA Experiment 108504 PARAMETER Experiment Name: Zm_Drought_P Parameter: Tissue Value: Aerial
  misc_feature: MA Experiment 108504 PARAMETER Experiment Name: Zm_Drought_P Parameter: Treatment Value: Drought vs. No Drought
  misc_feature: MA Experiment ID: 108530 Result: Up-regulated in Transcription
  misc_feature: MA Experiment 108530 PARAMETER Experiment Name: Zm_Imbibed_Seeds_P Parameter: Age (day) Value: 6 vs. 2
  misc_feature: MA Experiment 108530 PARAMETER Experiment Name: Zm_Imbibed_Seeds_P Parameter: Organism Value: Zea mays
  misc_feature: MA Experiment 108530 PARAMETER Experiment Name: Zm_Imbibed_Seeds_P Parameter: Plant Line Value: 35A19
  misc_feature: MA Experiment 108530 PARAMETER Experiment Name: Zm_Imbibed_Seeds_P Parameter: Tissue Value: Aerial vs. Embryo
  misc_feature: MA Experiment ID: 108535 Result: Down-regulated in Transcription
  misc_feature: MA Experiment 108535 PARAMETER Experiment Name: Zm_Meristem_P Parameter: Age (day) Value: 8
  misc_feature: MA Experiment 108535 PARAMETER Experiment Name: Zm_Meristem_P Parameter: Organism Value: Zea mays
  misc_feature: MA Experiment 108535 PARAMETER Experiment Name: Zm_Meristem_P Parameter: Plant Line Value: 35A19
  misc_feature: MA Experiment 108535 PARAMETER Experiment Name: Zm_Meristem_P Parameter: Tissue Value: Root Meristem vs. Above Root Meristem
  misc_feature: MA Experiment ID: 108543 Result: Down-regulated in Transcription
  misc_feature: MA Experiment ID: 108556 Result: Up-regulated in Transcription
  misc_feature: MA Experiment 108556 PARAMETER Experiment Name: Zm_Drought_P Parameter: Age (day) Value: 9
  misc_feature: MA Experiment 108556 PARAMETER Experiment Name: Zm_Drought_P Parameter: Organism Value: Zea mays
  misc_feature: MA Experiment 108556 PARAMETER Experiment Name: Zm_Drought_P Parameter: Plant Line Value: 35A19
  misc_feature: MA Experiment 108556 PARAMETER Experiment Name: Zm_Drought_P Parameter: Timepoint (hr) Value: 24
  misc_feature: MA Experiment 108556 PARAMETER Experiment Name: Zm_Drought_P Parameter: Tissue Value: Aerial
  misc_feature: MA Experiment 108556 PARAMETER Experiment Name: Zm_Drought_P Parameter: Treatment Value: Drought vs. No Drought
  misc_feature: MA Experiment ID: 20000478 Result: Up-regulated in Transcription
  misc_feature: MA Experiment 20000478 PARAMETER Experiment Name: Zm_5mM_SA_P Parameter: Age (day) Value: 11
  misc_feature: MA Experiment 20000478 PARAMETER Experiment Name: Zm_5mM_SA_P Parameter: Organism Value: Zea mays
  misc_feature: MA Experiment 20000478 PARAMETER Experiment Name: Zm_5mM_SA_P Parameter: Plant Line Value: 35A19
  misc_feature: MA Experiment 20000478 PARAMETER Experiment Name: Zm_5mM_SA_P Parameter: Timepoint (hr) Value: 72
  misc_feature: MA Experiment 20000478 PARAMETER Experiment Name: Zm_5mM_SA_P Parameter: Tissue Value: Aerial
  misc_feature: MA Experiment 20000478 PARAMETER Experiment Name: Zm_5mM_SA_P Parameter: Treatment Value: 5mM SA vs. No Treatment
  misc_feature: MA Experiment ID: 20000534 Result: Down-regulated in Transcription
  misc_feature: MA Experiment 20000534 PARAMETER Experiment Name: Zm_Hybrid_Pollen_P Parameter: Age (day) Value: 8
  misc_feature: MA Experiment 20000534 PARAMETER Experiment Name: Zm_Hybrid_Pollen_P Parameter: Organism Value: Zea mays
  misc_feature: MA Experiment 20000534 PARAMETER Experiment Name: Zm_Hybrid_Pollen_P Parameter: Plant Line Value: 35A19
  misc_feature: MA Experiment 20000534 PARAMETER Experiment Name: Zm_Hybrid_Pollen_P Parameter: Tissue Value: Pollen vs. Aerial
  misc_feature: MA Experiment ID: 20000535 Result: Down-regulated in Transcription
  misc_feature: MA Experiment 20000535 PARAMETER Experiment Name: Zm_Hybrid_Seed_Dev_P Parameter: DAP Value: 30 vs. 12
  misc_feature: MA Experiment 20000535 PARAMETER Experiment Name: Zm_Hybrid_Seed_Dev_P Parameter: Organism Value: Zea mays
  misc_feature: MA Experiment 20000535 PARAMETER Experiment Name: Zm_Hybrid_Seed_Dev_P Parameter: Plant Line Value: 35A19
  misc_feature: MA Experiment 20000535 PARAMETER Experiment Name: Zm_Hybrid_Seed_Dev_P Parameter: Tissue Value: Embryo vs. Unfert Floret
agtccacccccttcccttctttcccctttgcttgctgctgcctgcttctcgccgtcgccgcctcaattccctcctcctcgtccgtcgcctcgtccacgcgcacctcgtcctcctctccgttcccaccacctcctcgaccgcaccgtcgtcgtctagctagcggagcgagctgcgaccagatcggagagccaagcacccaggaagagggggccggggaacaagaagaagccgccggaagccgggcgtggacgtgtggtggttttctgccggcggctgacaagtggtgtaggctacccgctctggccatggatccgtcgggcggcgcgttcctgccgccgctgcagcaagggagctcctccttcccgcggtcctccagcaacgcgtcgctcgccaggagcggcagcggcggcggcggcgttggcgccgggcgcgggaccaggggcaggaagatgatgcgcagggtctgccgcggcgtcatcaccttcatcttcgccatcgctgggctgttcctgggagcggtgaccggcggtctgatcgggctggcgacggagagcggtctgttccgcggcaccgggatcggcgccatcactggcgcgctcgtctccatcgaggtcgtcgactcctccatccgcctctggcaggcgcgccgatccgggatctggagcatcctctacgtgctgaacgtgatctacagcctcctgacgggcaggctggtgcgcgagaaggtcgacccggcggtgcagcgggtggtccgcagccagatgaacgcggtggactcgtcgccgttcagggagtcgccggacctgttcgaggtggaggccaccaacggcatgccgcgggcgtccatcgacaagctccccgagtcgtggatcaccgaggagtacaggcgcgacgccgtcggcgacctctccggctgctccgtctgcctccaggatttccaggtcggggagaaggtgcggagcctgccggactgctggcacgtgttccacgtgccgtgcatcgacggctggctcatcaagcacggctcctgcccgctctgcaggaggaagctgtaggcggatcgaccggacgacgccatgaacgatgttcttctctgcgatcgagccgatgatgtgtgtgtgtgtgcccccgccgccaccaccgatagctgctgctaggatcggaggaggggaggaggaagaagagactgacatctatagaacccttaatttatagagagggcttttgctttgctacttgtacgtgctctactacgtacctattgcatcttttttttttttttgattcaccatgatcgacctccttcctcagatccatccatgcatgtaatataccctggaccggcttgtgcttcgttcgatccattccatgcatctccggactgtgatctcgatctggtgtaatatatataaaaaaactactagtatgtaccatcgcactttggacatctatacatgcatgctggttggtc

SEQ ID NO: 3438 - protein, 350 aa, Zea mays subsp. mays
  peptide (1)..(350): Ceres Seq. ID no. 12410224
  misc_feature (305)..(346): Pfam Name: Zinc finger, C3HC4 type (RING finger) Pfam Description: Zinc finger, C3HC4 type (RING finger)
  misc_feature (158)..(347): Homolog of NCBI NO: 34901682 NR Description: P0434A03.5 [Oryza sativa (japonica
  misc_feature (158)..(345): Homolog of NCBI NO: 7485279 NR Description: hypothetical protein A_TM017A05.9 - Arabidopsis
  misc_feature (154)..(345): Homolog of NCBI NO: 25411815 NR Description: hypothetical protein At2g17730 [imported] -
  misc_feature (150)..(350): Homolog of NCBI NO: 15239242 NR Description: putative protein; protein id: At5g66070.1
  misc_feature (154)..(350): Homolog of NCBI NO: 27524902 NR Description: NEP1-interacting protein [Arabidopsis thaliana]
  misc_feature (154)..(350): Homolog of NCBI NO: 30680091 NR Description: expressed protein [Arabidopsis thaliana]
  misc_feature (150)..(350): Homolog of NCBI NO: 26452210 NR Description: unknown protein [Arabidopsis thaliana]
  misc_feature (154)..(350): Homolog of NCBI NO: 26451101 NR Description: unknown protein [Arabidopsis thaliana]
  misc_feature (121)..(350): Homolog of NCBI NO: 37536572 NR Description: hypothetical protein [Oryza sativa (japonica
  misc_feature (121)..(350): Homolog of NCBI NO: 18855037 NR Description: putative zinc finger protein [Oryza sativa]
STPFPSFPFACCCLLLAVAASIPSSSSVASSTRTSSSSPFPPPPRPHRRRLASGASCDQIGEPSTQEEGAGEQEEAAGSRAWTCGGFLPAADKWCRLPALAMDPSGGAFLPPLQQGSSSFPRSSSNASLARSGSGGGGVGAGRGTRGRKMMRRVCRGVITFIFAIAGLFLGAVTGGLIGLATESGLFRGTGIGAITGALVSIEVVDSSIRLWQARRSGIWSILYVLNVIYSLLTGRLVREKVDPAVQRVVRSQMNAVDSSPFRESPDLFEVEATNGMPRASIDKLPESWITEEYRRDAVGDLSGCSVCLQDFQVGEKVRSLPDCWHVFHVPCIDGWLIKHGSCPLCRRKL

SEQ ID NO: 3439 - protein, 249 aa, Zea mays subsp. mays
  peptide (1)..(249): Ceres Seq. ID no. 12410225
  misc_feature (204)..(245): Pfam Name: Zinc finger, C3HC4 type (RING finger) Pfam Description: Zinc finger, C3HC4 type (RING finger)
  misc_feature (57)..(246): Homolog of NCBI NO: 34901682 NR Description: P0434A03.5 [Oryza sativa (japonica
  misc_feature (57)..(244): Homolog of NCBI NO: 7485279 NR Description: hypothetical protein A_TM017A05.9 - Arabidopsis
  misc_feature (53)..(244): Homolog of NCBI NO: 25411815 NR Description: hypothetical protein At2g17730 [imported] -
  misc_feature (49)..(249): Homolog of NCBI NO: 15239242 NR Description: putative protein; protein id: At5g66070.1
  misc_feature (53)..(249): Homolog of NCBI NO: 27524902 NR Description: NEP1-interacting protein [Arabidopsis thaliana]
  misc_feature (53)..(249): Homolog of NCBI NO: 30680091 NR Description: expressed protein [Arabidopsis thaliana]
  misc_feature (49)..(249): Homolog of NCBI NO: 26452210 NR Description: unknown protein [Arabidopsis thaliana]
  misc_feature (53)..(249): Homolog of NCBI NO: 26451101 NR Description: unknown protein [Arabidopsis thaliana]
  misc_feature (20)..(249): Homolog of NCBI NO: 37536572 NR Description: hypothetical protein [Oryza sativa (japonica
  misc_feature (20)..(249): Homolog of NCBI NO: 18855037 NR Description: putative zinc finger protein [Oryza sativa]
MDPSGGAFLPPLQQGSSSFPRSSSNASLARSGSGGGGVGAGRGTRGRKMMRRVCRGVITFIFAIAGLFLGAVTGGLIGLATESGLFRGTGIGAITGALVSIEVVDSSIRLWQARRSGIWSILYVLNVIYSLLTGRLVREKVDPAVQRVVRSQMNAVDSSPFRESPDLFEVEATNGMPRASIDKLPESWITEEYRRDAVGDLSGCSVCLQDFQVGEKVRSLPDCWHVFHVPCIDGWLIKHGSCPLCRRKL

SEQ ID NO: 3440 - protein, 201 aa, Zea mays subsp. mays
  peptide (1)..(201): Ceres Seq. ID no. 12410226
  misc_feature (156)..(197): Pfam Name: Zinc finger, C3HC4 type (RING finger) Pfam Description: Zinc finger, C3HC4 type (RING finger)
  misc_feature (9)..(198): Homolog of NCBI NO: 34901682 NR Description: P0434A03.5 [Oryza sativa (japonica
  misc_feature (9)..(196): Homolog of NCBI NO: 7485279 NR Description: hypothetical protein A_TM017A05.9 - Arabidopsis
  misc_feature (5)..(196): Homolog of NCBI NO: 25411815 NR Description: hypothetical protein At2g17730 [imported] -
  misc_feature (1)..(201): Homolog of NCBI NO: 15239242 NR Description: putative protein; protein id: At5g66070.1
  misc_feature (5)..(201): Homolog of NCBI NO: 27524902 NR Description: NEP1-interacting protein [Arabidopsis thaliana]
  misc_feature (5)..(201): Homolog of NCBI NO: 30680091 NR Description: expressed protein [Arabidopsis thaliana]
  misc_feature (1)..(201): Homolog of NCBI NO: 26452210 NR Description: unknown protein [Arabidopsis thaliana]
  misc_feature (5)..(201): Homolog of NCBI NO: 26451101 NR Description: unknown protein [Arabidopsis thaliana]
  misc_feature (1)..(201): Homolog of NCBI NO: 37536572 NR Description: hypothetical protein [Oryza sativa (japonica
  misc_feature (1)..(201): Homolog of NCBI NO: 18855037 NR Description: putative zinc finger protein [Oryza sativa]
MMRRVCRGVITFIFAIAGLFLGAVTGGLIGLATESGLFRGTGIGAITGALVSIEVVDSSIRLWQARRSGIWSILYVLNVIYSLLTGRLVREKVDPAVQRVVRSQMNAVDSSPFRESPDLFEVEATNGMPRASIDKLPESWITEEYRRDAVGDLSGCSVCLQDFQVGEKVRSLPDCWHVFHVPCIDGWLIKHGSCPLCRRKL

SEQ ID NO: 3441 - DNA, 1332 bp, Zea mays subsp. mays
  misc_feature (1)..(1332): Ceres Seq. ID no. 12376472
  misc_feature: MA Experiment ID: 20000479 Result: Up-regulated in Transcription
  misc_feature: MA Experiment 20000479 PARAMETER Experiment Name: Zm_Drought_P Parameter: Age (day) Value: 10
  misc_feature: MA Experiment 20000479 PARAMETER Experiment Name: Zm_Drought_P Parameter: Organism Value: Zea mays
  misc_feature: MA Experiment 20000479 PARAMETER Experiment Name: Zm_Drought_P Parameter: Plant Line Value: 35A19
  misc_feature: MA Experiment 20000479 PARAMETER Experiment Name: Zm_Drought_P Parameter: Timepoint (hr) Value: 48
  misc_feature: MA Experiment 20000479 PARAMETER Experiment Name: Zm_Drought_P Parameter: Tissue Value: Aerial
  misc_feature: MA Experiment 20000479 PARAMETER Experiment Name: Zm_Drought_P Parameter: Treatment Value: Drought vs. No Drought
  misc_feature: MA Experiment ID: 20000535 Result: Down-regulated in Transcription
  misc_feature: MA Experiment 20000535 PARAMETER Experiment Name: Zm_Hybrid_Seed_Dev_P Parameter: DAP Value: 30 vs. 12
  misc_feature: MA Experiment 20000535 PARAMETER Experiment Name: Zm_Hybrid_Seed_Dev_P Parameter: Organism Value: Zea mays
  misc_feature: MA Experiment 20000535 PARAMETER Experiment Name: Zm_Hybrid_Seed_Dev_P Parameter: Plant Line Value: 35A19
  misc_feature: MA Experiment 20000535 PARAMETER Experiment Name: Zm_Hybrid_Seed_Dev_P Parameter: Tissue Value: Embryo vs. Unfert Floret
cttcagttcacaaggccaccacgcgcgcccaaaggcccccaaggccccaaccccaaccttgcaggaaaaaaaaagagacgaccccccaaatcggaatccgcacacccatcatccatggccgccgccctgctccgccgctcgccggcggcgcgcgcgctcctctcgccggcactctcgtcccgcctcgtcgcgtccaagccccactcctcgtcccccgcgccgccgccacctgcgaaggccgactccagcacgaagaccttctcgatctaccggtgggacccggactcgccgtcgacgaagccgcacctcaaggactaccaggtggacctgtccgactgcgggccgatggtgctggacgcgctgctcaagatcaagaacgagcaggacccgtcgctcaccttccgccgcagctgccgggagggcatctgcgggagctgcgccatgaacatcgacggggacaacggcctcgcctgcctcaccaagatctcctccgcctcctcggcgtccaccgtctcgccgctgccccacatgttcgtcatcaaggacctggtggtcgacatgaccaacttctacaaccagtacaagagcgtcgagccgtggctcaagcgcaaggacccgccgccgcagctaggcaaggaggtcccgcagaccaaggccgaccgcgccaagctcgacggcatgtacgagtgcatcctctgcgcctgctgctccacctcctgcccatcctactggtggaaccccgaggagtacctcggcccagccgcgctgcttccacgccaataggtggatacaggacagccgtgaccagttcaccaaggagcgcctggacgccatcaacgacgagttcaagctgtaccgctgccacaccatcaagaactgcacgcatgcctgccccaaggggcctgaacccggcaaagcagatcgacacgatcaagaagctccagttgggtgccccaagtgcctgaaaccgagcgtgtcttcccttgaaaacggtcgtggaacagacctgtggaaaaaattgggatgaacttgccacttatttcgttgttgttcttcttctttggtcttcgcgcggtggtttctacctgccaaagacgaataattcccggctggggcccctccagtccactccacccatgcttttgtgtcaggcggagcggaggtagagcatagggagtgaataaccgctaccttatttcatttctatgatgtatctatctaatttggtcctcccctgataatgcacgacccgtagtgttaacaggcgtatttggaccttcaagaagtatttggacatggcaaatgtattttggaatgctcttatctaccgtg

SEQ ID NO: 3442 - protein, 320 aa, Zea mays subsp. mays
  peptide (1)..(320): Ceres Seq. ID no. 12376473
  misc_feature (298)..(317): Homolog of NCBI NO: 28611029 NR Description: succinate dehydrogenase [Triticum aestivum]
  misc_feature (298)..(317): Homolog of NCBI NO: 5688947 NR Description: succinate dehydrogenase iron-protein subunit
  misc_feature (298)..(320): Homolog of NCBI NO: 4803711 NR Description: iron sulfur subunit of succinate dehydrogenase
SVHKATTRAQRPPRPQPQPCRKKKETTPQIGIRTPIIHGRRPAPPLAGGARAPLAGTLVPPRRVQAPLLVPRAAATCEGRLQHEDLLDLPVGPGLAVDEAAPQGLPGGPVRLRADGAGRAAQDQERAGPVAHLPPQLPGGHLRELRHEHRRGQRPRLPHQDLLRLLGVHRLAAAPHVRHQGPGGRHDQLLQPVQERRAVAQAQGPAAAARQGGPADQGRPRQARRHVRVHPLRLLLHLLPILLVEPRGVPRPSRAASTPIGGYRTAVTSSPRSAWTPSTTSSSCTAATPSRTARMPAPRGLNPAKQIDTIKKLQLGAPSA

SEQ ID NO: 3443 - protein, 260 aa, Zea mays subsp. mays
  peptide (1)..(260): Ceres Seq. ID no. 12376474
  misc_feature (99)..(163): Pfam Name: 2Fe-2S iron-sulfur cluster binding domain Pfam Description: 2Fe-2S iron-sulfur cluster binding domain
  misc_feature (37)..(257): Homolog of NCBI NO: 15232149 NR Description: succinate dehydrogenase iron-protein subunit,
  misc_feature (45)..(257): Homolog of NCBI NO: 12049600 NR Description: mitochondrial succinate dehydrogenase
  misc_feature (45)..(257): Homolog of NCBI NO: 21593098 NR Description: succinate dehydrogenase iron-protein subunit-like
  misc_feature (45)..(257): Homolog of NCBI NO: 15237464 NR Description: succinate dehydrogenase iron-protein subunit -like
  misc_feature (40)..(257): Homolog of NCBI NO: 28611030 NR Description: chimeric SDH2-RPS14 protein [Triticum aestivum]
  misc_feature (40)..(257): Homolog of NCBI NO: 5688945 NR Description: mitochondrial ribosomal protein S14
  misc_feature (39)..(257): Homolog of NCBI NO: 4803710 NR Description: iron sulfur subunit of succinate dehydrogenase
  misc_feature (40)..(257): Homolog of NCBI NO: 28611029 NR Description: succinate dehydrogenase [Triticum aestivum]
  misc_feature (40)..(257): Homolog of NCBI NO: 5688947 NR Description: succinate dehydrogenase iron-protein subunit
  misc_feature (39)..(257): Homolog of NCBI NO: 4803711 NR Description: iron sulfur subunit of succinate dehydrogenase
LQFTRPPRAPKGPQGPNPNLAGKKKRRPPKSESAHPSSMAAALLRRSPAARALLSPALSSRLVASKPHSSSPAPPPPAKADSSTKTFSIYRWDPDSPSTKPHLKDYQVDLSDCGPMVLDALLKIKNEQDPSLTFRRSCREGICGSCAMNIDGDNGLACLTKISSASSASTVSPLPHMFVIKDLVVDMTNFYNQYKSVEPWLKRKDPPPQLGKEVPQTKADRAKLDGMYECILCACCSTSCPSYWWNPEEYLGPAALLPRQ

SEQ ID NO: 3444 - protein, 222 aa, Zea mays subsp. mays
  peptide (1)..(222): Ceres Seq. ID no. 12376475
  misc_feature (61)..(125): Pfam Name: 2Fe-2S iron-sulfur cluster binding domain Pfam Description: 2Fe-2S iron-sulfur cluster binding domain
  misc_feature (1)..(219): Homolog of NCBI NO: 15232149 NR Description: succinate dehydrogenase iron-protein subunit,
  misc_feature (7)..(219): Homolog of NCBI NO: 12049600 NR Description: mitochondrial succinate dehydrogenase
  misc_feature (7)..(219): Homolog of NCBI NO: 21593098 NR Description: succinate dehydrogenase iron-protein subunit-like
  misc_feature (7)..(219): Homolog of NCBI NO: 15237464 NR Description: succinate dehydrogenase iron-protein subunit -like
  misc_feature (2)..(219): Homolog of NCBI NO: 28611030 NR Description: chimeric SDH2-RPS14 protein [Triticum aestivum]
  misc_feature (2)..(219): Homolog of NCBI NO: 5688945 NR Description: mitochondrial ribosomal protein S14
  misc_feature (1)..(219): Homolog of NCBI NO: 4803710 NR Description: iron sulfur subunit of succinate dehydrogenase
  misc_feature (2)..(219): Homolog of NCBI NO: 28611029 NR Description: succinate dehydrogenase [Triticum aestivum]
  misc_feature (2)..(219): Homolog of NCBI NO: 5688947 NR Description: succinate dehydrogenase iron-protein subunit
  misc_feature (1)..(219): Homolog of NCBI NO: 4803711 NR Description: iron sulfur subunit of succinate dehydrogenase
MAAALLRRSPAARALLSPALSSRLVASKPHSSSPAPPPPAKADSSTKTFSIYRWDPDSPSTKPHLKDYQVDLSDCGPMVLDALLKIKNEQDPSLTFRRSCREGICGSCAMNIDGDNGLACLTKISSASSASTVSPLPHMFVIKDLVVDMTNFYNQYKSVEPWLKRKDPPPQLGKEVPQTKADRAKLDGMYECILCACCSTSCPSYWWNPEEYLGPAALLPRQ

SEQ ID NO: 3445 - DNA, 1532 bp, Zea mays subsp. mays
  misc_feature (1)..(1532): Ceres Seq. ID no. 12407804
  misc_feature: MA Experiment ID: 108522 Result: Down-regulated in Transcription
  misc_feature: MA Experiment 108522 PARAMETER Experiment Name: Zm_42deg_Heat_P Parameter: Age (day) Value: 8
  misc_feature: MA Experiment 108522 PARAMETER Experiment Name: Zm_42deg_Heat_P Parameter: Organism Value: Zea mays
  misc_feature: MA Experiment 108522 PARAMETER Experiment Name: Zm_42deg_Heat_P Parameter: Plant Line Value: 35A19
  misc_feature: MA Experiment 108522 PARAMETER Experiment Name: Zm_42deg_Heat_P Parameter: Temperature (deg C) Value: 42 vs. 22
  misc_feature: MA Experiment 108522 PARAMETER Experiment Name: Zm_42deg_Heat_P Parameter: Timepoint (hr) Value: 1
  misc_feature: MA Experiment 108522 PARAMETER Experiment Name: Zm_42deg_Heat_P Parameter: Tissue Value: Aerial
  misc_feature: MA Experiment ID: 108535 Result: Up-regulated in Transcription
  misc_feature: MA Experiment 108535 PARAMETER Experiment Name: Zm_Meristem_P Parameter: Age (day) Value: 8
  misc_feature: MA Experiment 108535 PARAMETER Experiment Name: Zm_Meristem_P Parameter: Organism Value: Zea mays
  misc_feature: MA Experiment 108535 PARAMETER Experiment Name: Zm_Meristem_P Parameter: Plant Line Value: 35A19
  misc_feature: MA Experiment 108535 PARAMETER Experiment Name: Zm_Meristem_P Parameter: Tissue Value: Root Meristem vs. Above Root Meristem
  misc_feature: MA Experiment ID: 108544 Result: Down-regulated in Transcription
  misc_feature: MA Experiment ID: 108689 Result: Down-regulated in Transcription
  misc_feature: MA Experiment 108689 PARAMETER Experiment Name: Zm_Drought_Roots_P Parameter: Age (day) Value: 9
  misc_feature: MA Experiment 108689 PARAMETER Experiment Name: Zm_Drought_Roots_P Parameter: Organism Value: Zea mays
  misc_feature: MA Experiment 108689 PARAMETER Experiment Name: Zm_Drought_Roots_P Parameter: Plant Line Value: 35A19
  misc_feature: MA Experiment 108689 PARAMETER Experiment Name: Zm_Drought_Roots_P Parameter: Timepoint (hr) Value: 24
  misc_feature: MA Experiment 108689 PARAMETER Experiment Name: Zm_Drought_Roots_P Parameter: Tissue Value: Roots
  misc_feature: MA Experiment 108689 PARAMETER Experiment Name: Zm_Drought_Roots_P Parameter: Treatment Value: Drought vs. No Drought
  misc_feature: MA Experiment ID: 20000108 Result: Up-regulated in Transcription
  misc_feature: MA Experiment 20000108 PARAMETER Experiment Name: Zm_Root-Tips_P Parameter: Age (day) Value: 12
  misc_feature: MA Experiment 20000108 PARAMETER Experiment Name: Zm_Root-Tips_P Parameter: Organism Value: Zea mays
  misc_feature: MA Experiment 20000108 PARAMETER Experiment Name: Zm_Root-Tips_P Parameter: Tissue Value: Root tips vs. Root mid region    35
  misc_feature: MA Experiment 20000108 PARAMETER Experiment Name: Zm_Root-Tips_P Parameter: Tissue Value: Root tips vs. Root mid region   Sequence Listing-Misc Features (4)
  misc_feature: MA Experiment ID: 20000477 Result: Down-regulated in Transcription
  misc_feature: MA Experiment 20000477 PARAMETER Experiment Name: Zm_5mM_SA_P Parameter: Age (day) Value: 10
  misc_feature: MA Experiment 20000477 PARAMETER Experiment Name: Zm_5mM_SA_P Parameter: Organism Value: Zea mays
  misc_feature: MA Experiment 20000477 PARAMETER Experiment Name: Zm_5mM_SA_P Parameter: Plant Line Value: 35A19
  misc_feature: MA Experiment 20000477 PARAMETER Experiment Name: Zm_5mM_SA_P Parameter: Timepoint (hr) Value: 48
  misc_feature: MA Experiment 20000477 PARAMETER Experiment Name: Zm_5mM_SA_P Parameter: Tissue Value: Aerial
  misc_feature: MA Experiment 20000477 PARAMETER Experiment Name: Zm_5mM_SA_P Parameter: Treatment Value: 5mM SA vs. No Treatment
  misc_feature: MA Experiment ID: 20000478 Result: Down-regulated in Transcription
  misc_feature: MA Experiment 20000478 PARAMETER Experiment Name: Zm_5mM_SA_P Parameter: Age (day) Value: 11
  misc_feature: MA Experiment 20000478 PARAMETER Experiment Name: Zm_5mM_SA_P Parameter: Organism Value: Zea mays
  misc_feature: MA Experiment 20000478 PARAMETER Experiment Name: Zm_5mM_SA_P Parameter: Plant Line Value: 35A19
  misc_feature: MA Experiment 20000478 PARAMETER Experiment Name: Zm_5mM_SA_P Parameter: Timepoint (hr) Value: 72
  misc_feature: MA Experiment 20000478 PARAMETER Experiment Name: Zm_5mM_SA_P Parameter: Tissue Value: Aerial
  misc_feature: MA Experiment 20000478 PARAMETER Experiment Name: Zm_5mM_SA_P Parameter: Treatment Value: 5mM SA vs. No Treatment
  misc_feature: MA Experiment ID: 20000479 Result: Down-regulated in Transcription
  misc_feature: MA Experiment 20000479 PARAMETER Experiment Name: Zm_Drought_P Parameter: Age (day) Value: 10
  misc_feature: MA Experiment 20000479 PARAMETER Experiment Name: Zm_Drought_P Parameter: Organism Value: Zea mays
  misc_feature: MA Experiment 20000479 PARAMETER Experiment Name: Zm_Drought_P Parameter: Plant Line Value: 35A19
  misc_feature: MA Experiment 20000479 PARAMETER Experiment Name: Zm_Drought_P Parameter: Timepoint (hr) Value: 48
  misc_feature: MA Experiment 20000479 PARAMETER Experiment Name: Zm_Drought_P Parameter: Tissue Value: Aerial
  misc_feature: MA Experiment 20000479 PARAMETER Experiment Name: Zm_Drought_P Parameter: Treatment Value: Drought vs. No Drought
  misc_feature: MA Experiment ID: 20000480 Result: Down-regulated in Transcription
  misc_feature: MA Experiment 20000480 PARAMETER Experiment Name: Zm_Drought_P Parameter: Age (day) Value: 11
  misc_feature: MA Experiment 20000480 PARAMETER Experiment Name: Zm_Drought_P Parameter: Organism Value: Zea mays
  misc_feature: MA Experiment 20000480 PARAMETER Experiment Name: Zm_Drought_P Parameter: Plant Line Value: 35A19
  misc_feature: MA Experiment 20000480 PARAMETER Experiment Name: Zm_Drought_P Parameter: Timepoint (hr) Value: 72
  misc_feature: MA Experiment 20000480 PARAMETER Experiment Name: Zm_Drought_P Parameter: Tissue Value: Aerial
  misc_feature: MA Experiment 20000480 PARAMETER Experiment Name: Zm_Drought_P Parameter: Treatment Value: Drought vs. No Drought
  misc_feature: MA Experiment ID: 20000487 Result: Up-regulated in Transcription
  misc_feature: MA Experiment 20000487 PARAMETER Experiment Name: Zm_50mM_NH4NO3_L_to_H_P Parameter: Organism Value: Zea mays
  misc_feature: MA Experiment 20000487 PARAMETER Experiment Name: Zm_50mM_NH4NO3_L_to_H_P Parameter: Timepoint (hr) Value: 4
  misc_feature: MA Experiment 20000487 PARAMETER Experiment Name: Zm_50mM_NH4NO3_L_to_H_P Parameter: Tissue Value: Leaves
  misc_feature: MA Experiment 20000487 PARAMETER Experiment Name: Zm_50mM_NH4NO3_L_to_H_P Parameter: Treatment Value: 50mM NH4NO3 vs. 100mM Mannitol
  misc_feature: MA Experiment ID: 20000488 Result: Up-regulated in Transcription
  misc_feature: MA Experiment 20000488 PARAMETER Experiment Name: Zm_50mM_NH4NO3_L_to_H_P Parameter: Organism Value: Zea mays
  misc_feature: MA Experiment 20000488 PARAMETER Experiment Name: Zm_50mM_NH4NO3_L_to_H_P Parameter: Timepoint (hr) Value: 8
  misc_feature: MA Experiment 20000488 PARAMETER Experiment Name: Zm_50mM_NH4NO3_L_to_H_P Parameter: Tissue Value: Leaves
  misc_feature: MA Experiment 20000488 PARAMETER Experiment Name: Zm_50mM_NH4NO3_L_to_H_P Parameter: Treatment Value: 50mM NH4NO3 vs. 100mM Mannitol
  misc_feature: MA Experiment ID: 20000492 Result: Up-regulated in Transcription
  misc_feature: MA Experiment 20000492 PARAMETER Experiment Name: Zm_Hybrid_Seed_Dev_P Parameter: DAP Value: 12
  misc_feature: MA Experiment 20000492 PARAMETER Experiment Name: Zm_Hybrid_Seed_Dev_P Parameter: Organism Value: Zea mays
  misc_feature: MA Experiment 20000492 PARAMETER Experiment Name: Zm_Hybrid_Seed_Dev_P Parameter: Plant Line Value: 35A19
  misc_feature: MA Experiment 20000492 PARAMETER Experiment Name: Zm_Hybrid_Seed_Dev_P Parameter: Tissue Value: Fert Kernel vs. Unfert Floret
  misc_feature: MA Experiment ID: 20000534 Result: Down-regulated in Transcription
  misc_feature: MA Experiment 20000534 PARAMETER Experiment Name: Zm_Hybrid_Pollen_P Parameter: Age (day) Value: 8
  misc_feature: MA Experiment 20000534 PARAMETER Experiment Name: Zm_Hybrid_Pollen_P Parameter: Organism Value: Zea mays
  misc_feature: MA Experiment 20000534 PARAMETER Experiment Name: Zm_Hybrid_Pollen_P Parameter: Plant Line Value: 35A19
  misc_feature: MA Experiment 20000534 PARAMETER Experiment Name: Zm_Hybrid_Pollen_P Parameter: Tissue Value: Pollen vs. Aerial
  misc_feature: MA Experiment ID: 20000626 Result: Up-regulated in Transcription
  misc_feature: MA Experiment 20000626 PARAMETER Experiment Name: Zm_Herbicide-Treatments_P Parameter: Timepoint (hr) Value: 12
  misc_feature: MA Experiment 20000626 PARAMETER Experiment Name: Zm_Herbicide-Treatments_P Parameter: Tissue Value: Aerial
  misc_feature: MA Experiment 20000626 PARAMETER Experiment Name: Zm_Herbicide-Treatments_P Parameter: Treatment Value: Roundup vs. No Treatment
acagtgtccactgtccagtcgcctagtcgcaaatctcaccccgccgccatggcctcccccgccgccgcctcccccgcgcgccgcctttccgtcattttctcctcgaccaagccacgcgcccgaccacccaaaccggcgccggctccgaaagcgccggccggccaggcggttgcgaaacctgacgagcgctgcgagtcccggaatctcacgaaaatcctgcaggtcatcttccgggagcgcgatccggacaagctggtttcccagttcatcgccgaatcgaccgcgtctgaacgcttccgcaacaagcaccgcgtgtacgacgtggccgtggcccgcctcgcctccttcggccgacacgatggcattgctgccatcatcgactcacagaagccgttcatcgcggcctccagcgtgggcttcgtcgcacgcctcatccgcctctgcggccgcgcctccatgccgtcccacgccgccgcgatcttccatgacctcccaccgaagcacaagtcctccatgactttcaatgccctcctcgggccgcctacctcgacgccagcgacttcgacgcactcgccaccgcgttgcaggaaatcccggccacacaccccactattgctcccaccatatactctcacaatatactcatcagtgcgctgtgcaagaagccggacctctcggccgccgtggatgtcatcacgctcatggagaagcgcggtattacccctgatatcatctctttcaacattctgctcaatgggttttacagcaatgatcgctttgatgacgtcgagaaagtttgggagatgatgaaggagaggaatgttgagccggatgcgaggagctataatgcaaaactgcggggtttggtttcccaagggagggttgaggatgcagctgcattgattgagaggatgcaaaaggagggaccaaagcctgattcagtgtcctacaacgaactgattcgagggtattgcaatgaagggaggttgaatgaagccaagaaggtatatgataatatgataaagaatggatatgcaccaaataggggcacatttcatacccttgtgccacattttgtggaggctggagagcttgatcatgctctaagctgctgccatgagatcttcactaggaagtgcagagtgcagtgctcgttgctgcagggggtagtgactgcgttggttgctgcatcaaggaaggaggaggctaagaggatcgttcatcttggaagggagaactactatcctcgaaagggtttgaggatgccaccacgtactagaaaagacgagggtttgaagatgccgcaacctggtggagaaggcaatgatgtagaagctggaactgattcagaagattctgtatcatatgaagatgggtgcgagcaagaagaggagtcgaaaaatggtcagtgaggatgtacctttgtaatttaagcattgatgtgacatggcgatgcaaactgaatttgctctacttctttgatggcatgatacaacagaattgcctgtgcaattggaattctctcgcacttt

SEQ ID NO: 3446 - protein, 268 aa, Zea mays subsp. mays
  peptide (1)..(268): Ceres Seq. ID no. 12407805
  misc_feature (79)..(178): Homolog of NCBI NO: 25406637 NR Description: hypothetical protein F18B13.23 [imported] -
  misc_feature (68)..(178): Homolog of NCBI NO: 25455786 NR Description: membrane-associated salt-inducible protein like
  misc_feature (68)..(178): Homolog of NCBI NO: 15234493 NR Description: salt-inducible like protein
  misc_feature (35)..(178): Homolog of NCBI NO: 15231160 NR Description: hypothetical protein; protein id: At3g13150.1
  misc_feature (72)..(178): Homolog of NCBI NO: 21617993 NR Description: unknown [Arabidopsis thaliana]
  misc_feature (79)..(178): Homolog of NCBI NO: 15222796 NR Description: unknown protein
  misc_feature (72)..(178): Homolog of NCBI NO: 18399887 NR Description: Expressed protein
  misc_feature (17)..(178): Homolog of NCBI NO: 34910148 NR Description: B1070A12.17 [Oryza sativa (japonica
TVSTVQSPSRKSHPAAMASPAAASPARRLSVIFSSTKPRARPPKPAPAPKAPAGQAVAKPDERCESRNLTKILQVIFRERDPDKLVSQFIAESTASERFRNKHRVYDVAVARLASFGRHDGIAAIIDSQKPFIAASSVGFVARLIRLCGRASMPSHAAAIFHDLPPKHKSSMTFNALLGPPTSTPATSTHSPPRCRKSRPHTPLLLPPYTLTIYSSVRCARSRTSRPPWMSSRSWRSAVLPLISSLSTFCSMGFTAMIALMTSRKFGR

SEQ ID NO: 3447 - protein, 252 aa, Zea mays subsp. mays
  peptide (1)..(252): Ceres Seq. ID no. 12407806
  misc_feature (63)..(162): Homolog of NCBI NO: 25406637 NR Description: hypothetical protein F18B13.23 [imported] -
  misc_feature (52)..(162): Homolog of NCBI NO: 25455786 NR Description: membrane-associated salt-inducible protein like
  misc_feature (52)..(162): Homolog of NCBI NO: 15234493 NR Description: salt-inducible like protein
  misc_feature (19)..(162): Homolog of NCBI NO: 15231160 NR Description: hypothetical protein; protein id: At3g13150.1
  misc_feature (56)..(162): Homolog of NCBI NO: 21617993 NR Description: unknown [Arabidopsis thaliana]
  misc_feature (63)..(162): Homolog of NCBI NO: 15222796 NR Description: unknown protein
  misc_feature (56)..(162): Homolog of NCBI NO: 18399887 NR Description: Expressed protein
  misc_feature (1)..(162): Homolog of NCBI NO: 34910148 NR Description: B1070A12.17 [Oryza sativa (japonica
MASPAAASPARRLSVIFSSTKPRARPPKPAPAPKAPAGQAVAKPDERCESRNLTKILQVIFRERDPDKLVSQFIAESTASERFRNKHRVYDVAVARLASFGRHDGIAAIIDSQKPFIAASSVGFVARLIRLCGRASMPSHAAAIFHDLPPKHKSSMTFNALLGPPTSTPATSTHSPPRCRKSRPHTPLLLPPYTLTIYSSVRCARSRTSRPPWMSSRSWRSAVLPLISSLSTFCSMGFTAMIALMTSRKFGR

SEQ ID NO: 3448 - protein, 236 aa, Zea mays subsp. mays
  peptide (1)..(236): Ceres Seq. ID no. 12407807
  misc_feature (46)..(80): Pfam Name: PPR repeat Pfam Description: PPR repeat
  misc_feature (1)..(180): Homolog of NCBI NO: 18407365 NR Description: expressed protein
  misc_feature (1)..(182): Homolog of NCBI NO: 15234493 NR Description: salt-inducible like protein
  misc_feature (1)..(181): Homolog of NCBI NO: 15231160 NR Description: hypothetical protein; protein id: At3g13150.1
  misc_feature (1)..(191): Homolog of NCBI NO: 21617993 NR Description: unknown [Arabidopsis thaliana]
  misc_feature (1)..(180): Homolog of NCBI NO: 21553755 NR Description: putative membrane-associated salt-inducible
  misc_feature (1)..(212): Homolog of NCBI NO: 25406637 NR Description: hypothetical protein F18B13.23 [imported] -
  misc_feature (1)..(182): Homolog of NCBI NO: 25455786 NR Description: membrane-associated salt-inducible protein like
  misc_feature (1)..(189): Homolog of NCBI NO: 15222796 NR Description: unknown protein
  misc_feature (1)..(191): Homolog of NCBI NO: 18399887 NR Description: Expressed protein
  misc_feature (1)..(196): Homolog of NCBI NO: 34910148 NR Description: B1070A12.17 [Oryza sativa (japonica
MEKRGITPDIISFNILLNGFYSNDRFDDVEKVWEMMKERNVEPDARSYNAKLRGLVSQGRVEDAAALIERMQKEGPKPDSVSYNELIRGYCNEGRLNEAKKVYDNMIKNGYAPNRGTFHTLVPHFVEAGELDHALSCCHEIFTRKCRVQCSLLQGVVTALVAASRKEEAKRIVHLGRENYYPRKGLRMPPRTRKDEGLKMPQPGGEGNDVEAGTDSEDSVSYEDGCEQEEESKNGQ

SEQ ID NO: 3449 - DNA, 1592 bp, Zea mays subsp. mays
  misc_feature (1)..(1592): Ceres Seq. ID no. 12411477
  misc_feature: MA Experiment ID: 20000534 Result: Down-regulated in Transcription
  misc_feature: MA Experiment 20000534 PARAMETER Experiment Name: Zm_Hybrid_Pollen_P Parameter: Age (day) Value: 8
  misc_feature: MA Experiment 20000534 PARAMETER Experiment Name: Zm_Hybrid_Pollen_P Parameter: Organism Value: Zea mays
  misc_feature: MA Experiment 20000534 PARAMETER Experiment Name: Zm_Hybrid_Pollen_P Parameter: Plant Line Value: 35A19
  misc_feature: MA Experiment 20000534 PARAMETER Experiment Name: Zm_Hybrid_Pollen_P Parameter: Tissue Value: Pollen vs. Aerial
gtataccagtctagcaccgaactaccaaaaccgaccgagccgcgaacttcacccctgccttctctcccttctccgtccaggccctggtgcccgcgcgttctcgtgcggcaagtgggcgccgccgccggactacgacaggtgcccagttcctcgtcgggtccttcgtcgacgacgagcacccaccaaaaattcgagtattagactctacatgtcaagaaagtatggcgccaggaagcaaggcggagcggaaagcagcactagatgctggcgcatggatgttcaatgtcgtcacatctgttggtatcatcatggtcaacaaaggcttaatggcgactcatggctttagttttgctacaacactgactggacttcattttgcaatgacaaccttgatgacgttagtaatgaaatggctgggatatattcagccatcttatttaccattaccagaactagtaaagtttgccttttttgcaaacctgtcgatcgtcggaatgaacgttagtttgatgtggaactctgttggattctatcagatcgcgaagttgtgtatcattccagtcttatgcattctggaaatcatattcgacaaagttcgttactcaagagatacaaagctcagtatagtgcttgtcctcataggtgttgctgtgtgtactgtgactgatgttagcgtgaactctcaagggctattagctgcagtaatagctgtttggagcacagcactacaacaacattatgttcaccaccttcaatggaagtactcgcttggctcattcaatctcttaggccatactgctccagcgcaggcagcatcattgttaatagtggggccttttgtggacttctggctgactaacaaaagagttgatgcttttaactacacatcaatagttacgttctttatcgtgttgtcgtgcataattgccgttgggacgaatctaagccaattcatatgcatcggaagattcacagccgtctcgttccaagtcctaggccacatgaagacagttctggtgttgaccttggggttccttttctttgggaaagaggggctcaacttccatgtcgcccttggcatgcttctggctgtgatcggcatgatctggtacgggaacgcgtcgtcgaaatctggaggcaaagagcgccaggtctaccccacaccgagcgagaagactcagaagcatggggcgctgtcatcgcagtccgagctcgatcagaaggtctaaacgagacacacaaaggcatccgatgcttgttgagcaccggtcgacctggctttattttttagtacttatttttgagggatgagatgtttctataggattgtaggtggggccatagcagaaagagggtgcctgggtaaaatgcccacgagtttacttttgcagtgagtatgtcaatctaagctggcagatacttgatttgtaatagtctttgtgtgtgtttcgctcttcatgtggcatgttcagtttgatctatagttgtatctttcactttcacactgaaattgaaaagtaaagcgcaaatttccttgtatatgtattacaagtaattaatttggtgctatatatcgcatctgtccggttttt

SEQ ID NO: 3450 - protein, 335 aa, Zea mays subsp. mays
  peptide (1)..(335): Ceres Seq. ID no. 12411478
  misc_feature (8)..(313): Homolog of NCBI NO: 18394949 NR Description: expressed protein
  misc_feature (6)..(318): Homolog of NCBI NO: 18411172 NR Description: expressed protein
  misc_feature (8)..(331): Homolog of NCBI NO: 15238957 NR Description: putative protein; protein id: At5g42420.1
  misc_feature (2)..(335): Homolog of NCBI NO: 7486049 NR Description: hypothetical protein F23K16.20 - Arabidopsis
  misc_feature (2)..(335): Homolog of NCBI NO: 21593003 NR Description: unknown [Arabidopsis thaliana]
  misc_feature (2)..(335): Homolog of NCBI NO: 18420440 NR Description: putative protein
  misc_feature (1)..(334): Homolog of NCBI NO: 21595054 NR Description: unknown [Arabidopsis thaliana]
  misc_feature (1)..(330): Homolog of NCBI NO: 15234794 NR Description: hypothetical protein; protein id: At4g09810.1
  misc_feature (1)..(334): Homolog of NCBI NO: 18399097 NR Description: expressed protein
  misc_feature (1)..(335): Homolog of NCBI NO: 30313364 NR Description: putative transmembrane protein [Oryza sativa]
MAPGSKAERKAALDAGAWMFNVVTSVGIIMVNKGLMATHGFSFATTLTGLHFAMTTLMTLVMKWLGYIQPSYLPLPELVKFAFFANLSIVGMNVSLMWNSVGFYQIAKLCIIPVLCILEIIFDKVRYSRDTKLSIVLVLIGVAVCTVTDVSVNSQGLLAAVIAVWSTALQQHYVHHLQWKYSLGSFNLLGHTAPAQAASLLIVGPFVDFWLTNKRVDAFNYTSIVTFFIVLSCIIAVGTNLSQFICIGRFTAVSFQVLGHMKTVLVLTLGFLFFGKEGLNFHVALGMLLAVIGMIWYGNASSKSGGKERQVYPTPSEKTQKHGALSSQSELDQKV

SEQ ID NO: 3451 - protein, 317 aa, Zea mays subsp. mays
  peptide (1)..(317): Ceres Seq. ID no. 12411479
  misc_feature (1)..(295): Homolog of NCBI NO: 18394949 NR Description: expressed protein
  misc_feature (1)..(300): Homolog of NCBI NO: 18411172 NR Description: expressed protein
  misc_feature (1)..(313): Homolog of NCBI NO: 15238957 NR Description: putative protein; protein id: At5g42420.1
  misc_feature (1)..(317): Homolog of NCBI NO: 7486049 NR Description: hypothetical protein F23K16.20 - Arabidopsis
  misc_feature (1)..(317): Homolog of NCBI NO: 21593003 NR Description: unknown [Arabidopsis thaliana]
  misc_feature (1)..(317): Homolog of NCBI NO: 18420440 NR Description: putative protein
  misc_feature (1)..(316): Homolog of NCBI NO: 21595054 NR Description: unknown [Arabidopsis thaliana]
  misc_feature (1)..(312): Homolog of NCBI NO: 15234794 NR Description: hypothetical protein; protein id: At4g09810.1
  misc_feature (1)..(316): Homolog of NCBI NO: 18399097 NR Description: expressed protein
  misc_feature (1)..(317): Homolog of NCBI NO: 30313364 NR Description: putative transmembrane protein [Oryza sativa]
MFNVVTSVGIIMVNKGLMATHGFSFATTLTGLHFAMTTLMTLVMKWLGYIQPSYLPLPELVKFAFFANLSIVGMNVSLMWNSVGFYQIAKLCIIPVLCILEIIFDKVRYSRDTKLSIVLVLIGVAVCTVTDVSVNSQGLLAAVIAVWSTALQQHYVHHLQWKYSLGSFNLLGHTAPAQAASLLIVGPFVDFWLTNKRVDAFNYTSIVTFFIVLSCIIAVGTNLSQFICIGRFTAVSFQVLGHMKTVLVLTLGFLFFGKEGLNFHVALGMLLAVIGMIWYGNASSKSGGKERQVYPTPSEKTQKHGALSSQSELDQKV

SEQ ID NO: 3452 - protein, 306 aa, Zea mays subsp. mays
  peptide (1)..(306): Ceres Seq. ID no. 12411480
  misc_feature (1)..(284): Homolog of NCBI NO: 18394949 NR Description: expressed protein
  misc_feature (1)..(289): Homolog of NCBI NO: 18411172 NR Description: expressed protein
  misc_feature (1)..(302): Homolog of NCBI NO: 15238957 NR Description: putative protein; protein id: At5g42420.1
  misc_feature (1)..(306): Homolog of NCBI NO: 7486049 NR Description: hypothetical protein F23K16.20 - Arabidopsis
  misc_feature (1)..(306): Homolog of NCBI NO: 21593003 NR Description: unknown [Arabidopsis thaliana]
  misc_feature (1)..(306): Homolog of NCBI NO: 18420440 NR Description: putative protein
  misc_feature (1)..(305): Homolog of NCBI NO: 21595054 NR Description: unknown [Arabidopsis thaliana]
  misc_feature (1)..(301): Homolog of NCBI NO: 15234794 NR Description: hypothetical protein; protein id: At4g09810.1
  misc_feature (1)..(305): Homolog of NCBI NO: 18399097 NR Description: expressed protein
  misc_feature (1)..(306): Homolog of NCBI NO: 30313364 NR Description: putative transmembrane protein [Oryza sativa]
MVNKGLMATHGFSFATTLTGLHFAMTTLMTLVMKWLGYIQPSYLPLPELVKFAFFANLSIVGMNVSLMWNSVGFYQIAKLCIIPVLCILEIIFDKVRYSRDTKLSIVLVLIGVAVCTVTDVSVNSQGLLAAVIAVWSTALQQHYVHHLQWKYSLGSFNLLGHTAPAQAASLLIVGPFVDFWLTNKRVDAFNYTSIVTFFIVLSCIIAVGTNLSQFICIGRFTAVSFQVLGHMKTVLVLTLGFLFFGKEGLNFHVALGMLLAVIGMIWYGNASSKSGGKERQVYPTPSEKTQKHGALSSQSELDQKV

SEQ ID NO: 3453 - DNA, 1340 bp, Zea mays subsp. mays
  misc_feature (1)..(1340): Ceres Seq. ID no. 12406798
  misc_feature: MA Experiment ID: 108522 Result: Up-regulated in Transcription
  misc_feature: MA Experiment 108522 PARAMETER Experiment Name: Zm_42deg_Heat_P Parameter: Age (day) Value: 8
  misc_feature: MA Experiment 108522 PARAMETER Experiment Name: Zm_42deg_Heat_P Parameter: Organism Value: Zea mays
  misc_feature: MA Experiment 108522 PARAMETER Experiment Name: Zm_42deg_Heat_P Parameter: Plant Line Value: 35A19
  misc_feature: MA Experiment 108522 PARAMETER Experiment Name: Zm_42deg_Heat_P Parameter: Temperature (deg C) Value: 42 vs. 22
  misc_feature: MA Experiment 108522 PARAMETER Experiment Name: Zm_42deg_Heat_P Parameter: Timepoint (hr) Value: 1
  misc_feature: MA Experiment 108522 PARAMETER Experiment Name: Zm_42deg_Heat_P Parameter: Tissue Value: Aerial
  misc_feature: MA Experiment ID: 108527 Result: Up-regulated in Transcription
  misc_feature: MA Experiment 108527 PARAMETER Experiment Name: Zm_5mM_NO_P Parameter: Age (day) Value: 8
  misc_feature: MA Experiment 108527 PARAMETER Experiment Name: Zm_5mM_NO_P Parameter: Organism Value: Zea mays
  misc_feature: MA Experiment 108527 PARAMETER Experiment Name: Zm_5mM_NO_P Parameter: Plant Line Value: 35A19
  misc_feature: MA Experiment 108527 PARAMETER Experiment Name: Zm_5mM_NO_P Parameter: Timepoint (hr) Value: 6
  misc_feature: MA Experiment 108527 PARAMETER Experiment Name: Zm_5mM_NO_P Parameter: Tissue Value: Aerial
  misc_feature: MA Experiment 108527 PARAMETER Experiment Name: Zm_5mM_NO_P Parameter: Treatment Value: 5mM NO vs. No Treatment
  misc_feature: MA Experiment ID: 108529 Result: Up-regulated in Transcription
  misc_feature: MA Experiment 108529 PARAMETER Experiment Name: Zm_Imbibed_Seeds_P Parameter: Age (day) Value: 5 vs. 2
  misc_feature: MA Experiment 108529 PARAMETER Experiment Name: Zm_Imbibed_Seeds_P Parameter: Organism Value: Zea mays
  misc_feature: MA Experiment 108529 PARAMETER Experiment Name: Zm_Imbibed_Seeds_P Parameter: Plant Line Value: 35A19
  misc_feature: MA Experiment 108529 PARAMETER Experiment Name: Zm_Imbibed_Seeds_P Parameter: Tissue Value: Roots vs. Embryo
  misc_feature: MA Experiment ID: 108530 Result: Up-regulated in Transcription
  misc_feature: MA Experiment 108530 PARAMETER Experiment Name: Zm_Imbibed_Seeds_P Parameter: Age (day) Value: 6 vs. 2
  misc_feature: MA Experiment 108530 PARAMETER Experiment Name: Zm_Imbibed_Seeds_P Parameter: Organism Value: Zea mays
  misc_feature: MA Experiment 108530 PARAMETER Experiment Name: Zm_Imbibed_Seeds_P Parameter: Plant Line Value: 35A19
  misc_feature: MA Experiment 108530 PARAMETER Experiment Name: Zm_Imbibed_Seeds_P Parameter: Tissue Value: Aerial vs. Embryo
  misc_feature: MA Experiment ID: 108533 Result: Up-regulated in Transcription
  misc_feature: MA Experiment 108533 PARAMETER Experiment Name: Zm_4deg_Cold_P Parameter: Age (hr) Value: 8
  misc_feature: MA Experiment 108533 PARAMETER Experiment Name: Zm_4deg_Cold_P Parameter: Organism Value: Zea mays
  misc_feature: MA Experiment 108533 PARAMETER Experiment Name: Zm_4deg_Cold_P Parameter: Plant Line Value: 35A19
  misc_feature: MA Experiment 108533 PARAMETER Experiment Name: Zm_4deg_Cold_P Parameter: Temperature (deg C) Value: 4 vs. 22
  misc_feature: MA Experiment 108533 PARAMETER Experiment Name: Zm_4deg_Cold_P Parameter: Timepoint (hr) Value: 1
  misc_feature: MA Experiment 108533 PARAMETER Experiment Name: Zm_4deg_Cold_P Parameter: Tissue Value: Aerial
  misc_feature: MA Experiment ID: 108534 Result: Up-regulated in Transcription
  misc_feature: MA Experiment 108534 PARAMETER Experiment Name: Zm_4deg_Cold_P Parameter: Age (hr) Value: 8
  misc_feature: MA Experiment 108534 PARAMETER Experiment Name: Zm_4deg_Cold_P Parameter: Organism Value: Zea mays
  misc_feature: MA Experiment 108534 PARAMETER Experiment Name: Zm_4deg_Cold_P Parameter: Plant Line Value: 35A19
  misc_feature: MA Experiment 108534 PARAMETER Experiment Name: Zm_4deg_Cold_P Parameter: Temperature (deg C) Value: 4 vs. 22
  misc_feature: MA Experiment 108534 PARAMETER Experiment Name: Zm_4deg_Cold_P Parameter: Timepoint (hr) Value: 6
  misc_feature: MA Experiment 108534 PARAMETER Experiment Name: Zm_4deg_Cold_P Parameter: Tissue Value: Aerial
  misc_feature: MA Experiment ID: 108535 Result: Down-regulated in Transcription
  misc_feature: MA Experiment 108535 PARAMETER Experiment Name: Zm_Meristem_P Parameter: Age (day) Value: 8
  misc_feature: MA Experiment 108535 PARAMETER Experiment Name: Zm_Meristem_P Parameter: Organism Value: Zea mays
  misc_feature: MA Experiment 108535 PARAMETER Experiment Name: Zm_Meristem_P Parameter: Plant Line Value: 35A19
  misc_feature: MA Experiment 108535 PARAMETER Experiment Name: Zm_Meristem_P Parameter: Tissue Value: Root Meristem vs. Above Root Meristem
  misc_feature: MA Experiment ID: 108536 Result: Up-regulated in Transcription
  misc_feature: MA Experiment 108536 PARAMETER Experiment Name: Zm_Meristem_P Parameter: Age (day) Value: 8
  misc_feature: MA Experiment 108536 PARAMETER Experiment Name: Zm_Meristem_P Parameter: Organism Value: Zea mays
  misc_feature: MA Experiment 108536 PARAMETER Experiment Name: Zm_Meristem_P Parameter: Plant Line Value: 35A19
  misc_feature: MA Experiment 108536 PARAMETER Experiment Name: Zm_Meristem_P Parameter: Tissue Value: Shoot Meristem vs. Above Shoot Meristem
  misc_feature: MA Experiment ID: 108545 Result: Down-regulated in Transcription
  misc_feature: MA Experiment 108545 PARAMETER Experiment Name: Zm_Imbibed_Seeds_P Parameter: Age (day) Value: 3 vs. 2
  misc_feature: MA Experiment 108545 PARAMETER Experiment Name: Zm_Imbibed_Seeds_P Parameter: Organism Value: Zea mays
  misc_feature: MA Experiment 108545 PARAMETER Experiment Name: Zm_Imbibed_Seeds_P Parameter: Plant Line Value: 35A19
  misc_feature: MA Experiment 108545 PARAMETER Experiment Name: Zm_Imbibed_Seeds_P Parameter: Tissue Value: Aerial vs. Embryo
  misc_feature: MA Experiment ID: 108688 Result: Down-regulated in Transcription
  misc_feature: MA Experiment 108688 PARAMETER Experiment Name: Zm_Embryos-Flowers__P Parameter: Tissue Value: Immature Flowers vs. Aerial+
  misc_feature: MA Experiment ID: 20000108 Result: Down-regulated in Transcription
  misc_feature: MA Experiment 20000108 PARAMETER Experiment Name: Zm_Root-Tips_P Parameter: Age (day) Value: 12
  misc_feature: MA Experiment 20000108 PARAMETER Experiment Name: Zm_Root-Tips_P Parameter: Organism Value: Zea mays
  misc_feature: MA Experiment 20000108 PARAMETER Experiment Name: Zm_Root-Tips_P Parameter: Tissue Value: Root tips vs. Root mid region    35
  misc_feature: MA Experiment 20000108 PARAMETER Experiment Name: Zm_Root-Tips_P Parameter: Tissue Value: Root tips vs. Root mid region   Sequence Listing-Misc Features (4)
  misc_feature: MA Experiment ID: 20000534 Result: Down-regulated in Transcription
  misc_feature: MA Experiment 20000534 PARAMETER Experiment Name: Zm_Hybrid_Pollen_P Parameter: Age (day) Value: 8
  misc_feature: MA Experiment 20000534 PARAMETER Experiment Name: Zm_Hybrid_Pollen_P Parameter: Organism Value: Zea mays
  misc_feature: MA Experiment 20000534 PARAMETER Experiment Name: Zm_Hybrid_Pollen_P Parameter: Plant Line Value: 35A19
  misc_feature: MA Experiment 20000534 PARAMETER Experiment Name: Zm_Hybrid_Pollen_P Parameter: Tissue Value: Pollen vs. Aerial
  misc_feature: MA Experiment ID: 20000535 Result: Down-regulated in Transcription
  misc_feature: MA Experiment 20000535 PARAMETER Experiment Name: Zm_Hybrid_Seed_Dev_P Parameter: DAP Value: 30 vs. 12
  misc_feature: MA Experiment 20000535 PARAMETER Experiment Name: Zm_Hybrid_Seed_Dev_P Parameter: Organism Value: Zea mays
  misc_feature: MA Experiment 20000535 PARAMETER Experiment Name: Zm_Hybrid_Seed_Dev_P Parameter: Plant Line Value: 35A19
  misc_feature: MA Experiment 20000535 PARAMETER Experiment Name: Zm_Hybrid_Seed_Dev_P Parameter: Tissue Value: Embryo vs. Unfert Floret
atcaaactaaaaaaaatctcaattctcaaagtcgtcgatccagcggtagcagcgcacaaaccgatcgatctcggagagggagagaaccaaccaatttcatcgccgatcaaacaaggaaaaaagatcccggccatggcgacgcggtcgctggagctgacgctgatctcgggcaaggacctcaaggacgtgaacctgatgtccaggatggaggtctacgccgtggtgtcgctctccggcgacccccggtcgcggcagcgggtccaggccgaccgcaccggcggccgcaacccgacctggaacgccacgctccgcttcgccgtcccggccaccggcgccggctccctccacgtcctcctccgcgccgagcgcgccctcggcgaccgcgacgtcggcgaggtccacatcccgctgtccgagctcctctccggcgcccccgacggccccgtccccgccaagttcgtggcctaccaggtgcgcaagatctcctccggcaagccccagggagttctcaacctgtcgtacaagctcggcgaggtcgccaacggctacgcccccgcttccgccgcccagtccgcctacgcccatcctccaccgaccgccgcgtacccgcctccttcaggcaaggctgacgcctacgcgcctcccgccgcgtacccgcctccttcgggcaaggccgacgcgtacgcgccccctgccgcatacccgccggcaaccaaggccgacgcgtacccacctccatacggcgcctacccgcccgccggcggcaaggccgacgctgcttacccgccgtcatccggctacccacccgcggcggcaggcaagccaggcaaggggggcgaaccggtgacggcctacccttcggccggtcccagcacggcggcgccctacgctgctcctccgccgcagtacggcggctacggttacccgccgcagcagggcgcgggctacggctacccgcccccgccgccgcagcaggcggggtacgggtacggctacccgccgccgcaggccgccggctacgggtaccagcagcaggccgtgaggccgcagaagaagaagaacaacttcgggatggggctcggggccgggctgctcggaggcgccgtcgggggcctcctgatcggcgacatgatctcggactcgtcggcgtacgacgccgggttcgacgatggcggcggcttcgatttctagcgcgctccggtggcatgggcgattgggcggtgacgccacgccgcgcatcagagacggagaggttcccgttttggatttgccttttgtgatttgtttccttctgtacgcaatctatgtaattgtcggaacgaaatcaatcaagattatgc

SEQ ID NO: 3454 - protein, 396 aa, Zea mays subsp. mays
  peptide (1)..(396): Ceres Seq. ID no. 12406799
  misc_feature (50)..(134): Pfam Name: C2 domain Pfam Description: C2 domain
  misc_feature (45)..(224): Homolog of NCBI NO: 34899336 NR Description: similar to shock protein SRC2
  misc_feature (45)..(317): Homolog of NCBI NO: 34914738 NR Description: putative shock protein SRC2
  misc_feature (43)..(317): Homolog of NCBI NO: 14091842 NR Description: Putative shock protein [Oryza sativa]
  misc_feature (45)..(331): Homolog of NCBI NO: 18390977 NR Description: expressed protein
  misc_feature (45)..(331): Homolog of NCBI NO: 11358845 NR Description: shock protein SRC2 homolog [imported] -
  misc_feature (45)..(298): Homolog of NCBI NO: 34899340 NR Description: putative shock protein SRC2
  misc_feature (45)..(380): Homolog of NCBI NO: 15228227 NR Description: unknown protein; protein id: At3g16510.1
  misc_feature (45)..(396): Homolog of NCBI NO: 34907166 NR Description: P0423A12.20 [Oryza sativa (japonica
IKLKKISILKVVDPAVAAHKPIDLGEGENQPISSPIKQGKKIPAMATRSLELTLISGKDLKDVNLMSRMEVYAVVSLSGDPRSRQRVQADRTGGRNPTWNATLRFAVPATGAGSLHVLLRAERALGDRDVGEVHIPLSELLSGAPDGPVPAKFVAYQVRKISSGKPQGVLNLSYKLGEVANGYAPASAAQSAYAHPPPTAAYPPPSGKADAYAPPAAYPPPSGKADAYAPPAAYPPATKADAYPPPYGAYPPAGGKADAAYPPSSGYPPAAAGKPGKGGEPVTAYPSAGPSTAAPYAAPPPQYGGYGYPPQQGAGYGYPPPPPQQAGYGYGYPPPQAAGYGYQQQAVRPQKKKNNFGMGLGAGLLGGAVGGLLIGDMISDSSAYDAGFDDGGGFDF

SEQ ID NO: 3455 - protein, 352 aa, Zea mays subsp. mays
  peptide (1)..(352): Ceres Seq. ID no. 12406800
  misc_feature (6)..(90): Pfam Name: C2 domain Pfam Description: C2 domain
  misc_feature (1)..(180): Homolog of NCBI NO: 34899336 NR Description: similar to shock protein SRC2
  misc_feature (1)..(273): Homolog of NCBI NO: 34914738 NR Description: putative shock protein SRC2
  misc_feature (1)..(273): Homolog of NCBI NO: 14091842 NR Description: Putative shock protein [Oryza sativa]
  misc_feature (1)..(287): Homolog of NCBI NO: 18390977 NR Description: expressed protein
  misc_feature (1)..(287): Homolog of NCBI NO: 11358845 NR Description: shock protein SRC2 homolog [imported] -
  misc_feature (1)..(254): Homolog of NCBI NO: 34899340 NR Description: putative shock protein SRC2
  misc_feature (1)..(336): Homolog of NCBI NO: 15228227 NR Description: unknown protein; protein id: At3g16510.1
  misc_feature (1)..(352): Homolog of NCBI NO: 34907166 NR Description: P0423A12.20 [Oryza sativa (japonica
MATRSLELTLISGKDLKDVNLMSRMEVYAVVSLSGDPRSRQRVQADRTGGRNPTWNATLRFAVPATGAGSLHVLLRAERALGDRDVGEVHIPLSELLSGAPDGPVPAKFVAYQVRKISSGKPQGVLNLSYKLGEVANGYAPASAAQSAYAHPPPTAAYPPPSGKADAYAPPAAYPPPSGKADAYAPPAAYPPATKADAYPPPYGAYPPAGGKADAAYPPSSGYPPAAAGKPGKGGEPVTAYPSAGPSTAAPYAAPPPQYGGYGYPPQQGAGYGYPPPPPQQAGYGYGYPPPQAAGYGYQQQAVRPQKKKNNFGMGLGAGLLGGAVGGLLIGDMISDSSAYDAGFDDGGGFDF

SEQ ID NO: 3456 - protein, 331 aa, Zea mays subsp. mays
  peptide (1)..(331): Ceres Seq. ID no. 12406801
  misc_feature (1)..(69): Pfam Name: C2 domain Pfam Description: C2 domain
  misc_feature (1)..(159): Homolog of NCBI NO: 34899336 NR Description: similar to shock protein SRC2
  misc_feature (1)..(252): Homolog of NCBI NO: 34914738 NR Description: putative shock protein SRC2
  misc_feature (1)..(252): Homolog of NCBI NO: 14091842 NR Description: Putative shock protein [Oryza sativa]
  misc_feature (1)..(266): Homolog of NCBI NO: 18390977 NR Description: expressed protein
  misc_feature (1)..(266): Homolog of NCBI NO: 11358845 NR Description: shock protein SRC2 homolog [imported] -
  misc_feature (1)..(233): Homolog of NCBI NO: 34899340 NR Description: putative shock protein SRC2
  misc_feature (1)..(315): Homolog of NCBI NO: 15228227 NR Description: unknown protein; protein id: At3g16510.1
  misc_feature (1)..(331): Homolog of NCBI NO: 34907166 NR Description: P0423A12.20 [Oryza sativa (japonica
MSRMEVYAVVSLSGDPRSRQRVQADRTGGRNPTWNATLRFAVPATGAGSLHVLLRAERALGDRDVGEVHIPLSELLSGAPDGPVPAKFVAYQVRKISSGKPQGVLNLSYKLGEVANGYAPASAAQSAYAHPPPTAAYPPPSGKADAYAPPAAYPPPSGKADAYAPPAAYPPATKADAYPPPYGAYPPAGGKADAAYPPSSGYPPAAAGKPGKGGEPVTAYPSAGPSTAAPYAAPPPQYGGYGYPPQQGAGYGYPPPPPQQAGYGYGYPPPQAAGYGYQQQAVRPQKKKNNFGMGLGAGLLGGAVGGLLIGDMISDSSAYDAGFDDGGGFDF

SEQ ID NO: 3457 - DNA, 1361 bp, Zea mays subsp. mays
  misc_feature (1)..(1361): Ceres Seq. ID no. 12366880
  misc_feature: MA Experiment ID: 108529 Result: Up-regulated in Transcription
  misc_feature: MA Experiment 108529 PARAMETER Experiment Name: Zm_Imbibed_Seeds_P Parameter: Age (day) Value: 5 vs. 2
  misc_feature: MA Experiment 108529 PARAMETER Experiment Name: Zm_Imbibed_Seeds_P Parameter: Organism Value: Zea mays
  misc_feature: MA Experiment 108529 PARAMETER Experiment Name: Zm_Imbibed_Seeds_P Parameter: Plant Line Value: 35A19
  misc_feature: MA Experiment 108529 PARAMETER Experiment Name: Zm_Imbibed_Seeds_P Parameter: Tissue Value: Roots vs. Embryo
  misc_feature: MA Experiment ID: 108535 Result: Down-regulated in Transcription
  misc_feature: MA Experiment 108535 PARAMETER Experiment Name: Zm_Meristem_P Parameter: Age (day) Value: 8
  misc_feature: MA Experiment 108535 PARAMETER Experiment Name: Zm_Meristem_P Parameter: Organism Value: Zea mays
  misc_feature: MA Experiment 108535 PARAMETER Experiment Name: Zm_Meristem_P Parameter: Plant Line Value: 35A19
  misc_feature: MA Experiment 108535 PARAMETER Experiment Name: Zm_Meristem_P Parameter: Tissue Value: Root Meristem vs. Above Root Meristem
  misc_feature: MA Experiment ID: 108544 Result: Up-regulated in Transcription
gccagccctcctcttccggcggctcctcggccctcgcggaactcgccacatcccccattgcccccgtcgcccgttcgctccccgtccgaattatttactcaaatcattcatcgccggcccgtcccactcccacctccccaagcaacctgaccacgccaccccgcgaggtccgcgataccgtccaaatccacgcgataacaaccaggccgtcccccttccttccttccctcccgtatatagctagcgaggggcgtggcaatggttcttcagctccgcctgatcccgcgcctggctgccgcagccaggttgacgcccgcgacttcctgcgctccccggctgctcctgcggcgcgcgccgttaccaccggccctcgcgatggcgtcggcgtacagcgccggttacggcgcgggcaggaggctgctattcaggcagctgttcgagaaggagagctccacgtacacctacctcctcgccgacgtcgccgaccccgacaggcccgccgtgctgattgaccctgtcgacagaacagttgacagagatcttaatcttatcaaggaattgggcttaaagctcgtgtttgctatgaatactcatgtacatgctgatcacgtcactggaacaggactaataaaaactaaggtacctggagttaagtctgttatttcaaaagctagtggagcaaaagctgatcattttgttgatcatggggacaaaatacactttggtaaccttttccttgaggtgcgagctactccaggccatacctctggctgtgtgacttatgttacaggtgatgctgatgggcaaccttcaccaaggatggcttttactggtgatgccttaattatccgggcatgtggaaggactgacttccagggaggaagttctgagcagttgtatcagtcagtgcattcacagattttcacattgccaaaggatacactactttatcctgctcatgactataaaggtttcacggtaagtactgttgaagaggaggctgcctataatgctcgactcacaaaagataaggaaactttcaagacgatcatgaataacttgaatttgtcatatccaaagatgatggatgtagctgtacctgccaatttggtctgcggtatccaggatccaccaccgaagatctgagctgttcccgtggaagcctgcaactgcacttctggttgtttatgaactctggatcgccaccagaggcttgcagctgagttgttcattaaataatttgtttgctgcatcctgtgatatcgcgagaaaataatctaaccaatggccggtgtagcctctggttgtatgtggcaaagcactattgtttagagagatcaaaaggaacaatgctgatagcc

SEQ ID NO: 3458 - protein, 295 aa, Zea mays subsp. mays
  peptide (1)..(295): Ceres Seq. ID no. 12366881
  misc_feature (65)..(234): Pfam Name: Metallo-beta-lactamase superfamily Pfam Description: Metallo-beta-lactamase superfamily
  misc_feature (50)..(292): Homolog of NCBI NO: 27676450 NR Description: similar to HSCO protein [Mus musculus] [Rattus
  misc_feature (49)..(291): Homolog of NCBI NO: 14198377 NR Description: Similar to RIKEN cDNA 0610025L15 gene [Homo
  misc_feature (50)..(292): Homolog of NCBI NO: 12963539 NR Description: HSCO protein [Mus musculus]
  misc_feature (37)..(291): Homolog of NCBI NO: 27371293 NR Description: Similar to RIKEN cDNA 0610025L15 gene [Xenopus
  misc_feature (241)..(292): Homolog of NCBI NO: 8671869 NR Description: Contains similarity to an unknown glyoxalase II Arabidopsis thaliana gb|U74610 and contains a PF|00753 domain. ESTs gb|AI999524, gb|AI100252, gb|AI099807,
  misc_feature (10)..(241): Homolog of NCBI NO: 8671869 NR Description: Contains similarity to an unknown glyoxalase II Arabidopsis thaliana gb|U74610 and contains a PF|00753 domain. ESTs gb|AI999524, gb|AI100252, gb|AI099807,
  misc_feature (38)..(292): Homolog of NCBI NO: 18404530 NR Description: glyoxalase II, putative (hydroxyacylglutathione
  misc_feature (38)..(292): Homolog of NCBI NO: 1644427 NR Description: glyoxalase II [Arabidopsis thaliana]
  misc_feature (10)..(292): Homolog of NCBI NO: 25405648 NR Description: probable glyoxalase II, 78941-80643
  misc_feature (1)..(293): Homolog of NCBI NO: 34910930 NR Description: putative glyoxalase II [Oryza sativa (japonica
MVLQLRLIPRLAAAARLTPATSCAPRLLLRRAPLPPALAMASAYSAGYGAGRRLLFRQLFEKESSTYTYLLADVADPDRPAVLIDPVDRTVDRDLNLIKELGLKLVFAMNTHVHADHVTGTGLIKTKVPGVKSVISKASGAKADHFVDHGDKIHFGNLFLEVRATPGHTSGCVTYVTGDADGQPSPRMAFTGDALIIRACGRTDFQGGSSEQLYQSVHSQIFTLPKDTLLYPAHDYKGFTVSTVEEEAAYNARLTKDKETFKTIMNNLNLSYPKMMDVAVPANLVCGIQDPPPKI

SEQ ID NO: 3459 - protein, 256 aa, Zea mays subsp. mays
  peptide (1)..(256): Ceres Seq. ID no. 12366882
  misc_feature (26)..(195): Pfam Name: Metallo-beta-lactamase superfamily Pfam Description: Metallo-beta-lactamase superfamily
  misc_feature (1)..(253): Homolog of NCBI NO: 18404530 NR Description: glyoxalase II, putative (hydroxyacylglutathione
  misc_feature (1)..(253): Homolog of NCBI NO: 1644427 NR Description: glyoxalase II [Arabidopsis thaliana]
  misc_feature (11)..(253): Homolog of NCBI NO: 27676450 NR Description: similar to HSCO protein [Mus musculus] [Rattus
  misc_feature (11)..(253): Homolog of NCBI NO: 12963539 NR Description: HSCO protein [Mus musculus]
  misc_feature (202)..(253): Homolog of NCBI NO: 8671869 NR Description: Contains similarity to an unknown glyoxalase II Arabidopsis thaliana gb|U74610 and contains a PF|00753 domain. ESTs gb|AI999524, gb|AI100252, gb|AI099807,
  misc_feature (1)..(202): Homolog of NCBI NO: 8671869 NR Description: Contains similarity to an unknown glyoxalase II Arabidopsis thaliana gb|U74610 and contains a PF|00753 domain. ESTs gb|AI999524, gb|AI100252, gb|AI099807,
  misc_feature (1)..(252): Homolog of NCBI NO: 27371293 NR Description: Similar to RIKEN cDNA 0610025L15 gene [Xenopus
  misc_feature (10)..(252): Homolog of NCBI NO: 14198377 NR Description: Similar to RIKEN cDNA 0610025L15 gene [Homo
  misc_feature (1)..(253): Homolog of NCBI NO: 25405648 NR Description: probable glyoxalase II, 78941-80643
  misc_feature (1)..(254): Homolog of NCBI NO: 34910930 NR Description: putative glyoxalase II [Oryza sativa (japonica
MASAYSAGYGAGRRLLFRQLFEKESSTYTYLLADVADPDRPAVLIDPVDRTVDRDLNLIKELGLKLVFAMNTHVHADHVTGTGLIKTKVPGVKSVISKASGAKADHFVDHGDKIHFGNLFLEVRATPGHTSGCVTYVTGDADGQPSPRMAFTGDALIIRACGRTDFQGGSSEQLYQSVHSQIFTLPKDTLLYPAHDYKGFTVSTVEEEAAYNARLTKDKETFKTIMNNLNLSYPKMMDVAVPANLVCGIQDPPPKI

SEQ ID NO: 3460 - protein, 187 aa, Zea mays subsp. mays
  peptide (1)..(187): Ceres Seq. ID no. 12366883
  misc_feature (1)..(126): Pfam Name: Metallo-beta-lactamase superfamily Pfam Description: Metallo-beta-lactamase superfamily
  misc_feature (1)..(184): Homolog of NCBI NO: 27676450 NR Description: similar to HSCO protein [Mus musculus] [Rattus
  misc_feature (1)..(183): Homolog of NCBI NO: 14198377 NR Description: Similar to RIKEN cDNA 0610025L15 gene [Homo
  misc_feature (1)..(184): Homolog of NCBI NO: 12963539 NR Description: HSCO protein [Mus musculus]
  misc_feature (1)..(183): Homolog of NCBI NO: 27371293 NR Description: Similar to RIKEN cDNA 0610025L15 gene [Xenopus
  misc_feature (133)..(184): Homolog of NCBI NO: 8671869 NR Description: Contains similarity to an unknown glyoxalase II Arabidopsis thaliana gb|U74610 and contains a PF|00753 domain. ESTs gb|AI999524, gb|AI100252, gb|AI099807,
  misc_feature (1)..(133): Homolog of NCBI NO: 8671869 NR Description: Contains similarity to an unknown glyoxalase II Arabidopsis thaliana gb|U74610 and contains a PF|00753 domain. ESTs gb|AI999524, gb|AI100252, gb|AI099807,
  misc_feature (1)..(184): Homolog of NCBI NO: 18404530 NR Description: glyoxalase II, putative (hydroxyacylglutathione
  misc_feature (1)..(184): Homolog of NCBI NO: 1644427 NR Description: glyoxalase II [Arabidopsis thaliana]
  misc_feature (1)..(184): Homolog of NCBI NO: 25405648 NR Description: probable glyoxalase II, 78941-80643
  misc_feature (1)..(185): Homolog of NCBI NO: 34910930 NR Description: putative glyoxalase II [Oryza sativa (japonica
MNTHVHADHVTGTGLIKTKVPGVKSVISKASGAKADHFVDHGDKIHFGNLFLEVRATPGHTSGCVTYVTGDADGQPSPRMAFTGDALIIRACGRTDFQGGSSEQLYQSVHSQIFTLPKDTLLYPAHDYKGFTVSTVEEEAAYNARLTKDKETFKTIMNNLNLSYPKMMDVAVPANLVCGIQDPPPKI

SEQ ID NO: 3461 - DNA, 1865 bp, Zea mays subsp. mays
  misc_feature (1)..(1865): Ceres Seq. ID no. 12406164
  misc_feature: MA Experiment ID: 108527 Result: Up-regulated in Transcription
  misc_feature: MA Experiment 108527 PARAMETER Experiment Name: Zm_5mM_NO_P Parameter: Age (day) Value: 8
  misc_feature: MA Experiment 108527 PARAMETER Experiment Name: Zm_5mM_NO_P Parameter: Organism Value: Zea mays
  misc_feature: MA Experiment 108527 PARAMETER Experiment Name: Zm_5mM_NO_P Parameter: Plant Line Value: 35A19
  misc_feature: MA Experiment 108527 PARAMETER Experiment Name: Zm_5mM_NO_P Parameter: Timepoint (hr) Value: 6
  misc_feature: MA Experiment 108527 PARAMETER Experiment Name: Zm_5mM_NO_P Parameter: Tissue Value: Aerial
  misc_feature: MA Experiment 108527 PARAMETER Experiment Name: Zm_5mM_NO_P Parameter: Treatment Value: 5mM NO vs. No Treatment
  misc_feature: MA Experiment ID: 108556 Result: Up-regulated in Transcription
  misc_feature: MA Experiment 108556 PARAMETER Experiment Name: Zm_Drought_P Parameter: Age (day) Value: 9
  misc_feature: MA Experiment 108556 PARAMETER Experiment Name: Zm_Drought_P Parameter: Organism Value: Zea mays
  misc_feature: MA Experiment 108556 PARAMETER Experiment Name: Zm_Drought_P Parameter: Plant Line Value: 35A19
  misc_feature: MA Experiment 108556 PARAMETER Experiment Name: Zm_Drought_P Parameter: Timepoint (hr) Value: 24
  misc_feature: MA Experiment 108556 PARAMETER Experiment Name: Zm_Drought_P Parameter: Tissue Value: Aerial
  misc_feature: MA Experiment 108556 PARAMETER Experiment Name: Zm_Drought_P Parameter: Treatment Value: Drought vs. No Drought
  misc_feature: MA Experiment ID: 108597 Result: Up-regulated in Transcription
  misc_feature: MA Experiment 108597 PARAMETER Experiment Name: Zm_100uM_ABA_P Parameter: Age (day) Value: 9
  misc_feature: MA Experiment 108597 PARAMETER Experiment Name: Zm_100uM_ABA_P Parameter: Organism Value: Zea mays
  misc_feature: MA Experiment 108597 PARAMETER Experiment Name: Zm_100uM_ABA_P Parameter: Plant Line Value: 35A19
  misc_feature: MA Experiment 108597 PARAMETER Experiment Name: Zm_100uM_ABA_P Parameter: Timepoint (hr) Value: 24
  misc_feature: MA Experiment 108597 PARAMETER Experiment Name: Zm_100uM_ABA_P Parameter: Tissue Value: Aerial
  misc_feature: MA Experiment 108597 PARAMETER Experiment Name: Zm_100uM_ABA_P Parameter: Treatment Value: 100uM ABA vs. No Treatment
  misc_feature: MA Experiment ID: 20000478 Result: Up-regulated in Transcription
  misc_feature: MA Experiment 20000478 PARAMETER Experiment Name: Zm_5mM_SA_P Parameter: Age (day) Value: 11
  misc_feature: MA Experiment 20000478 PARAMETER Experiment Name: Zm_5mM_SA_P Parameter: Organism Value: Zea mays
  misc_feature: MA Experiment 20000478 PARAMETER Experiment Name: Zm_5mM_SA_P Parameter: Plant Line Value: 35A19
  misc_feature: MA Experiment 20000478 PARAMETER Experiment Name: Zm_5mM_SA_P Parameter: Timepoint (hr) Value: 72
  misc_feature: MA Experiment 20000478 PARAMETER Experiment Name: Zm_5mM_SA_P Parameter: Tissue Value: Aerial
  misc_feature: MA Experiment 20000478 PARAMETER Experiment Name: Zm_5mM_SA_P Parameter: Treatment Value: 5mM SA vs. No Treatment
  misc_feature: MA Experiment ID: 20000479 Result: Up-regulated in Transcription
  misc_feature: MA Experiment 20000479 PARAMETER Experiment Name: Zm_Drought_P Parameter: Age (day) Value: 10
  misc_feature: MA Experiment 20000479 PARAMETER Experiment Name: Zm_Drought_P Parameter: Organism Value: Zea mays
  misc_feature: MA Experiment 20000479 PARAMETER Experiment Name: Zm_Drought_P Parameter: Plant Line Value: 35A19
  misc_feature: MA Experiment 20000479 PARAMETER Experiment Name: Zm_Drought_P Parameter: Timepoint (hr) Value: 48
  misc_feature: MA Experiment 20000479 PARAMETER Experiment Name: Zm_Drought_P Parameter: Tissue Value: Aerial
  misc_feature: MA Experiment 20000479 PARAMETER Experiment Name: Zm_Drought_P Parameter: Treatment Value: Drought vs. No Drought
  misc_feature: MA Experiment ID: 20000480 Result: Up-regulated in Transcription
  misc_feature: MA Experiment 20000480 PARAMETER Experiment Name: Zm_Drought_P Parameter: Age (day) Value: 11
  misc_feature: MA Experiment 20000480 PARAMETER Experiment Name: Zm_Drought_P Parameter: Organism Value: Zea mays
  misc_feature: MA Experiment 20000480 PARAMETER Experiment Name: Zm_Drought_P Parameter: Plant Line Value: 35A19
  misc_feature: MA Experiment 20000480 PARAMETER Experiment Name: Zm_Drought_P Parameter: Timepoint (hr) Value: 72
  misc_feature: MA Experiment 20000480 PARAMETER Experiment Name: Zm_Drought_P Parameter: Tissue Value: Aerial
  misc_feature: MA Experiment 20000480 PARAMETER Experiment Name: Zm_Drought_P Parameter: Treatment Value: Drought vs. No Drought
  misc_feature: MA Experiment ID: 20000626 Result: Down-regulated in Transcription
  misc_feature: MA Experiment 20000626 PARAMETER Experiment Name: Zm_Herbicide-Treatments_P Parameter: Timepoint (hr) Value: 12
  misc_feature: MA Experiment 20000626 PARAMETER Experiment Name: Zm_Herbicide-Treatments_P Parameter: Tissue Value: Aerial
  misc_feature: MA Experiment 20000626 PARAMETER Experiment Name: Zm_Herbicide-Treatments_P Parameter: Treatment Value: Roundup vs. No Treatment
  misc_feature: MA Experiment ID: 20000629 Result: Down-regulated in Transcription
  misc_feature: MA Experiment 20000629 PARAMETER Experiment Name: Zm_Herbicide-Treatments_P Parameter: Timepoint (hr) Value: 12
  misc_feature: MA Experiment 20000629 PARAMETER Experiment Name: Zm_Herbicide-Treatments_P Parameter: Tissue Value: Aerial
  misc_feature: MA Experiment 20000629 PARAMETER Experiment Name: Zm_Herbicide-Treatments_P Parameter: Treatment Value: Trimec vs. No Treatment
gaaaaatcggtttctcggaagcctgtcaaacacggactggcttagtcaaagccggctttcagacatataatcgcgctcgccgtcgtgcgcacggcagtcggcaggcagtaccggagcagccgtgccaggccccatggacagctcgagcggcatgtgggccgtgctcggccaggcctcgaacgtggcgcagctggtcggcgtggacgcgctcgggctggtgtccatggtcgtgcaggccgcgctggcggcgcgccgccaccgcgacgcgtgccgccggctggcgcagcacgtggaggtcgtcggcggcctgctgcgggagctggagctcgccgagctgatgcggcgggaggccacgcggcggccgctcgaccagctccgggccgcgctgcggcggtgctacgcgctcgtcacggcgtgccaggactgcgggtacctccgcagcctgctcctcggcgcccggatggccgacgagctccgcgcggcggagaaggaggtcgacttgttcatccgcttagtcccacttatcgccctcgtcgacagcacgcatggtcgcagtggcaagactgccgagggagtaccaggtctactcacgaacggttcaaaccatcatgtcaggttttcaagaagtgtttccgcctccatcaaaatacacattcaacgaactactcaaatctgcagtattgcagaacagccattagcaggagcactggacttgggagaacataaaaatctggactttgaagaattgttggagctttgcatccgtactcaagagagttgctcaggattcagaaggtttttgaattatttcagatcattgacgctacaggcaatttcccggaaagtagaatcatcgggtcgggtggttttgctatagtttacaagggtcagttacctgatggatccatggtcgccatcaaaaggatggatgaaggtgccacaatgtttgatttcagcagtgaatttctggctgcgaggcttcagcataccaatctaattagacttttggggtggtgtatccatgggaaagaaaggattctagtgtatgagttcatgcacaagggtaccctgcacagtttaatctttgacaaaagaatggggttgttgctagactggtctaaacgaatcgatataatcagaggggtagctgaaggacttctttaccttcacaaacagtccaagttatggattgttcatagggatttgaagcccaggaacgtcctattagatcatgacatgaagccaaagcttgctgattttggatcggctagaactctgacttcggattccgctgaagagtgtacaagcagggttgtggggactagtggctacaaagctcctgagtacacgtctcgaggtgtctattcactgaagacagatgtgttcagcttcggggtggtggttctagtgaccatcagcggncgagagaacnccatactggagaagcaaggagactctgttggcacccttgtacgagatgcctggcagctatggaacgatggaaggctgcatgagcttgtagatccagtgctgggtgacggattcgaacttgctgaggtggcgcaggaggagccagcagatcgtcccaccatgtccgacgtcgtgtcgctcctgaactttgaaagcataggtctgctgccagatcctaagcagccgtctgagctttgtaagggaggtggtggtacttctggtgacaggttgccgacatgtggtagccagtcgagcaggaccatagacatcacaatcacaagttcagctcctgtgtcaactagaactagggtccgcatcattgtggacccagagacctaaaatgtagacataaaccgatgttaatatgtaaaagaacatggagaacttttaaggcc

SEQ ID NO: 3462 - protein, 300 aa, Zea mays subsp. mays
  peptide (1)..(300): Ceres Seq. ID no. 12406165
  misc_feature (1)..(250): Homolog of NCBI NO: 7488195 NR Description: probable serine/threonine-specific protein kinase
  misc_feature (1)..(251): Homolog of NCBI NO: 37530902 NR Description: putative receptor-like protein kinase 4
  misc_feature (1)..(285): Homolog of NCBI NO: 15236453 NR Description: serine/threonine kinase - like protein; protein
  misc_feature (1)..(283): Homolog of NCBI NO: 34915174 NR Description: receptor kinase-like protein
  misc_feature (1)..(250): Homolog of NCBI NO: 37530904 NR Description: putative protein kinase [Oryza sativa (japonica
  misc_feature (1)..(251): Homolog of NCBI NO: 34913760 NR Description: OSJNBa0051H17.28 [Oryza sativa (japonica
  misc_feature (1)..(251): Homolog of NCBI NO: 34898778 NR Description: OJ1131_E05.14 [Oryza sativa (japonica
  misc_feature (1)..(251): Homolog of NCBI NO: 33146474 NR Description: putative receptor-like protein kinase 4
  misc_feature (1)..(251): Homolog of NCBI NO: 28564782 NR Description: P0683C09.26 [Oryza sativa (japonica
  misc_feature (1)..(294): Homolog of NCBI NO: 38423996 NR Description: receptor-like kinase CHRK1-like
  misc_feature (172)..(172): Xaa is any aa, unknown or other
  misc_feature (176)..(176): Xaa is any aa, unknown or other
MVAIKRMDEGATMFDFSSEFLAARLQHTNLIRLLGWCIHGKERILVYEFMHKGTLHSLIFDKRMGLLLDWSKRIDIIRGVAEGLLYLHKQSKLWIVHRDLKPRNVLLDHDMKPKLADFGSARTLTSDSAEECTSRVVGTSGYKAPEYTSRGVYSLKTDVFSFGVVVLVTISXRENXILEKQGDSVGTLVRDAWQLWNDGRLHELVDPVLGDGFELAEVAQEEPADRPTMSDVVSLLNFESIGLLPDPKQPSELCKGGGGTSGDRLPTCGSQSSRTIDITITSSAPVSTRTRVRIIVDPET

SEQ ID NO: 3463 - protein, 294 aa, Zea mays subsp. mays
  peptide (1)..(294): Ceres Seq. ID no. 12406166
  misc_feature (1)..(244): Homolog of NCBI NO: 7488195 NR Description: probable serine/threonine-specific protein kinase
  misc_feature (1)..(245): Homolog of NCBI NO: 37530902 NR Description: putative receptor-like protein kinase 4
  misc_feature (1)..(279): Homolog of NCBI NO: 15236453 NR Description: serine/threonine kinase - like protein; protein
  misc_feature (1)..(277): Homolog of NCBI NO: 34915174 NR Description: receptor kinase-like protein
  misc_feature (1)..(244): Homolog of NCBI NO: 37530904 NR Description: putative protein kinase [Oryza sativa (japonica
  misc_feature (1)..(245): Homolog of NCBI NO: 34913760 NR Description: OSJNBa0051H17.28 [Oryza sativa (japonica
  misc_feature (1)..(245): Homolog of NCBI NO: 34898778 NR Description: OJ1131_E05.14 [Oryza sativa (japonica
  misc_feature (1)..(245): Homolog of NCBI NO: 33146474 NR Description: putative receptor-like protein kinase 4
  misc_feature (1)..(245): Homolog of NCBI NO: 28564782 NR Description: P0683C09.26 [Oryza sativa (japonica
  misc_feature (1)..(288): Homolog of NCBI NO: 38423996 NR Description: receptor-like kinase CHRK1-like
  misc_feature (166)..(166): Xaa is any aa, unknown or other
  misc_feature (170)..(170): Xaa is any aa, unknown or other
MDEGATMFDFSSEFLAARLQHTNLIRLLGWCIHGKERILVYEFMHKGTLHSLIFDKRMGLLLDWSKRIDIIRGVAEGLLYLHKQSKLWIVHRDLKPRNVLLDHDMKPKLADFGSARTLTSDSAEECTSRVVGTSGYKAPEYTSRGVYSLKTDVFSFGVVVLVTISXRENXILEKQGDSVGTLVRDAWQLWNDGRLHELVDPVLGDGFELAEVAQEEPADRPTMSDVVSLLNFESIGLLPDPKQPSELCKGGGGTSGDRLPTCGSQSSRTIDITITSSAPVSTRTRVRIIVDPET

SEQ ID NO: 3464 - protein, 288 aa, Zea mays subsp. mays
  peptide (1)..(288): Ceres Seq. ID no. 12406167
  misc_feature (1)..(238): Homolog of NCBI NO: 7488195 NR Description: probable serine/threonine-specific protein kinase
  misc_feature (1)..(239): Homolog of NCBI NO: 37530902 NR Description: putative receptor-like protein kinase 4
  misc_feature (1)..(273): Homolog of NCBI NO: 15236453 NR Description: serine/threonine kinase - like protein; protein
  misc_feature (1)..(271): Homolog of NCBI NO: 34915174 NR Description: receptor kinase-like protein
  misc_feature (1)..(238): Homolog of NCBI NO: 37530904 NR Description: putative protein kinase [Oryza sativa (japonica
  misc_feature (1)..(239): Homolog of NCBI NO: 34913760 NR Description: OSJNBa0051H17.28 [Oryza sativa (japonica
  misc_feature (1)..(239): Homolog of NCBI NO: 34898778 NR Description: OJ1131_E05.14 [Oryza sativa (japonica
  misc_feature (1)..(239): Homolog of NCBI NO: 33146474 NR Description: putative receptor-like protein kinase 4
  misc_feature (1)..(239): Homolog of NCBI NO: 28564782 NR Description: P0683C09.26 [Oryza sativa (japonica
  misc_feature (1)..(282): Homolog of NCBI NO: 38423996 NR Description: receptor-like kinase CHRK1-like
  misc_feature (160)..(160): Xaa is any aa, unknown or other
  misc_feature (164)..(164): Xaa is any aa, unknown or other
MFDFSSEFLAARLQHTNLIRLLGWCIHGKERILVYEFMHKGTLHSLIFDKRMGLLLDWSKRIDIIRGVAEGLLYLHKQSKLWIVHRDLKPRNVLLDHDMKPKLADFGSARTLTSDSAEECTSRVVGTSGYKAPEYTSRGVYSLKTDVFSFGVVVLVTISXRENXILEKQGDSVGTLVRDAWQLWNDGRLHELVDPVLGDGFELAEVAQEEPADRPTMSDVVSLLNFESIGLLPDPKQPSELCKGGGGTSGDRLPTCGSQSSRTIDITITSSAPVSTRTRVRIIVDPET

SEQ ID NO: 3465 - DNA, 1230 bp, Zea mays subsp. mays
  misc_feature (1)..(1230): Ceres Seq. ID no. 12410201
  misc_feature: MA Experiment ID: 108528 Result: Up-regulated in Transcription
  misc_feature: MA Experiment 108528 PARAMETER Experiment Name: Zm_Imbibed_Seeds_P Parameter: Age (day) Value: 5 vs. 2
  misc_feature: MA Experiment 108528 PARAMETER Experiment Name: Zm_Imbibed_Seeds_P Parameter: Organism Value: Zea mays
  misc_feature: MA Experiment 108528 PARAMETER Experiment Name: Zm_Imbibed_Seeds_P Parameter: Plant Line Value: 35A19
  misc_feature: MA Experiment 108528 PARAMETER Experiment Name: Zm_Imbibed_Seeds_P Parameter: Tissue Value: Aerial vs. Embryo
  misc_feature: MA Experiment ID: 108535 Result: Up-regulated in Transcription
  misc_feature: MA Experiment 108535 PARAMETER Experiment Name: Zm_Meristem_P Parameter: Age (day) Value: 8
  misc_feature: MA Experiment 108535 PARAMETER Experiment Name: Zm_Meristem_P Parameter: Organism Value: Zea mays
  misc_feature: MA Experiment 108535 PARAMETER Experiment Name: Zm_Meristem_P Parameter: Plant Line Value: 35A19
  misc_feature: MA Experiment 108535 PARAMETER Experiment Name: Zm_Meristem_P Parameter: Tissue Value: Root Meristem vs. Above Root Meristem
  misc_feature: MA Experiment ID: 108556 Result: Down-regulated in Transcription
  misc_feature: MA Experiment 108556 PARAMETER Experiment Name: Zm_Drought_P Parameter: Age (day) Value: 9
  misc_feature: MA Experiment 108556 PARAMETER Experiment Name: Zm_Drought_P Parameter: Organism Value: Zea mays
  misc_feature: MA Experiment 108556 PARAMETER Experiment Name: Zm_Drought_P Parameter: Plant Line Value: 35A19
  misc_feature: MA Experiment 108556 PARAMETER Experiment Name: Zm_Drought_P Parameter: Timepoint (hr) Value: 24
  misc_feature: MA Experiment 108556 PARAMETER Experiment Name: Zm_Drought_P Parameter: Tissue Value: Aerial
  misc_feature: MA Experiment 108556 PARAMETER Experiment Name: Zm_Drought_P Parameter: Treatment Value: Drought vs. No Drought
  misc_feature: MA Experiment ID: 108689 Result: Up-regulated in Transcription
  misc_feature: MA Experiment 108689 PARAMETER Experiment Name: Zm_Drought_Roots_P Parameter: Age (day) Value: 9
  misc_feature: MA Experiment 108689 PARAMETER Experiment Name: Zm_Drought_Roots_P Parameter: Organism Value: Zea mays
  misc_feature: MA Experiment 108689 PARAMETER Experiment Name: Zm_Drought_Roots_P Parameter: Plant Line Value: 35A19
  misc_feature: MA Experiment 108689 PARAMETER Experiment Name: Zm_Drought_Roots_P Parameter: Timepoint (hr) Value: 24
  misc_feature: MA Experiment 108689 PARAMETER Experiment Name: Zm_Drought_Roots_P Parameter: Tissue Value: Roots
  misc_feature: MA Experiment 108689 PARAMETER Experiment Name: Zm_Drought_Roots_P Parameter: Treatment Value: Drought vs. No Drought
  misc_feature: MA Experiment ID: 20000477 Result: Down-regulated in Transcription
  misc_feature: MA Experiment 20000477 PARAMETER Experiment Name: Zm_5mM_SA_P Parameter: Age (day) Value: 10
  misc_feature: MA Experiment 20000477 PARAMETER Experiment Name: Zm_5mM_SA_P Parameter: Organism Value: Zea mays
  misc_feature: MA Experiment 20000477 PARAMETER Experiment Name: Zm_5mM_SA_P Parameter: Plant Line Value: 35A19
  misc_feature: MA Experiment 20000477 PARAMETER Experiment Name: Zm_5mM_SA_P Parameter: Timepoint (hr) Value: 48
  misc_feature: MA Experiment 20000477 PARAMETER Experiment Name: Zm_5mM_SA_P Parameter: Tissue Value: Aerial
  misc_feature: MA Experiment 20000477 PARAMETER Experiment Name: Zm_5mM_SA_P Parameter: Treatment Value: 5mM SA vs. No Treatment
  misc_feature: MA Experiment ID: 20000479 Result: Down-regulated in Transcription
  misc_feature: MA Experiment 20000479 PARAMETER Experiment Name: Zm_Drought_P Parameter: Age (day) Value: 10
  misc_feature: MA Experiment 20000479 PARAMETER Experiment Name: Zm_Drought_P Parameter: Organism Value: Zea mays
  misc_feature: MA Experiment 20000479 PARAMETER Experiment Name: Zm_Drought_P Parameter: Plant Line Value: 35A19
  misc_feature: MA Experiment 20000479 PARAMETER Experiment Name: Zm_Drought_P Parameter: Timepoint (hr) Value: 48
  misc_feature: MA Experiment 20000479 PARAMETER Experiment Name: Zm_Drought_P Parameter: Tissue Value: Aerial
  misc_feature: MA Experiment 20000479 PARAMETER Experiment Name: Zm_Drought_P Parameter: Treatment Value: Drought vs. No Drought
  misc_feature: MA Experiment ID: 20000492 Result: Down-regulated in Transcription
  misc_feature: MA Experiment 20000492 PARAMETER Experiment Name: Zm_Hybrid_Seed_Dev_P Parameter: DAP Value: 12
  misc_feature: MA Experiment 20000492 PARAMETER Experiment Name: Zm_Hybrid_Seed_Dev_P Parameter: Organism Value: Zea mays
  misc_feature: MA Experiment 20000492 PARAMETER Experiment Name: Zm_Hybrid_Seed_Dev_P Parameter: Plant Line Value: 35A19
  misc_feature: MA Experiment 20000492 PARAMETER Experiment Name: Zm_Hybrid_Seed_Dev_P Parameter: Tissue Value: Fert Kernel vs. Unfert Floret
accgcaccgcatcgaccagctacacgaatcagacggcgtcatggccggcacgtgcgcccacgtcgagttcctccgcgcgcagccggcttgggcgctggtgctggccgccgtgggcctgctcgtggctgtccgcgccgctgcccgcttcgcgctctgggtctacgccgcgttcctccgcccggggaagcccctgcgccgccgctacggcgcctgggccgtcgtgacgggcgccaccgacggcatcggccgcgccgtcgcgttccgcctcgccgcggccgggctcgggctcgtcctcgtcggccgcaacccggagaagctggccgccgtggccgccgagatcagggccaagcaccccaaggtccccgaggtgcgcaccttcgtgctcgacttcgccagcgaggggctcgcggccggcgtcgaggcgctcaaggactccatccgtggcctcgacgtcggcgtgctcgtcaacaacgccgggctgtcctacccgtacgcgcgctacttccacgaggtggacgaggagctgatgcgcagcctcatccgggtcaacgtcgagggcgtcacgcgggtcacagcacgccgtgctgccaggcatggtcgagcggaagcgcggcgccattgtcaacatcggctccggcgccgcctccgtcgtgccttctgatccgctctactccgtctacgccgccaccaaagcgtatgttgaccaattctcaagatgcctctatgttgagtacaagagcaagggtattgatgtgcaatgcccaggtgcccctatacgtggcgacaaagatggcatctatcaggaagtcttccttcatggttccatctactgacacctatgctcgtgctgccgttcgtcacattggatacgagcctaggtgcacaccgtactggccacactctgtcgtgtggttcttgatctcgattcttcctgagtcccttatagacagcgtgcgcctgggcatgtgcattaagatccgcaagaaggggctggccaaggacgccaagaagaaggcactgtgattgatgtttcagaatgcaggtccagattcgaagatttcctcatcacctgtagtagacatgtgccttgctgtagtcactttattagctccggagtctgttaagaatcgagaatgccattgctccatccacggttatgatgttaaaaattattattcttcaattcaaaatgtaacactaatacgagtaatgatgaatgcaattaacttg

SEQ ID NO: 3466 - protein, 340 aa, Zea mays subsp. mays
  peptide (1)..(340): Ceres Seq. ID no. 12410202
  misc_feature (255)..(332): Homolog of NCBI NO: 15221751 NR Description: putative b-keto acyl reductase; protein id:
  misc_feature (255)..(338): Homolog of NCBI NO: 2586125 NR Description: b-keto acyl reductase [Arabidopsis thaliana]
  misc_feature (255)..(338): Homolog of NCBI NO: 11072027 NR Description: F12A21.14 [Arabidopsis thaliana]
  misc_feature (255)..(340): Homolog of NCBI NO: 2586123 NR Description: b-keto acyl reductase [Allium porrum]
  misc_feature (255)..(338): Homolog of NCBI NO: 18408847 NR Description: Expressed protein
  misc_feature (255)..(338): Homolog of NCBI NO: 28565597 NR Description: putative 3-ketoacyl-CoA reductase 1 [Brassica
  misc_feature (255)..(338): Homolog of NCBI NO: 28565601 NR Description: putative 3-ketoacyl-CoA reductase 2 [Brassica
  misc_feature (255)..(338): Homolog of NCBI NO: 38345332 NR Description: OSJNBa0081L15.5 [Oryza sativa (japonica
  misc_feature (255)..(339): Homolog of NCBI NO: 7489413 NR Description: probable b-keto acyl reductase (EC 1.1.-.-) -
  misc_feature (255)..(340): Homolog of NCBI NO: 7489808 NR Description: probable beta-keto acyl reductase - maize
TAPHRPATRIRRRHGRHVRPRRVPPRAAGLGAGAGRRGPARGCPRRCPLRALGLRRVPPPGEAPAPPLRRLGRRDGRHRRHRPRRRVPPRRGRARARPRRPQPGEAGRRGRRDQGQAPQGPRGAHLRARLRQRGARGRRRGAQGLHPWPRRRRARQQRRAVLPVRALLPRGGRGADAQPHPGQRRGRHAGHSTPCCQAWSSGSAAPLSTSAPAPPPSCLLIRSTPSTPPPKRMLTNSQDASMLSTRARVLMCNAQVPLYVATKMASIRKSSFMVPSTDTYARAAVRHIGYEPRCTPYWPHSVVWFLISILPESLIDSVRLGMCIKIRKKGLAKDAKKKAL

SEQ ID NO: 3467 - protein, 219 aa, Zea mays subsp. mays
  peptide (1)..(219): Ceres Seq. ID no. 12410203
  misc_feature (14)..(191): Homolog of NCBI NO: 15221751 NR Description: putative b-keto acyl reductase; protein id:
  misc_feature (88)..(191): Homolog of NCBI NO: 2586125 NR Description: b-keto acyl reductase [Arabidopsis thaliana]
  misc_feature (46)..(191): Homolog of NCBI NO: 11072027 NR Description: F12A21.14 [Arabidopsis thaliana]
  misc_feature (112)..(205): Homolog of NCBI NO: 2586123 NR Description: b-keto acyl reductase [Allium porrum]
  misc_feature (23)..(191): Homolog of NCBI NO: 18408847 NR Description: Expressed protein
  misc_feature (23)..(191): Homolog of NCBI NO: 28565597 NR Description: putative 3-ketoacyl-CoA reductase 1 [Brassica
  misc_feature (23)..(191): Homolog of NCBI NO: 28565601 NR Description: putative 3-ketoacyl-CoA reductase 2 [Brassica
  misc_feature (21)..(205): Homolog of NCBI NO: 38345332 NR Description: OSJNBa0081L15.5 [Oryza sativa (japonica
  misc_feature (14)..(205): Homolog of NCBI NO: 7489413 NR Description: probable b-keto acyl reductase (EC 1.1.-.-) -
  misc_feature (14)..(191): Homolog of NCBI NO: 7489808 NR Description: probable beta-keto acyl reductase - maize
PHRIDQLHESDGVMAGTCAHVEFLRAQPAWALVLAAVGLLVAVRAAARFALWVYAAFLRPGKPLRRRYGAWAVVTGATDGIGRAVAFRLAAAGLGLVLVGRNPEKLAAVAAEIRAKHPKVPEVRTFVLDFASEGLAAGVEALKDSIRGLDVGVLVNNAGLSYPYARYFHEVDEELMRSLIRVNVEGVTRVTARRAARHGRAEARRHCQHRLRRRLRRAF

SEQ ID NO: 3468 - protein, 206 aa, Zea mays subsp. mays
  peptide (1)..(206): Ceres Seq. ID no. 12410204
  misc_feature (1)..(178): Homolog of NCBI NO: 15221751 NR Description: putative b-keto acyl reductase; protein id:
  misc_feature (75)..(178): Homolog of NCBI NO: 2586125 NR Description: b-keto acyl reductase [Arabidopsis thaliana]
  misc_feature (33)..(178): Homolog of NCBI NO: 11072027 NR Description: F12A21.14 [Arabidopsis thaliana]
  misc_feature (99)..(192): Homolog of NCBI NO: 2586123 NR Description: b-keto acyl reductase [Allium porrum]
  misc_feature (10)..(178): Homolog of NCBI NO: 18408847 NR Description: Expressed protein
  misc_feature (10)..(178): Homolog of NCBI NO: 28565597 NR Description: putative 3-ketoacyl-CoA reductase 1 [Brassica
  misc_feature (10)..(178): Homolog of NCBI NO: 28565601 NR Description: putative 3-ketoacyl-CoA reductase 2 [Brassica
  misc_feature (8)..(192): Homolog of NCBI NO: 38345332 NR Description: OSJNBa0081L15.5 [Oryza sativa (japonica
  misc_feature (1)..(192): Homolog of NCBI NO: 7489413 NR Description: probable b-keto acyl reductase (EC 1.1.-.-) -
  misc_feature (1)..(178): Homolog of NCBI NO: 7489808 NR Description: probable beta-keto acyl reductase - maize
MAGTCAHVEFLRAQPAWALVLAAVGLLVAVRAAARFALWVYAAFLRPGKPLRRRYGAWAVVTGATDGIGRAVAFRLAAAGLGLVLVGRNPEKLAAVAAEIRAKHPKVPEVRTFVLDFASEGLAAGVEALKDSIRGLDVGVLVNNAGLSYPYARYFHEVDEELMRSLIRVNVEGVTRVTARRAARHGRAEARRHCQHRLRRRLRRAF

SEQ ID NO: 3469 - DNA, 1756 bp, Zea mays subsp. mays
  misc_feature (1)..(1756): Ceres Seq. ID no. 12386932
  misc_feature: MA Experiment ID: 108535 Result: Down-regulated in Transcription
  misc_feature: MA Experiment 108535 PARAMETER Experiment Name: Zm_Meristem_P Parameter: Age (day) Value: 8
  misc_feature: MA Experiment 108535 PARAMETER Experiment Name: Zm_Meristem_P Parameter: Organism Value: Zea mays
  misc_feature: MA Experiment 108535 PARAMETER Experiment Name: Zm_Meristem_P Parameter: Plant Line Value: 35A19
  misc_feature: MA Experiment 108535 PARAMETER Experiment Name: Zm_Meristem_P Parameter: Tissue Value: Root Meristem vs. Above Root Meristem
  misc_feature: MA Experiment ID: 108688 Result: Down-regulated in Transcription
  misc_feature: MA Experiment 108688 PARAMETER Experiment Name: Zm_Embryos-Flowers__P Parameter: Tissue Value: Immature Flowers vs. Aerial+
  misc_feature: MA Experiment ID: 20000480 Result: Down-regulated in Transcription
  misc_feature: MA Experiment 20000480 PARAMETER Experiment Name: Zm_Drought_P Parameter: Age (day) Value: 11
  misc_feature: MA Experiment 20000480 PARAMETER Experiment Name: Zm_Drought_P Parameter: Organism Value: Zea mays
  misc_feature: MA Experiment 20000480 PARAMETER Experiment Name: Zm_Drought_P Parameter: Plant Line Value: 35A19
  misc_feature: MA Experiment 20000480 PARAMETER Experiment Name: Zm_Drought_P Parameter: Timepoint (hr) Value: 72
  misc_feature: MA Experiment 20000480 PARAMETER Experiment Name: Zm_Drought_P Parameter: Tissue Value: Aerial
  misc_feature: MA Experiment 20000480 PARAMETER Experiment Name: Zm_Drought_P Parameter: Treatment Value: Drought vs. No Drought
aagacaggaaggagctatccgcgtctgcctcctcccggccctctgctccctcccagagtctccgctagccaagcccccacatggcaccaccgcccgcgggcctcgtgctcgtggctctgctcgcgctggtcctggcgccggcgccggcgcgcggggacaagccggcgaggggcggggcgtccagctccatcgccgccggggcggatacggagccgtcctccgccgtcttcccgctctacggcgacgtctacccgcacgggttgtactacgtggctatgaacatcggcaacccacccaagccatacttcctggacgtggactccggcagcgacctcacctggctgcagtgcgacgcgccctgcaggagctgcaacgaggtgccgcacccgctgtaccggccgacaaagagcaagctggtgccgtgcgtgcaccggctgtgcgcttccctgcacaacgggctggccggcgggaagcacagatgcgactcgccgcacgagcaatgcgactacgtgatcaagtacgcagaccaggggtcgtccaccggcgtgctcatcaacgacagcttcgcgctccgcctcaccaacggctctgtcgctcgccccagcgtcgcgttcgggtgtggttacgaccagcaggtccgcagcggcgacctgagttggcctaccgacggcgtgctggggctcgggaccggctcagtcagcttgctctcgcagctcaaacagcgtggcgtcaccaagaacgtggtcggccactgcctcagcctgaggggcggcgggttcctcttcttcggtgacgatctcgtgccttaccaacgcgcgacatggactcccatggctcgcagcgcgttccaactactactcccctggctccgcaagcctgtacttcggcgaccggtcactgggcgtgagactgacgaaagtggtcttcgacagtggaagctcgttcacctacttcgctgcaaagccataccaagcacttgtcaccgctcttaaggatggcctgagcaggacgctggaagaggaatccgacccttcgctgccactctgctggaaagggcaggaaccattcaagtctgtgcttgatgtgaggaaggagttcaagtctttggtgctcaactttgccagtggcaagaagacgctcatggagatccctcctgagaactacctcattgtcacagaaaacgggaatgcctgtctgggcatcctcaacggatccgagatcggtctcaaggacctgagcattattggagacattacgatgcaggatcacatggtgatatatgacaatgagaaagggaaaattggatggattcgtgcaccctgtgacagagcccccaacgacaatacggttcatgggtttgaggaaggttactgttggcctcaattcctcccggggatcattggtcttcccaacgaagattgcccagcctattaccgttcaaacaaagagtgatttgccgaggcccaagggggagaggccgctagaatgtcacaagaaggatggtcacggaggctggacactgtgttaggatcgtgtgtgttctttaggaaaggagagaaactagcccatgtaaacatcataatgttcatatcaaatataatgatgatcaccctgttacgagtacaatcttttcggaccttttctttgtacattctttacttggttttctttctgttgatgtgatatatactacggttccaggtgtctcgcgactatggtcctgttcaaaacctgtaaacctaatggttagtcagcc

SEQ ID NO: 3470 - protein, 303 aa, Zea mays subsp. mays
  peptide (1)..(303): Ceres Seq. ID no. 12386933
  misc_feature (68)..(253): Pfam Name: Eukaryotic aspartyl protease Pfam Description: Eukaryotic aspartyl protease
  misc_feature (36)..(251): Homolog of NCBI NO: 18402471 NR Description: expressed protein
  misc_feature (46)..(255): Homolog of NCBI NO: 25350204 NR Description: nucellin-like protein, 27671-25467
  misc_feature (46)..(255): Homolog of NCBI NO: 30699263 NR Description: nucellin protein, putative [Arabidopsis thaliana]
  misc_feature (45)..(253): Homolog of NCBI NO: 33340111 NR Description: nucellin-like protein [Oryza sativa]
  misc_feature (46)..(255): Homolog of NCBI NO: 30699261 NR Description: nucellin protein, putative [Arabidopsis thaliana]
  misc_feature (43)..(251): Homolog of NCBI NO: 15219354 NR Description: nucellin, putative; protein id: At1g44130.1
  misc_feature (46)..(253): Homolog of NCBI NO: 7484812 NR Description: aspartic proteinase homolog F17M5.250 -
  misc_feature (46)..(253): Homolog of NCBI NO: 26452545 NR Description: putative nucellin [Arabidopsis thaliana]
  misc_feature (46)..(253): Homolog of NCBI NO: 18418224 NR Description: nucellin -like protein
  misc_feature (68)..(253): Homolog of NCBI NO: 21805926 NR Description: nucellin-like aspartic protease [Zea mays]
MAPPPAGLVLVALLALVLAPAPARGDKPARGGASSSIAAGADTEPSSAVFPLYGDVYPHGLYYVAMNIGNPPKPYFLDVDSGSDLTWLQCDAPCRSCNEVPHPLYRPTKSKLVPCVHRLCASLHNGLAGGKHRCDSPHEQCDYVIKYADQGSSTGVLINDSFALRLTNGSVARPSVAFGCGYDQQVRSGDLSWPTDGVLGLGTGSVSLLSQLKQRGVTKNVVGHCLSLRGGGFLFFGDDLVPYQRATWTPMARSAFQLLLPWLRKPVLRRPVTGRETDESGLRQWKLVHLLRCKAIPSTCHRS

SEQ ID NO: 3471 - protein, 263 aa, Zea mays subsp. mays
  peptide (1)..(263): Ceres Seq. ID no. 12386934
RQEGAIRVCLLPALCSLPESPLAKPPHGTTARGPRARGSARAGPGAGAGARGQAGEGRGVQLHRRRGGYGAVLRRLPALRRRLPARVVLRGYEHRQPTQAILPGRGLRQRPHLAAVRRALQELQRGAAPAVPADKEQAGAVRAPAVRFPAQRAGRREAQMRLAARAMRLRDQVRRPGVVHRRAHQRQLRAPPHQRLCRSPQRRVRVWLRPAGPQRRPELAYRRRAGARDRLSQLALAAQTAWRHQERGRPLPQPEGRRVPLLR

SEQ ID NO: 3472 - protein, 238 aa, Zea mays subsp. mays
  peptide (1)..(238): Ceres Seq. ID no. 12386935
  misc_feature (3)..(188): Pfam Name: Eukaryotic aspartyl protease Pfam Description: Eukaryotic aspartyl protease
  misc_feature (1)..(186): Homolog of NCBI NO: 18402471 NR Description: expressed protein
  misc_feature (1)..(190): Homolog of NCBI NO: 25350204 NR Description: nucellin-like protein, 27671-25467
  misc_feature (1)..(190): Homolog of NCBI NO: 30699263 NR Description: nucellin protein, putative [Arabidopsis thaliana]
  misc_feature (1)..(188): Homolog of NCBI NO: 33340111 NR Description: nucellin-like protein [Oryza sativa]
  misc_feature (1)..(190): Homolog of NCBI NO: 30699261 NR Description: nucellin protein, putative [Arabidopsis thaliana]
  misc_feature (1)..(186): Homolog of NCBI NO: 15219354 NR Description: nucellin, putative; protein id: At1g44130.1
  misc_feature (1)..(188): Homolog of NCBI NO: 7484812 NR Description: aspartic proteinase homolog F17M5.250 -
  misc_feature (1)..(188): Homolog of NCBI NO: 26452545 NR Description: putative nucellin [Arabidopsis thaliana]
  misc_feature (1)..(188): Homolog of NCBI NO: 18418224 NR Description: nucellin -like protein
  misc_feature (3)..(188): Homolog of NCBI NO: 21805926 NR Description: nucellin-like aspartic protease [Zea mays]
MNIGNPPKPYFLDVDSGSDLTWLQCDAPCRSCNEVPHPLYRPTKSKLVPCVHRLCASLHNGLAGGKHRCDSPHEQCDYVIKYADQGSSTGVLINDSFALRLTNGSVARPSVAFGCGYDQQVRSGDLSWPTDGVLGLGTGSVSLLSQLKQRGVTKNVVGHCLSLRGGGFLFFGDDLVPYQRATWTPMARSAFQLLLPWLRKPVLRRPVTGRETDESGLRQWKLVHLLRCKAIPSTCHRS

SEQ ID NO: 3473 - DNA, 1766 bp, Zea mays subsp. mays
  misc_feature (1)..(1766): Ceres Seq. ID no. 12410193
  misc_feature: MA Experiment ID: 108504 Result: Up-regulated in Transcription
  misc_feature: MA Experiment 108504 PARAMETER Experiment Name: Zm_Drought_P Parameter: Age (day) Value: 8
  misc_feature: MA Experiment 108504 PARAMETER Experiment Name: Zm_Drought_P Parameter: Organism Value: Zea mays
  misc_feature: MA Experiment 108504 PARAMETER Experiment Name: Zm_Drought_P Parameter: Plant Line Value: 35A19
  misc_feature: MA Experiment 108504 PARAMETER Experiment Name: Zm_Drought_P Parameter: Timepoint (hr) Value: 12
  misc_feature: MA Experiment 108504 PARAMETER Experiment Name: Zm_Drought_P Parameter: Tissue Value: Aerial
  misc_feature: MA Experiment 108504 PARAMETER Experiment Name: Zm_Drought_P Parameter: Treatment Value: Drought vs. No Drought
  misc_feature: MA Experiment ID: 108523 Result: Down-regulated in Transcription
  misc_feature: MA Experiment 108523 PARAMETER Experiment Name: Zm_42deg_Heat_P Parameter: Age (day) Value: 8
  misc_feature: MA Experiment 108523 PARAMETER Experiment Name: Zm_42deg_Heat_P Parameter: Organism Value: Zea mays
  misc_feature: MA Experiment 108523 PARAMETER Experiment Name: Zm_42deg_Heat_P Parameter: Plant Line Value: 35A19
  misc_feature: MA Experiment 108523 PARAMETER Experiment Name: Zm_42deg_Heat_P Parameter: Temperature (deg C) Value: 42 vs. 22
  misc_feature: MA Experiment 108523 PARAMETER Experiment Name: Zm_42deg_Heat_P Parameter: Timepoint (hr) Value: 6
  misc_feature: MA Experiment 108523 PARAMETER Experiment Name: Zm_42deg_Heat_P Parameter: Tissue Value: Aerial
  misc_feature: MA Experiment ID: 108527 Result: Down-regulated in Transcription
  misc_feature: MA Experiment 108527 PARAMETER Experiment Name: Zm_5mM_NO_P Parameter: Age (day) Value: 8
  misc_feature: MA Experiment 108527 PARAMETER Experiment Name: Zm_5mM_NO_P Parameter: Organism Value: Zea mays
  misc_feature: MA Experiment 108527 PARAMETER Experiment Name: Zm_5mM_NO_P Parameter: Plant Line Value: 35A19
  misc_feature: MA Experiment 108527 PARAMETER Experiment Name: Zm_5mM_NO_P Parameter: Timepoint (hr) Value: 6
  misc_feature: MA Experiment 108527 PARAMETER Experiment Name: Zm_5mM_NO_P Parameter: Tissue Value: Aerial
  misc_feature: MA Experiment 108527 PARAMETER Experiment Name: Zm_5mM_NO_P Parameter: Treatment Value: 5mM NO vs. No Treatment
  misc_feature: MA Experiment ID: 108528 Result: Up-regulated in Transcription
  misc_feature: MA Experiment 108528 PARAMETER Experiment Name: Zm_Imbibed_Seeds_P Parameter: Age (day) Value: 5 vs. 2
  misc_feature: MA Experiment 108528 PARAMETER Experiment Name: Zm_Imbibed_Seeds_P Parameter: Organism Value: Zea mays
  misc_feature: MA Experiment 108528 PARAMETER Experiment Name: Zm_Imbibed_Seeds_P Parameter: Plant Line Value: 35A19
  misc_feature: MA Experiment 108528 PARAMETER Experiment Name: Zm_Imbibed_Seeds_P Parameter: Tissue Value: Aerial vs. Embryo
  misc_feature: MA Experiment ID: 108530 Result: Up-regulated in Transcription
  misc_feature: MA Experiment 108530 PARAMETER Experiment Name: Zm_Imbibed_Seeds_P Parameter: Age (day) Value: 6 vs. 2
  misc_feature: MA Experiment 108530 PARAMETER Experiment Name: Zm_Imbibed_Seeds_P Parameter: Organism Value: Zea mays
  misc_feature: MA Experiment 108530 PARAMETER Experiment Name: Zm_Imbibed_Seeds_P Parameter: Plant Line Value: 35A19
  misc_feature: MA Experiment 108530 PARAMETER Experiment Name: Zm_Imbibed_Seeds_P Parameter: Tissue Value: Aerial vs. Embryo
  misc_feature: MA Experiment ID: 108543 Result: Down-regulated in Transcription
  misc_feature: MA Experiment ID: 108556 Result: Up-regulated in Transcription
  misc_feature: MA Experiment 108556 PARAMETER Experiment Name: Zm_Drought_P Parameter: Age (day) Value: 9
  misc_feature: MA Experiment 108556 PARAMETER Experiment Name: Zm_Drought_P Parameter: Organism Value: Zea mays
  misc_feature: MA Experiment 108556 PARAMETER Experiment Name: Zm_Drought_P Parameter: Plant Line Value: 35A19
  misc_feature: MA Experiment 108556 PARAMETER Experiment Name: Zm_Drought_P Parameter: Timepoint (hr) Value: 24
  misc_feature: MA Experiment 108556 PARAMETER Experiment Name: Zm_Drought_P Parameter: Tissue Value: Aerial
  misc_feature: MA Experiment 108556 PARAMETER Experiment Name: Zm_Drought_P Parameter: Treatment Value: Drought vs. No Drought
  misc_feature: MA Experiment ID: 108559 Result: Down-regulated in Transcription
  misc_feature: MA Experiment 108559 PARAMETER Experiment Name: Zm_5mM_NO_P Parameter: Age (day) Value: 8
  misc_feature: MA Experiment 108559 PARAMETER Experiment Name: Zm_5mM_NO_P Parameter: Organism Value: Zea mays
  misc_feature: MA Experiment 108559 PARAMETER Experiment Name: Zm_5mM_NO_P Parameter: Plant Line Value: 35A19
  misc_feature: MA Experiment 108559 PARAMETER Experiment Name: Zm_5mM_NO_P Parameter: Timepoint (hr) Value: 12
  misc_feature: MA Experiment 108559 PARAMETER Experiment Name: Zm_5mM_NO_P Parameter: Tissue Value: Aerial
  misc_feature: MA Experiment 108559 PARAMETER Experiment Name: Zm_5mM_NO_P Parameter: Treatment Value: 5mM NO vs. No Treatment
  misc_feature: MA Experiment ID: 108597 Result: Up-regulated in Transcription
  misc_feature: MA Experiment 108597 PARAMETER Experiment Name: Zm_100uM_ABA_P Parameter: Age (day) Value: 9
  misc_feature: MA Experiment 108597 PARAMETER Experiment Name: Zm_100uM_ABA_P Parameter: Organism Value: Zea mays
  misc_feature: MA Experiment 108597 PARAMETER Experiment Name: Zm_100uM_ABA_P Parameter: Plant Line Value: 35A19
  misc_feature: MA Experiment 108597 PARAMETER Experiment Name: Zm_100uM_ABA_P Parameter: Timepoint (hr) Value: 24
  misc_feature: MA Experiment 108597 PARAMETER Experiment Name: Zm_100uM_ABA_P Parameter: Tissue Value: Aerial
  misc_feature: MA Experiment 108597 PARAMETER Experiment Name: Zm_100uM_ABA_P Parameter: Treatment Value: 100uM ABA vs. No Treatment
  misc_feature: MA Experiment ID: 108689 Result: Up-regulated in Transcription
  misc_feature: MA Experiment 108689 PARAMETER Experiment Name: Zm_Drought_Roots_P Parameter: Age (day) Value: 9
  misc_feature: MA Experiment 108689 PARAMETER Experiment Name: Zm_Drought_Roots_P Parameter: Organism Value: Zea mays
  misc_feature: MA Experiment 108689 PARAMETER Experiment Name: Zm_Drought_Roots_P Parameter: Plant Line Value: 35A19
  misc_feature: MA Experiment 108689 PARAMETER Experiment Name: Zm_Drought_Roots_P Parameter: Timepoint (hr) Value: 24
  misc_feature: MA Experiment 108689 PARAMETER Experiment Name: Zm_Drought_Roots_P Parameter: Tissue Value: Roots
  misc_feature: MA Experiment 108689 PARAMETER Experiment Name: Zm_Drought_Roots_P Parameter: Treatment Value: Drought vs. No Drought
  misc_feature: MA Experiment ID: 20000477 Result: Up-regulated in Transcription
  misc_feature: MA Experiment 20000477 PARAMETER Experiment Name: Zm_5mM_SA_P Parameter: Age (day) Value: 10
  misc_feature: MA Experiment 20000477 PARAMETER Experiment Name: Zm_5mM_SA_P Parameter: Organism Value: Zea mays
  misc_feature: MA Experiment 20000477 PARAMETER Experiment Name: Zm_5mM_SA_P Parameter: Plant Line Value: 35A19
  misc_feature: MA Experiment 20000477 PARAMETER Experiment Name: Zm_5mM_SA_P Parameter: Timepoint (hr) Value: 48
  misc_feature: MA Experiment 20000477 PARAMETER Experiment Name: Zm_5mM_SA_P Parameter: Tissue Value: Aerial
  misc_feature: MA Experiment 20000477 PARAMETER Experiment Name: Zm_5mM_SA_P Parameter: Treatment Value: 5mM SA vs. No Treatment
  misc_feature: MA Experiment ID: 20000478 Result: Up-regulated in Transcription
  misc_feature: MA Experiment 20000478 PARAMETER Experiment Name: Zm_5mM_SA_P Parameter: Age (day) Value: 11
  misc_feature: MA Experiment 20000478 PARAMETER Experiment Name: Zm_5mM_SA_P Parameter: Organism Value: Zea mays
  misc_feature: MA Experiment 20000478 PARAMETER Experiment Name: Zm_5mM_SA_P Parameter: Plant Line Value: 35A19
  misc_feature: MA Experiment 20000478 PARAMETER Experiment Name: Zm_5mM_SA_P Parameter: Timepoint (hr) Value: 72
  misc_feature: MA Experiment 20000478 PARAMETER Experiment Name: Zm_5mM_SA_P Parameter: Tissue Value: Aerial
  misc_feature: MA Experiment 20000478 PARAMETER Experiment Name: Zm_5mM_SA_P Parameter: Treatment Value: 5mM SA vs. No Treatment
  misc_feature: MA Experiment ID: 20000488 Result: Down-regulated in Transcription
  misc_feature: MA Experiment 20000488 PARAMETER Experiment Name: Zm_50mM_NH4NO3_L_to_H_P Parameter: Organism Value: Zea mays
  misc_feature: MA Experiment 20000488 PARAMETER Experiment Name: Zm_50mM_NH4NO3_L_to_H_P Parameter: Timepoint (hr) Value: 8
  misc_feature: MA Experiment 20000488 PARAMETER Experiment Name: Zm_50mM_NH4NO3_L_to_H_P Parameter: Tissue Value: Leaves
  misc_feature: MA Experiment 20000488 PARAMETER Experiment Name: Zm_50mM_NH4NO3_L_to_H_P Parameter: Treatment Value: 50mM NH4NO3 vs. 100mM Mannitol
  misc_feature: MA Experiment ID: 20000532 Result: Up-regulated in Transcription
  misc_feature: MA Experiment 20000532 PARAMETER Experiment Name: Zm_0.001percent_MeJA_P Parameter: Age (day) Value: 10
  misc_feature: MA Experiment 20000532 PARAMETER Experiment Name: Zm_0.001percent_MeJA_P Parameter: Organism Value: Zea mays
  misc_feature: MA Experiment 20000532 PARAMETER Experiment Name: Zm_0.001percent_MeJA_P Parameter: Plant Line Value: 35A19
  misc_feature: MA Experiment 20000532 PARAMETER Experiment Name: Zm_0.001percent_MeJA_P Parameter: Timepoint (hr) Value: 48
  misc_feature: MA Experiment 20000532 PARAMETER Experiment Name: Zm_0.001percent_MeJA_P Parameter: Tissue Value: Aerial
  misc_feature: MA Experiment 20000532 PARAMETER Experiment Name: Zm_0.001percent_MeJA_P Parameter: Treatment Value: 0.001percent MeJA vs. No Treatment
  misc_feature: MA Experiment ID: 20001608 Result: Down-regulated in Transcription
  misc_feature: MA Experiment 20001608 PARAMETER Experiment Name: Zm_50ppm_KNO3_L-to-H_P Parameter: Age (day) Value: 21
  misc_feature: MA Experiment 20001608 PARAMETER Experiment Name: Zm_50ppm_KNO3_L-to-H_P Parameter: Organism Value: Zea mays
  misc_feature: MA Experiment 20001608 PARAMETER Experiment Name: Zm_50ppm_KNO3_L-to-H_P Parameter: Plant Line Value: 35A19
  misc_feature: MA Experiment 20001608 PARAMETER Experiment Name: Zm_50ppm_KNO3_L-to-H_P Parameter: Timepoint (hr) Value: 48
  misc_feature: MA Experiment 20001608 PARAMETER Experiment Name: Zm_50ppm_KNO3_L-to-H_P Parameter: Tissue Value: Shoots
  misc_feature: MA Experiment 20001608 PARAMETER Experiment Name: Zm_50ppm_KNO3_L-to-H_P Parameter: Treatment Value: 50ppm KNO3 vs. 50ppm KCl
atcaggatcatcatcaggttctccgttccactccatggccttccctgctgtgcccctcctcgccgctctgctcctggtcgccgccacgcggctgtgggactacgtcttcgtgcgcctcgtatggcggccgtacgccatcaccaaggggttcagagagcaagggatccatggaccctcctacaggttcttcaagggctgcaacgaggagatcaggagcatgaaggagaagaccgacggtctcgtgctggacgtcggcgaccacaagtacctcccgcggatcgcgccgcactacctcgaatggagggctcagtacggagaaccatttctatattggtacggggcacaagcccgaatttgcatatttgactacgaactagcaaggcaaatcctttcgagcaagtctgggcatttcgtgaagaacgatgcgcaccctactttgttggctctggtcggcaagggactcgggttcatggaaggctctgactgggtgcgccatcgcagggtgatcaaccctgctttcaccattgacaagcttaagattgtgaccgagacgatgctggacttcgccgatagcatggcagatgagttggaagctgaagcatcccagaacgagaacggagaaacacaagtggatatatacaaacatttcagcgatctgacagttgacaatatcgcctacgccatctttggaagcagctacaagttaggcaaacaagtgttcgaggcacaaactgagctgctggggatcaccatggctactttccttgacgtgcccataccaggatccaaataccttccaacccaagcgaatcggcgaaaatggatgctggagacgaagctcaagagcttactcacgcggatcatacagccacggttagcaagcggtgagcacggaaacgatctgctgggcgtgatgctggactcctgcactgagaccaagcaaggagggaagcagcagcaagtggatcgtctgcgtctcagcttgagcatggaggagatcatacacgagtgcaagctgttcttcttcgctggccacgagaacacagcccttctcctcacgtggtccgtgtatttgctcagcatataccccgagtggcaagaaaggctccggaaggaggtcttgagggagttcgggagggacgctcctaaccccaacgcgctcaacagattgaaagagatgacaatggtgttgttcgagaccttgaggctctactcgcctgctctcttcatgcaaaggaagaccctggccgacatgaccgtggggccaataaaactgcccaaaggcactgcaattgtgatacccattccgatcatgcatcgagacaagcaggcatggggcgacgacgcagacgagttcagtccgatgagatttgcgaatgggatcacgggagcagcgaaagttcctcacggcctgctggcgttctcgatggggccaaggtcttgcatcggccagaacttgtcgatgctggaagccaagtcgacgctggccctgatgctccgcaagttctccttcgctctctcccctgactacgtgcacgcgcccgtggatctcttcactctcaaacctaagtttggccttcccgtcattctgaggccactggataatgttttgatttgagttgggcatatagtacaacaggaagtaacttaggtacatatcaaatttgctagctggtcaaaacgttatatgatgttctcaaccctccgttgttctatatcgttgaaaacaagtattttaatttaggtgcggtttggtttggcgctgc

SEQ ID NO: 3474 - protein, 538 aa, Zea mays subsp. mays
  peptide (1)..(538): Ceres Seq. ID no. 12410194
  misc_feature (20)..(535): Homolog of NCBI NO: 18407219 NR Description: cytochrome P450, putative
  misc_feature (21)..(538): Homolog of NCBI NO: 14719280 NR Description: cytochrome P450 [Zea mays]
  misc_feature (17)..(534): Homolog of NCBI NO: 15226472 NR Description: cytochrome p450, putative; protein id:
  misc_feature (27)..(533): Homolog of NCBI NO: 34913346 NR Description: putative cytochrome P450 [Oryza sativa (japonica
  misc_feature (16)..(533): Homolog of NCBI NO: 22324446 NR Description: putative cytochrome P450 [Oryza sativa (japonica
  misc_feature (21)..(534): Homolog of NCBI NO: 38112707 NR Description: cytochrome P450 [Triticum aestivum]
  misc_feature (21)..(533): Homolog of NCBI NO: 34913354 NR Description: putative cytochrome P450 [Oryza sativa (japonica
  misc_feature (73)..(209): Homolog of NCBI NO: 28927679 NR Description: putative cytochrome P450, 5'-partial
  misc_feature (238)..(531): Homolog of NCBI NO: 28927679 NR Description: putative cytochrome P450, 5'-partial
  misc_feature (16)..(534): Homolog of NCBI NO: 34896952 NR Description: putative cytochrome P450-related protein [Oryza
SGSSSGSPFHSMAFPAVPLLAALLLVAATRLWDYVFVRLVWRPYAITKGFREQGIHGPSYRFFKGCNEEIRSMKEKTDGLVLDVGDHKYLPRIAPHYLEWRAQYGEPFLYWYGAQARICIFDYELARQILSSKSGHFVKNDAHPTLLALVGKGLGFMEGSDWVRHRRVINPAFTIDKLKIVTETMLDFADSMADELEAEASQNENGETQVDIYKHFSDLTVDNIAYAIFGSSYKLGKQVFEAQTELLGITMATFLDVPIPGSKYLPTQANRRKWMLETKLKSLLTRIIQPRLASGEHGNDLLGVMLDSCTETKQGGKQQQVDRLRLSLSMEEIIHECKLFFFAGHENTALLLTWSVYLLSIYPEWQERLRKEVLREFGRDAPNPNALNRLKEMTMVLFETLRLYSPALFMQRKTLADMTVGPIKLPKGTAIVIPIPIMHRDKQAWGDDADEFSPMRFANGITGAAKVPHGLLAFSMGPRSCIGQNLSMLEAKSTLALMLRKFSFALSPDYVHAPVDLFTLKPKFGLPVILRPLDNVLI

SEQ ID NO: 3475 - protein, 527 aa, Zea mays subsp. mays
  peptide (1)..(527): Ceres Seq. ID no. 12410195
  misc_feature (9)..(524): Homolog of NCBI NO: 18407219 NR Description: cytochrome P450, putative
  misc_feature (10)..(527): Homolog of NCBI NO: 14719280 NR Description: cytochrome P450 [Zea mays]
  misc_feature (6)..(523): Homolog of NCBI NO: 15226472 NR Description: cytochrome p450, putative; protein id:
  misc_feature (16)..(522): Homolog of NCBI NO: 34913346 NR Description: putative cytochrome P450 [Oryza sativa (japonica
  misc_feature (5)..(522): Homolog of NCBI NO: 22324446 NR Description: putative cytochrome P450 [Oryza sativa (japonica
  misc_feature (10)..(523): Homolog of NCBI NO: 38112707 NR Description: cytochrome P450 [Triticum aestivum]
  misc_feature (10)..(522): Homolog of NCBI NO: 34913354 NR Description: putative cytochrome P450 [Oryza sativa (japonica
  misc_feature (62)..(198): Homolog of NCBI NO: 28927679 NR Description: putative cytochrome P450, 5'-partial
  misc_feature (227)..(520): Homolog of NCBI NO: 28927679 NR Description: putative cytochrome P450, 5'-partial
  misc_feature (5)..(523): Homolog of NCBI NO: 34896952 NR Description: putative cytochrome P450-related protein [Oryza
MAFPAVPLLAALLLVAATRLWDYVFVRLVWRPYAITKGFREQGIHGPSYRFFKGCNEEIRSMKEKTDGLVLDVGDHKYLPRIAPHYLEWRAQYGEPFLYWYGAQARICIFDYELARQILSSKSGHFVKNDAHPTLLALVGKGLGFMEGSDWVRHRRVINPAFTIDKLKIVTETMLDFADSMADELEAEASQNENGETQVDIYKHFSDLTVDNIAYAIFGSSYKLGKQVFEAQTELLGITMATFLDVPIPGSKYLPTQANRRKWMLETKLKSLLTRIIQPRLASGEHGNDLLGVMLDSCTETKQGGKQQQVDRLRLSLSMEEIIHECKLFFFAGHENTALLLTWSVYLLSIYPEWQERLRKEVLREFGRDAPNPNALNRLKEMTMVLFETLRLYSPALFMQRKTLADMTVGPIKLPKGTAIVIPIPIMHRDKQAWGDDADEFSPMRFANGITGAAKVPHGLLAFSMGPRSCIGQNLSMLEAKSTLALMLRKFSFALSPDYVHAPVDLFTLKPKFGLPVILRPLDNVLI

SEQ ID NO: 3476 - protein, 466 aa, Zea mays subsp. mays
  peptide (1)..(466): Ceres Seq. ID no. 12410196
  misc_feature (1)..(463): Homolog of NCBI NO: 18407219 NR Description: cytochrome P450, putative
  misc_feature (1)..(466): Homolog of NCBI NO: 14719280 NR Description: cytochrome P450 [Zea mays]
  misc_feature (1)..(462): Homolog of NCBI NO: 15226472 NR Description: cytochrome p450, putative; protein id:
  misc_feature (1)..(461): Homolog of NCBI NO: 34913346 NR Description: putative cytochrome P450 [Oryza sativa (japonica
  misc_feature (1)..(461): Homolog of NCBI NO: 22324446 NR Description: putative cytochrome P450 [Oryza sativa (japonica
  misc_feature (1)..(462): Homolog of NCBI NO: 38112707 NR Description: cytochrome P450 [Triticum aestivum]
  misc_feature (1)..(461): Homolog of NCBI NO: 34913354 NR Description: putative cytochrome P450 [Oryza sativa (japonica
  misc_feature (1)..(137): Homolog of NCBI NO: 28927679 NR Description: putative cytochrome P450, 5'-partial
  misc_feature (166)..(459): Homolog of NCBI NO: 28927679 NR Description: putative cytochrome P450, 5'-partial
  misc_feature (1)..(462): Homolog of NCBI NO: 34896952 NR Description: putative cytochrome P450-related protein [Oryza
MKEKTDGLVLDVGDHKYLPRIAPHYLEWRAQYGEPFLYWYGAQARICIFDYELARQILSSKSGHFVKNDAHPTLLALVGKGLGFMEGSDWVRHRRVINPAFTIDKLKIVTETMLDFADSMADELEAEASQNENGETQVDIYKHFSDLTVDNIAYAIFGSSYKLGKQVFEAQTELLGITMATFLDVPIPGSKYLPTQANRRKWMLETKLKSLLTRIIQPRLASGEHGNDLLGVMLDSCTETKQGGKQQQVDRLRLSLSMEEIIHECKLFFFAGHENTALLLTWSVYLLSIYPEWQERLRKEVLREFGRDAPNPNALNRLKEMTMVLFETLRLYSPALFMQRKTLADMTVGPIKLPKGTAIVIPIPIMHRDKQAWGDDADEFSPMRFANGITGAAKVPHGLLAFSMGPRSCIGQNLSMLEAKSTLALMLRKFSFALSPDYVHAPVDLFTLKPKFGLPVILRPLDNVLI

SEQ ID NO: 3477 - DNA, 1361 bp, Zea mays subsp. mays
  misc_feature (1)..(1361): Ceres Seq. ID no. 12367972
  misc_feature: MA Experiment ID: 108515 Result: Up-regulated in Transcription
  misc_feature: MA Experiment 108515 PARAMETER Experiment Name: Zm_2mM_SA_P Parameter: Age (day) Value: 8
  misc_feature: MA Experiment 108515 PARAMETER Experiment Name: Zm_2mM_SA_P Parameter: Organism Value: Zea mays
  misc_feature: MA Experiment 108515 PARAMETER Experiment Name: Zm_2mM_SA_P Parameter: Plant Line Value: 35A19
  misc_feature: MA Experiment 108515 PARAMETER Experiment Name: Zm_2mM_SA_P Parameter: Timepoint (hr) Value: 12
  misc_feature: MA Experiment 108515 PARAMETER Experiment Name: Zm_2mM_SA_P Parameter: Tissue Value: Aerial
  misc_feature: MA Experiment 108515 PARAMETER Experiment Name: Zm_2mM_SA_P Parameter: Treatment Value: 2mM SA vs. No Treatment
  misc_feature: MA Experiment ID: 108523 Result: Down-regulated in Transcription
  misc_feature: MA Experiment 108523 PARAMETER Experiment Name: Zm_42deg_Heat_P Parameter: Age (day) Value: 8
  misc_feature: MA Experiment 108523 PARAMETER Experiment Name: Zm_42deg_Heat_P Parameter: Organism Value: Zea mays
  misc_feature: MA Experiment 108523 PARAMETER Experiment Name: Zm_42deg_Heat_P Parameter: Plant Line Value: 35A19
  misc_feature: MA Experiment 108523 PARAMETER Experiment Name: Zm_42deg_Heat_P Parameter: Temperature (deg C) Value: 42 vs. 22
  misc_feature: MA Experiment 108523 PARAMETER Experiment Name: Zm_42deg_Heat_P Parameter: Timepoint (hr) Value: 6
  misc_feature: MA Experiment 108523 PARAMETER Experiment Name: Zm_42deg_Heat_P Parameter: Tissue Value: Aerial
  misc_feature: MA Experiment ID: 108526 Result: Up-regulated in Transcription
  misc_feature: MA Experiment 108526 PARAMETER Experiment Name: Zm_5mM_NO_P Parameter: Age (day) Value: 8
  misc_feature: MA Experiment 108526 PARAMETER Experiment Name: Zm_5mM_NO_P Parameter: Organism Value: Zea mays
  misc_feature: MA Experiment 108526 PARAMETER Experiment Name: Zm_5mM_NO_P Parameter: Plant Line Value: 35A19
  misc_feature: MA Experiment 108526 PARAMETER Experiment Name: Zm_5mM_NO_P Parameter: Timepoint (hr) Value: 1
  misc_feature: MA Experiment 108526 PARAMETER Experiment Name: Zm_5mM_NO_P Parameter: Tissue Value: Aerial
  misc_feature: MA Experiment 108526 PARAMETER Experiment Name: Zm_5mM_NO_P Parameter: Treatment Value: 5mM NO vs. No Treatment
  misc_feature: MA Experiment ID: 108527 Result: Up-regulated in Transcription
  misc_feature: MA Experiment 108527 PARAMETER Experiment Name: Zm_5mM_NO_P Parameter: Age (day) Value: 8
  misc_feature: MA Experiment 108527 PARAMETER Experiment Name: Zm_5mM_NO_P Parameter: Organism Value: Zea mays
  misc_feature: MA Experiment 108527 PARAMETER Experiment Name: Zm_5mM_NO_P Parameter: Plant Line Value: 35A19
  misc_feature: MA Experiment 108527 PARAMETER Experiment Name: Zm_5mM_NO_P Parameter: Timepoint (hr) Value: 6
  misc_feature: MA Experiment 108527 PARAMETER Experiment Name: Zm_5mM_NO_P Parameter: Tissue Value: Aerial
  misc_feature: MA Experiment 108527 PARAMETER Experiment Name: Zm_5mM_NO_P Parameter: Treatment Value: 5mM NO vs. No Treatment
  misc_feature: MA Experiment ID: 108529 Result: Up-regulated in Transcription
  misc_feature: MA Experiment 108529 PARAMETER Experiment Name: Zm_Imbibed_Seeds_P Parameter: Age (day) Value: 5 vs. 2
  misc_feature: MA Experiment 108529 PARAMETER Experiment Name: Zm_Imbibed_Seeds_P Parameter: Organism Value: Zea mays
  misc_feature: MA Experiment 108529 PARAMETER Experiment Name: Zm_Imbibed_Seeds_P Parameter: Plant Line Value: 35A19
  misc_feature: MA Experiment 108529 PARAMETER Experiment Name: Zm_Imbibed_Seeds_P Parameter: Tissue Value: Roots vs. Embryo
  misc_feature: MA Experiment ID: 108530 Result: Up-regulated in Transcription
  misc_feature: MA Experiment 108530 PARAMETER Experiment Name: Zm_Imbibed_Seeds_P Parameter: Age (day) Value: 6 vs. 2
  misc_feature: MA Experiment 108530 PARAMETER Experiment Name: Zm_Imbibed_Seeds_P Parameter: Organism Value: Zea mays
  misc_feature: MA Experiment 108530 PARAMETER Experiment Name: Zm_Imbibed_Seeds_P Parameter: Plant Line Value: 35A19
  misc_feature: MA Experiment 108530 PARAMETER Experiment Name: Zm_Imbibed_Seeds_P Parameter: Tissue Value: Aerial vs. Embryo
  misc_feature: MA Experiment ID: 108535 Result: Down-regulated in Transcription
  misc_feature: MA Experiment 108535 PARAMETER Experiment Name: Zm_Meristem_P Parameter: Age (day) Value: 8
  misc_feature: MA Experiment 108535 PARAMETER Experiment Name: Zm_Meristem_P Parameter: Organism Value: Zea mays
  misc_feature: MA Experiment 108535 PARAMETER Experiment Name: Zm_Meristem_P Parameter: Plant Line Value: 35A19
  misc_feature: MA Experiment 108535 PARAMETER Experiment Name: Zm_Meristem_P Parameter: Tissue Value: Root Meristem vs. Above Root Meristem
  misc_feature: MA Experiment ID: 108536 Result: Down-regulated in Transcription
  misc_feature: MA Experiment 108536 PARAMETER Experiment Name: Zm_Meristem_P Parameter: Age (day) Value: 8
  misc_feature: MA Experiment 108536 PARAMETER Experiment Name: Zm_Meristem_P Parameter: Organism Value: Zea mays
  misc_feature: MA Experiment 108536 PARAMETER Experiment Name: Zm_Meristem_P Parameter: Plant Line Value: 35A19
  misc_feature: MA Experiment 108536 PARAMETER Experiment Name: Zm_Meristem_P Parameter: Tissue Value: Shoot Meristem vs. Above Shoot Meristem
  misc_feature: MA Experiment ID: 108543 Result: Down-regulated in Transcription
  misc_feature: MA Experiment ID: 108546 Result: Up-regulated in Transcription
  misc_feature: MA Experiment 108546 PARAMETER Experiment Name: Zm_Imbibed_Seeds_P Parameter: Age (day) Value: 3 vs. 2
  misc_feature: MA Experiment 108546 PARAMETER Experiment Name: Zm_Imbibed_Seeds_P Parameter: Organism Value: Zea mays
  misc_feature: MA Experiment 108546 PARAMETER Experiment Name: Zm_Imbibed_Seeds_P Parameter: Plant Line Value: 35A19
  misc_feature: MA Experiment 108546 PARAMETER Experiment Name: Zm_Imbibed_Seeds_P Parameter: Tissue Value: Roots vs. Embryo
  misc_feature: MA Experiment ID: 108559 Result: Up-regulated in Transcription
  misc_feature: MA Experiment 108559 PARAMETER Experiment Name: Zm_5mM_NO_P Parameter: Age (day) Value: 8
  misc_feature: MA Experiment 108559 PARAMETER Experiment Name: Zm_5mM_NO_P Parameter: Organism Value: Zea mays
  misc_feature: MA Experiment 108559 PARAMETER Experiment Name: Zm_5mM_NO_P Parameter: Plant Line Value: 35A19
  misc_feature: MA Experiment 108559 PARAMETER Experiment Name: Zm_5mM_NO_P Parameter: Timepoint (hr) Value: 12
  misc_feature: MA Experiment 108559 PARAMETER Experiment Name: Zm_5mM_NO_P Parameter: Tissue Value: Aerial
  misc_feature: MA Experiment 108559 PARAMETER Experiment Name: Zm_5mM_NO_P Parameter: Treatment Value: 5mM NO vs. No Treatment
  misc_feature: MA Experiment ID: 20000487 Result: Up-regulated in Transcription
  misc_feature: MA Experiment 20000487 PARAMETER Experiment Name: Zm_50mM_NH4NO3_L_to_H_P Parameter: Organism Value: Zea mays
  misc_feature: MA Experiment 20000487 PARAMETER Experiment Name: Zm_50mM_NH4NO3_L_to_H_P Parameter: Timepoint (hr) Value: 4
  misc_feature: MA Experiment 20000487 PARAMETER Experiment Name: Zm_50mM_NH4NO3_L_to_H_P Parameter: Tissue Value: Leaves
  misc_feature: MA Experiment 20000487 PARAMETER Experiment Name: Zm_50mM_NH4NO3_L_to_H_P Parameter: Treatment Value: 50mM NH4NO3 vs. 100mM Mannitol
  misc_feature: MA Experiment ID: 20000626 Result: Up-regulated in Transcription
  misc_feature: MA Experiment 20000626 PARAMETER Experiment Name: Zm_Herbicide-Treatments_P Parameter: Timepoint (hr) Value: 12
  misc_feature: MA Experiment 20000626 PARAMETER Experiment Name: Zm_Herbicide-Treatments_P Parameter: Tissue Value: Aerial
  misc_feature: MA Experiment 20000626 PARAMETER Experiment Name: Zm_Herbicide-Treatments_P Parameter: Treatment Value: Roundup vs. No Treatment
agcctcactctcgcgccggctcaaggtacattgcgtgtcctagccaagacacgcagctcatctcagcctcacacgcacagcaagagcgaggcgtgattcgccatgggcggcctcactatggaccaggctttcgtgcaggcccccgagcaccgccccaagcccctcgtcaccgaggccaccggcatccctctcatcgacctctcgcctctgtccgccagcggcggcgccgtggacgcgctggccgccgaggtgggcgcggcgagccgggactggggcttcttcgtggtcgtgggccacggcgtgcccgcagagaccatggcgcgcgcgacggaggcgcagcgcgcgttcttcgcgctgccggcagagcggaaggccgccgtgcggaggaacgaggcggagccgctcgggtactacgagtcggagcacaccaagaacgtgagggactggaaggaggtgtacgacctcgtgccgcgcgagccgccgccgccggctgccgtggccgacggcgagctcgtgttcgagaacaagtggccccaggatctgccgggcttcagagaggcgctggaggagtacgccaaagcgatggaagagctggcgttcaagctgctggagctgatcgctcggagcctgaagctgaggcccgaccggctgcacggcttcttcaaggaccagacgaccttcatccggctgaaccactaccctccttgcccgagccccgacctggccctcggcgtggggcggcacaaggacgccggcgccctgaccatcctgtaccaggacgacgtcggggggctcgacgtccggcggcgctccgacggcgagtgggtccgcgtcaggcccgtgcccgactcgttcatcatcaacgtcggcgacctcatccaggtgtggagcaacgacaggtacgagagcgcggagcaccggggtgtcggtgaactcggcgagggagaggttctccatgccctacttcttcaacccggcgacctacaccatggtggagccggtggaggagctggtgagcaaggacgatccgcccaggtacgacgcctacaactggggcgacttcttcagcaccaggaagaacagcaacttcaagaagctcaacgtggagaacattcagatcgcgcatttcaagaagagcctcgtcctcgcctaactactgctactgctaggatccatgccattgccatgtcgtcttcagattcagagcacgccatgtcgtcgctagcttcgtggtagaacaaataatgatgtgcgtgctgtgtgtaagcatggatatggatgtgaatatgtaatatgatgagcactcctactttggtatgtttgggaataacagacttgtgttggtctggttcattatttgc

SEQ ID NO: 3478 - protein, 377 aa, Zea mays subsp. mays
  peptide (1)..(377): Ceres Seq. ID no. 12367973
  misc_feature (190)..(275): Pfam Name: 2OG-Fe(II) oxygenase superfamily Pfam Description: 2OG-Fe(II) oxygenase superfamily
  misc_feature (1)..(291): Homolog of NCBI NO: 15229694 NR Description: putative leucoanthocyanidin dioxygenase; protein
  misc_feature (19)..(291): Homolog of NCBI NO: 21537324 NR Description: leucoanthocyanidin dioxygenase-like protein
  misc_feature (19)..(291): Homolog of NCBI NO: 15239179 NR Description: leucoanthocyanidin dioxygenase-like protein
  misc_feature (43)..(246): Homolog of NCBI NO: 18103924 NR Description: putative oxylase protein [Pinus pinaster]
  misc_feature (6)..(261): Homolog of NCBI NO: 30685157 NR Description: flavonol synthase family [Arabidopsis thaliana]
  misc_feature (6)..(275): Homolog of NCBI NO: 18402081 NR Description: expressed protein
  misc_feature (6)..(275): Homolog of NCBI NO: 21593702 NR Description: unknown [Arabidopsis thaliana]
  misc_feature (6)..(275): Homolog of NCBI NO: 18402079 NR Description: expressed protein
  misc_feature (216)..(273): Homolog of NCBI NO: 40253917 NR Description: putative Isopenicillin N synthase and related
  misc_feature (1)..(151): Homolog of NCBI NO: 40253917 NR Description: putative Isopenicillin N synthase and related
MGGLTMDQAFVQAPEHRPKPLVTEATGIPLIDLSPLSASGGAVDALAAEVGAASRDWGFFVVVGHGVPAETMARATEAQRAFFALPAERKAAVRRNEAEPLGYYESEHTKNVRDWKEVYDLVPREPPPPAAVADGELVFENKWPQDLPGFREALEEYAKAMEELAFKLLELIARSLKLRPDRLHGFFKDQTTFIRLNHYPPCPSPDLALGVGRHKDAGALTILYQDDVGGLDVRRRSDGEWVRVRPVPDSFIINVGDLIQVWSNDRYESAEHRGVGELGEGEVLHALLLQPGDLHHGGAGGGAGEQGRSAQVRRLQLGRLLQHQEEQQLQEAQRGEHSDRAFQEEPRPRLTTATARIHAIAMSSSDSEHAMSSLASW

SEQ ID NO: 3479 - protein, 372 aa, Zea mays subsp. mays
  peptide (1)..(372): Ceres Seq. ID no. 12367974
  misc_feature (185)..(270): Pfam Name: 2OG-Fe(II) oxygenase superfamily Pfam Description: 2OG-Fe(II) oxygenase superfamily
  misc_feature (1)..(286): Homolog of NCBI NO: 15229694 NR Description: putative leucoanthocyanidin dioxygenase; protein
  misc_feature (14)..(286): Homolog of NCBI NO: 21537324 NR Description: leucoanthocyanidin dioxygenase-like protein
  misc_feature (14)..(286): Homolog of NCBI NO: 15239179 NR Description: leucoanthocyanidin dioxygenase-like protein
  misc_feature (38)..(241): Homolog of NCBI NO: 18103924 NR Description: putative oxylase protein [Pinus pinaster]
  misc_feature (1)..(256): Homolog of NCBI NO: 30685157 NR Description: flavonol synthase family [Arabidopsis thaliana]
  misc_feature (1)..(270): Homolog of NCBI NO: 18402081 NR Description: expressed protein
  misc_feature (1)..(270): Homolog of NCBI NO: 21593702 NR Description: unknown [Arabidopsis thaliana]
  misc_feature (1)..(270): Homolog of NCBI NO: 18402079 NR Description: expressed protein
  misc_feature (211)..(268): Homolog of NCBI NO: 40253917 NR Description: putative Isopenicillin N synthase and related
  misc_feature (1)..(146): Homolog of NCBI NO: 40253917 NR Description: putative Isopenicillin N synthase and related
MDQAFVQAPEHRPKPLVTEATGIPLIDLSPLSASGGAVDALAAEVGAASRDWGFFVVVGHGVPAETMARATEAQRAFFALPAERKAAVRRNEAEPLGYYESEHTKNVRDWKEVYDLVPREPPPPAAVADGELVFENKWPQDLPGFREALEEYAKAMEELAFKLLELIARSLKLRPDRLHGFFKDQTTFIRLNHYPPCPSPDLALGVGRHKDAGALTILYQDDVGGLDVRRRSDGEWVRVRPVPDSFIINVGDLIQVWSNDRYESAEHRGVGELGEGEVLHALLLQPGDLHHGGAGGGAGEQGRSAQVRRLQLGRLLQHQEEQQLQEAQRGEHSDRAFQEEPRPRLTTATARIHAIAMSSSDSEHAMSSLASW

SEQ ID NO: 3480 - protein, 309 aa, Zea mays subsp. mays
  peptide (1)..(309): Ceres Seq. ID no. 12367975
  misc_feature (101)..(309): Pfam Name: HlyD family secretion protein Pfam Description: HlyD family secretion protein
PHSRAGSRYIACPSQDTQLISASHAQQERGVIRHGRPHYGPGFRAGPRAPPQAPRHRGHRHPSHRPLASVRQRRRRGRAGRRGGRGEPGLGLLRGRGPRRARRDHGARDGGAARVLRAAGRAEGRRAEERGGAARVLRVGAHQEREGLEGGVRPRAARAAAAGCRGRRRARVREQVAPGSAGLQRGAGGVRQSDGRAGVQAAGADRSEPEAEARPAARLLQGPDDLHPAEPLPSLPEPRPGPRRGAAQGRRRPDHPVPGRRRGARRPAALRRRVGPRQARARLVHHQRRRPHPGVEQRQVRERGAPGCR

SEQ ID NO: 3481 - DNA, 1212 bp, Zea mays subsp. mays
  misc_feature (1)..(1212): Ceres Seq. ID no. 12359992
  misc_feature: MA Experiment ID: 108535 Result: Up-regulated in Transcription
  misc_feature: MA Experiment 108535 PARAMETER Experiment Name: Zm_Meristem_P Parameter: Age (day) Value: 8
  misc_feature: MA Experiment 108535 PARAMETER Experiment Name: Zm_Meristem_P Parameter: Organism Value: Zea mays
  misc_feature: MA Experiment 108535 PARAMETER Experiment Name: Zm_Meristem_P Parameter: Plant Line Value: 35A19
  misc_feature: MA Experiment 108535 PARAMETER Experiment Name: Zm_Meristem_P Parameter: Tissue Value: Root Meristem vs. Above Root Meristem
  misc_feature: MA Experiment ID: 108556 Result: Down-regulated in Transcription
  misc_feature: MA Experiment 108556 PARAMETER Experiment Name: Zm_Drought_P Parameter: Age (day) Value: 9
  misc_feature: MA Experiment 108556 PARAMETER Experiment Name: Zm_Drought_P Parameter: Organism Value: Zea mays
  misc_feature: MA Experiment 108556 PARAMETER Experiment Name: Zm_Drought_P Parameter: Plant Line Value: 35A19
  misc_feature: MA Experiment 108556 PARAMETER Experiment Name: Zm_Drought_P Parameter: Timepoint (hr) Value: 24
  misc_feature: MA Experiment 108556 PARAMETER Experiment Name: Zm_Drought_P Parameter: Tissue Value: Aerial
  misc_feature: MA Experiment 108556 PARAMETER Experiment Name: Zm_Drought_P Parameter: Treatment Value: Drought vs. No Drought
  misc_feature: MA Experiment ID: 20000108 Result: Up-regulated in Transcription
  misc_feature: MA Experiment 20000108 PARAMETER Experiment Name: Zm_Root-Tips_P Parameter: Age (day) Value: 12
  misc_feature: MA Experiment 20000108 PARAMETER Experiment Name: Zm_Root-Tips_P Parameter: Organism Value: Zea mays
  misc_feature: MA Experiment 20000108 PARAMETER Experiment Name: Zm_Root-Tips_P Parameter: Tissue Value: Root tips vs. Root mid region    35
  misc_feature: MA Experiment 20000108 PARAMETER Experiment Name: Zm_Root-Tips_P Parameter: Tissue Value: Root tips vs. Root mid region   Sequence Listing-Misc Features (4)
  misc_feature: MA Experiment ID: 20000492 Result: Up-regulated in Transcription
  misc_feature: MA Experiment 20000492 PARAMETER Experiment Name: Zm_Hybrid_Seed_Dev_P Parameter: DAP Value: 12
  misc_feature: MA Experiment 20000492 PARAMETER Experiment Name: Zm_Hybrid_Seed_Dev_P Parameter: Organism Value: Zea mays
  misc_feature: MA Experiment 20000492 PARAMETER Experiment Name: Zm_Hybrid_Seed_Dev_P Parameter: Plant Line Value: 35A19
  misc_feature: MA Experiment 20000492 PARAMETER Experiment Name: Zm_Hybrid_Seed_Dev_P Parameter: Tissue Value: Fert Kernel vs. Unfert Floret
agaacttctccctcagtttccctttatgatccagtccgtccccacgtttgatctcggcgtactgttgtgggagacgcttgcggcgacgatttcccccggtttttatttgaatttctcgggcgctgttatgtgcggcggctagatctgcttgtcgctggtgcagtaggagtttctcgctcggttccgatcctgagaacccgaccgcgcgggtatctgtattccttgatcaacatgtcgcgggaggagaatgtttatatggccaagctggctgagcaagcagaacggtacgaggaaatggttgaatacatggagaaggtggctaagaccacagatgtgcaagagctcactgttgaggagcgtaaccttctatctgttgccttcaagaatgtgattgcggccccccgtgcctcatggcgcattatctcctccatcgagcagaaagaggagtcccgtaagaatgaggaacatgttgcacagatcaaggaataccgtggcaagattgaggctgaattgagcaacatttgtgatggtatcctaaagctgcttgacacgcaccttgtgccttcctccactgccacagagtcgaaggtgttttacctcaagatgaagggtgattatcacaggtaccttgctgagtttaagactggtgctgagaggaaggaatctgcagagagcacaatggtagcttataaggcagctcaggatattgcattggctgaactgccacctattcatcccataaggcttggacttgcacttaacttctcagttttctattacgagattcagaactctccagacaaagcttgcaatcttgccaaggaggcgtttgatgaagctatttctcagttggacatgcttggtgaggattcctacaaagatagcaacttgattatgcagctcctgagggacaacttgaccctctggacggaggacggcattgaggagggcttagaatcctcgaagggcgatgctggtgagggtcagtagcctggtaaacttagattgatggttcgacgtgtttctcaagcacatcgtgttggacgcccagtgctgacagaaggcttttgctgctccatgcattccaagcttctgccctttcgttcgcaccctcttcatgttgttggctggtagtggtcagatttagtcccattggtttagttggccctgggtccatctgaactgatgtattgttactgctaggaagtcaag

SEQ ID NO: 3482 - protein, 252 aa, Zea mays subsp. mays
  peptide (1)..(252): Ceres Seq. ID no. 12359993
  misc_feature (3)..(240): Pfam Name: 14-3-3 protein Pfam Description: 14-3-3 protein
  misc_feature (2)..(250): Homolog of NCBI NO: 3023187 NR Description: 14-3-3-LIKE PROTEIN (G-BOX BINDING FACTOR)
  misc_feature (1)..(252): Homolog of NCBI NO: 7435015 NR Description: 14-3-3 protein - barley
  misc_feature (2)..(251): Homolog of NCBI NO: 13702816 NR Description: putative 14-3-3 protein [Oryza sativa]
  misc_feature (1)..(252): Homolog of NCBI NO: 2492487 NR Description: 14-3-3-LIKE PROTEIN B (14-3-3B)
  misc_feature (1)..(252): Homolog of NCBI NO: 7435021 NR Description: GF14-b protein - rice
  misc_feature (2)..(252): Homolog of NCBI NO: 12229593 NR Description: 14-3-3-like protein
  misc_feature (2)..(252): Homolog of NCBI NO: 2921512 NR Description: GF14 protein [Fritillaria agrestis]
  misc_feature (1)..(252): Homolog of NCBI NO: 7271253 NR Description: 14-3-3-like protein [Oryza sativa]
  misc_feature (1)..(252): Homolog of NCBI NO: 7435022 NR Description: GF14-c protein - rice
  misc_feature (1)..(252): Homolog of NCBI NO: 37903393 NR Description: 14-3-3-like protein [Saccharum hybrid cultivar
MSREENVYMAKLAEQAERYEEMVEYMEKVAKTTDVQELTVEERNLLSVAFKNVIAAPRASWRIISSIEQKEESRKNEEHVAQIKEYRGKIEAELSNICDGILKLLDTHLVPSSTATESKVFYLKMKGDYHRYLAEFKTGAERKESAESTMVAYKAAQDIALAELPPIHPIRLGLALNFSVFYYEIQNSPDKACNLAKEAFDEAISQLDMLGEDSYKDSNLIMQLLRDNLTLWTEDGIEEGLESSKGDAGEGQ

SEQ ID NO: 3483 - protein, 244 aa, Zea mays subsp. mays
  peptide (1)..(244): Ceres Seq. ID no. 12359994
  misc_feature (1)..(232): Pfam Name: 14-3-3 protein Pfam Description: 14-3-3 protein
  misc_feature (1)..(242): Homolog of NCBI NO: 3023187 NR Description: 14-3-3-LIKE PROTEIN (G-BOX BINDING FACTOR)
  misc_feature (1)..(244): Homolog of NCBI NO: 7435015 NR Description: 14-3-3 protein - barley
  misc_feature (1)..(243): Homolog of NCBI NO: 13702816 NR Description: putative 14-3-3 protein [Oryza sativa]
  misc_feature (1)..(244): Homolog of NCBI NO: 2492487 NR Description: 14-3-3-LIKE PROTEIN B (14-3-3B)
  misc_feature (1)..(244): Homolog of NCBI NO: 7435021 NR Description: GF14-b protein - rice
  misc_feature (1)..(244): Homolog of NCBI NO: 12229593 NR Description: 14-3-3-like protein
  misc_feature (1)..(244): Homolog of NCBI NO: 2921512 NR Description: GF14 protein [Fritillaria agrestis]
  misc_feature (1)..(244): Homolog of NCBI NO: 7271253 NR Description: 14-3-3-like protein [Oryza sativa]
  misc_feature (1)..(244): Homolog of NCBI NO: 7435022 NR Description: GF14-c protein - rice
  misc_feature (1)..(244): Homolog of NCBI NO: 37903393 NR Description: 14-3-3-like protein [Saccharum hybrid cultivar
MAKLAEQAERYEEMVEYMEKVAKTTDVQELTVEERNLLSVAFKNVIAAPRASWRIISSIEQKEESRKNEEHVAQIKEYRGKIEAELSNICDGILKLLDTHLVPSSTATESKVFYLKMKGDYHRYLAEFKTGAERKESAESTMVAYKAAQDIALAELPPIHPIRLGLALNFSVFYYEIQNSPDKACNLAKEAFDEAISQLDMLGEDSYKDSNLIMQLLRDNLTLWTEDGIEEGLESSKGDAGEGQ

SEQ ID NO: 3484 - protein, 231 aa, Zea mays subsp. mays
  peptide (1)..(231): Ceres Seq. ID no. 12359995
  misc_feature (1)..(219): Pfam Name: 14-3-3 protein Pfam Description: 14-3-3 protein
  misc_feature (1)..(229): Homolog of NCBI NO: 3023187 NR Description: 14-3-3-LIKE PROTEIN (G-BOX BINDING FACTOR)
  misc_feature (1)..(231): Homolog of NCBI NO: 7435015 NR Description: 14-3-3 protein - barley
  misc_feature (1)..(230): Homolog of NCBI NO: 13702816 NR Description: putative 14-3-3 protein [Oryza sativa]
  misc_feature (1)..(231): Homolog of NCBI NO: 2492487 NR Description: 14-3-3-LIKE PROTEIN B (14-3-3B)
  misc_feature (1)..(231): Homolog of NCBI NO: 7435021 NR Description: GF14-b protein - rice
  misc_feature (1)..(231): Homolog of NCBI NO: 12229593 NR Description: 14-3-3-like protein
  misc_feature (1)..(231): Homolog of NCBI NO: 2921512 NR Description: GF14 protein [Fritillaria agrestis]
  misc_feature (1)..(231): Homolog of NCBI NO: 7271253 NR Description: 14-3-3-like protein [Oryza sativa]
  misc_feature (1)..(231): Homolog of NCBI NO: 7435022 NR Description: GF14-c protein - rice
  misc_feature (1)..(231): Homolog of NCBI NO: 37903393 NR Description: 14-3-3-like protein [Saccharum hybrid cultivar
MVEYMEKVAKTTDVQELTVEERNLLSVAFKNVIAAPRASWRIISSIEQKEESRKNEEHVAQIKEYRGKIEAELSNICDGILKLLDTHLVPSSTATESKVFYLKMKGDYHRYLAEFKTGAERKESAESTMVAYKAAQDIALAELPPIHPIRLGLALNFSVFYYEIQNSPDKACNLAKEAFDEAISQLDMLGEDSYKDSNLIMQLLRDNLTLWTEDGIEEGLESSKGDAGEGQ

SEQ ID NO: 3485 - DNA, 850 bp, Zea mays subsp. mays
  misc_feature (1)..(850): Ceres Seq. ID no. 12342801
  misc_feature: MA Experiment ID: 108528 Result: Down-regulated in Transcription
  misc_feature: MA Experiment 108528 PARAMETER Experiment Name: Zm_Imbibed_Seeds_P Parameter: Age (day) Value: 5 vs. 2
  misc_feature: MA Experiment 108528 PARAMETER Experiment Name: Zm_Imbibed_Seeds_P Parameter: Organism Value: Zea mays
  misc_feature: MA Experiment 108528 PARAMETER Experiment Name: Zm_Imbibed_Seeds_P Parameter: Plant Line Value: 35A19
  misc_feature: MA Experiment 108528 PARAMETER Experiment Name: Zm_Imbibed_Seeds_P Parameter: Tissue Value: Aerial vs. Embryo
  misc_feature: MA Experiment ID: 108530 Result: Down-regulated in Transcription
  misc_feature: MA Experiment 108530 PARAMETER Experiment Name: Zm_Imbibed_Seeds_P Parameter: Age (day) Value: 6 vs. 2
  misc_feature: MA Experiment 108530 PARAMETER Experiment Name: Zm_Imbibed_Seeds_P Parameter: Organism Value: Zea mays
  misc_feature: MA Experiment 108530 PARAMETER Experiment Name: Zm_Imbibed_Seeds_P Parameter: Plant Line Value: 35A19
  misc_feature: MA Experiment 108530 PARAMETER Experiment Name: Zm_Imbibed_Seeds_P Parameter: Tissue Value: Aerial vs. Embryo
  misc_feature: MA Experiment ID: 108535 Result: Up-regulated in Transcription
  misc_feature: MA Experiment 108535 PARAMETER Experiment Name: Zm_Meristem_P Parameter: Age (day) Value: 8
  misc_feature: MA Experiment 108535 PARAMETER Experiment Name: Zm_Meristem_P Parameter: Organism Value: Zea mays
  misc_feature: MA Experiment 108535 PARAMETER Experiment Name: Zm_Meristem_P Parameter: Plant Line Value: 35A19
  misc_feature: MA Experiment 108535 PARAMETER Experiment Name: Zm_Meristem_P Parameter: Tissue Value: Root Meristem vs. Above Root Meristem
  misc_feature: MA Experiment ID: 108543 Result: Up-regulated in Transcription
  misc_feature: MA Experiment ID: 108544 Result: Down-regulated in Transcription
  misc_feature: MA Experiment ID: 108545 Result: Down-regulated in Transcription
  misc_feature: MA Experiment 108545 PARAMETER Experiment Name: Zm_Imbibed_Seeds_P Parameter: Age (day) Value: 3 vs. 2
  misc_feature: MA Experiment 108545 PARAMETER Experiment Name: Zm_Imbibed_Seeds_P Parameter: Organism Value: Zea mays
  misc_feature: MA Experiment 108545 PARAMETER Experiment Name: Zm_Imbibed_Seeds_P Parameter: Plant Line Value: 35A19
  misc_feature: MA Experiment 108545 PARAMETER Experiment Name: Zm_Imbibed_Seeds_P Parameter: Tissue Value: Aerial vs. Embryo
  misc_feature: MA Experiment ID: 108547 Result: Down-regulated in Transcription
  misc_feature: MA Experiment 108547 PARAMETER Experiment Name: Zm_Imbibed_Seeds_P Parameter: Age (day) Value: 4 vs. 2
  misc_feature: MA Experiment 108547 PARAMETER Experiment Name: Zm_Imbibed_Seeds_P Parameter: Organism Value: Zea mays
  misc_feature: MA Experiment 108547 PARAMETER Experiment Name: Zm_Imbibed_Seeds_P Parameter: Plant Line Value: 35A19
  misc_feature: MA Experiment 108547 PARAMETER Experiment Name: Zm_Imbibed_Seeds_P Parameter: Tissue Value: Aerial vs. Embryo
  misc_feature: MA Experiment ID: 108556 Result: Down-regulated in Transcription
  misc_feature: MA Experiment 108556 PARAMETER Experiment Name: Zm_Drought_P Parameter: Age (day) Value: 9
  misc_feature: MA Experiment 108556 PARAMETER Experiment Name: Zm_Drought_P Parameter: Organism Value: Zea mays
  misc_feature: MA Experiment 108556 PARAMETER Experiment Name: Zm_Drought_P Parameter: Plant Line Value: 35A19
  misc_feature: MA Experiment 108556 PARAMETER Experiment Name: Zm_Drought_P Parameter: Timepoint (hr) Value: 24
  misc_feature: MA Experiment 108556 PARAMETER Experiment Name: Zm_Drought_P Parameter: Tissue Value: Aerial
  misc_feature: MA Experiment 108556 PARAMETER Experiment Name: Zm_Drought_P Parameter: Treatment Value: Drought vs. No Drought
  misc_feature: MA Experiment ID: 20000108 Result: Up-regulated in Transcription
  misc_feature: MA Experiment 20000108 PARAMETER Experiment Name: Zm_Root-Tips_P Parameter: Age (day) Value: 12
  misc_feature: MA Experiment 20000108 PARAMETER Experiment Name: Zm_Root-Tips_P Parameter: Organism Value: Zea mays
  misc_feature: MA Experiment 20000108 PARAMETER Experiment Name: Zm_Root-Tips_P Parameter: Tissue Value: Root tips vs. Root mid region    35
  misc_feature: MA Experiment 20000108 PARAMETER Experiment Name: Zm_Root-Tips_P Parameter: Tissue Value: Root tips vs. Root mid region   Sequence Listing-Misc Features (4)
  misc_feature: MA Experiment ID: 20000479 Result: Down-regulated in Transcription
  misc_feature: MA Experiment 20000479 PARAMETER Experiment Name: Zm_Drought_P Parameter: Age (day) Value: 10
  misc_feature: MA Experiment 20000479 PARAMETER Experiment Name: Zm_Drought_P Parameter: Organism Value: Zea mays
  misc_feature: MA Experiment 20000479 PARAMETER Experiment Name: Zm_Drought_P Parameter: Plant Line Value: 35A19
  misc_feature: MA Experiment 20000479 PARAMETER Experiment Name: Zm_Drought_P Parameter: Timepoint (hr) Value: 48
  misc_feature: MA Experiment 20000479 PARAMETER Experiment Name: Zm_Drought_P Parameter: Tissue Value: Aerial
  misc_feature: MA Experiment 20000479 PARAMETER Experiment Name: Zm_Drought_P Parameter: Treatment Value: Drought vs. No Drought
atctcagcttcacttccactccacacctcttcagaatggcttctagcaagctctttgcggttggcctcaccgtcttactaagcattattggactgtgcaatgctattagggtggtaaaccacgccaccgcagatggacaaggcggtggaggtggtggaggcggcgggagcggaaccagctatggctccggatccggctccggctacggcgatgccgaggcctatgacggcagtgcccagtccccaacctctggccacgcatatggcagtggatccggggacggtggtggcgtttggcaaggtgacgacgagtgcgcgtccggttacggggcgggcggcgcatccggtgaaggccatggcgactcaggtaactccaacaccgatggcgctgcgaatgcgagcggagctggcggcgggggcggttctggtgggagcaatgggaatggcagcggatctggtggcggcagtggagttggagaaggcgaaggcgataactatggtccctatggttcgagctacgcaaatagcggtggcgccggaaggggaagcggaggcggtcgtaatggtggattcggcggcggttccggtggtggagcggggagcagtggtggtgccgcgtcaggttatgatgatggcagctacaacggatcaacaccttaattatgttcatttgtttgtaccacactgtcaagcaaccgacacgtactgatagggtttttctgtgcttgtgaaataatttggcctttctgagcgatgcagaagtttgttctactcatgtaataagccactgccatttctctgtatacgccatgtttgggctatagatgtcggttagtagacgttcttttgct

SEQ ID NO: 3486 - protein, 218 aa, Zea mays subsp. mays
  peptide (1)..(218): Ceres Seq. ID no. 12342802
  misc_feature (40)..(212): Pfam Name: Dehydrin Pfam Description: Dehydrin
  misc_feature (15)..(207): Homolog of NCBI NO: 15887008 NR Description: glycine rich protein [Oryza sativa]
  misc_feature (12)..(215): Homolog of NCBI NO: 37534900 NR Description: putative glycine-rich protein
  misc_feature (12)..(215): Homolog of NCBI NO: 37534910 NR Description: putative glycine-rich protein
  misc_feature (41)..(211): Homolog of NCBI NO: 37534920 NR Description: putative glycine-rich protein
  misc_feature (12)..(208): Homolog of NCBI NO: 37534934 NR Description: putative glycine-rich protein
  misc_feature (15)..(207): Homolog of NCBI NO: 37534932 NR Description: putative glycine-rich protein
  misc_feature (16)..(207): Homolog of NCBI NO: 37534930 NR Description: putative glycine-rich protein
  misc_feature (12)..(215): Homolog of NCBI NO: 37534924 NR Description: putative glycine-rich protein
  misc_feature (24)..(215): Homolog of NCBI NO: 121632 NR Description: GLYCINE-RICH CELL WALL STRUCTURAL PROTEIN 1.8
  misc_feature (12)..(215): Homolog of NCBI NO: 37534920 NR Description: putative glycine-rich protein
LSFTSTPHLFRMASSKLFAVGLTVLLSIIGLCNAIRVVNHATADGQGGGGGGGGGSGTSYGSGSGSGYGDAEAYDGSAQSPTSGHAYGSGSGDGGGVWQGDDECASGYGAGGASGEGHGDSGNSNTDGAANASGAGGGGGSGGSNGNGSGSGGGSGVGEGEGDNYGPYGSSYANSGGAGRGSGGGRNGGFGGGSGGGAGSSGGAASGYDDGSYNGSTP

SEQ ID NO: 3487 - protein, 207 aa, Zea mays subsp. mays
  peptide (1)..(207): Ceres Seq. ID no. 12342803
  misc_feature (29)..(201): Pfam Name: Dehydrin Pfam Description: Dehydrin
  misc_feature (1)..(204): Homolog of NCBI NO: 37534900 NR Description: putative glycine-rich protein
  misc_feature (13)..(204): Homolog of NCBI NO: 121632 NR Description: GLYCINE-RICH CELL WALL STRUCTURAL PROTEIN 1.8
  misc_feature (1)..(204): Homolog of NCBI NO: 37534910 NR Description: putative glycine-rich protein
  misc_feature (1)..(204): Homolog of NCBI NO: 37534924 NR Description: putative glycine-rich protein
  misc_feature (30)..(200): Homolog of NCBI NO: 37534920 NR Description: putative glycine-rich protein
  misc_feature (5)..(196): Homolog of NCBI NO: 37534930 NR Description: putative glycine-rich protein
  misc_feature (1)..(197): Homolog of NCBI NO: 37534934 NR Description: putative glycine-rich protein
  misc_feature (4)..(196): Homolog of NCBI NO: 37534932 NR Description: putative glycine-rich protein
  misc_feature (4)..(196): Homolog of NCBI NO: 15887008 NR Description: glycine rich protein [Oryza sativa]
  misc_feature (1)..(204): Homolog of NCBI NO: 37534920 NR Description: putative glycine-rich protein
MASSKLFAVGLTVLLSIIGLCNAIRVVNHATADGQGGGGGGGGGSGTSYGSGSGSGYGDAEAYDGSAQSPTSGHAYGSGSGDGGGVWQGDDECASGYGAGGASGEGHGDSGNSNTDGAANASGAGGGGGSGGSNGNGSGSGGGSGVGEGEGDNYGPYGSSYANSGGAGRGSGGGRNGGFGGGSGGGAGSSGGAASGYDDGSYNGSTP

SEQ ID NO: 3488 - protein, 191 aa, Zea mays subsp. mays
  peptide (1)..(191): Ceres Seq. ID no. 12342804
MDKAVEVVEAAGAEPAMAPDPAPATAMPRPMTAVPSPQPLATHMAVDPGTVVAFGKVTTSARPVTGRAAHPVKAMATQVTPTPMALRMRAELAAGAVLVGAMGMAADLVAAVELEKAKAITMVPMVRATQIAVAPEGEAEAVVMVDSAAVPVVERGAVVVPRQVMMMAATTDQHLNYVHLFVPHCQATDTY

SEQ ID NO: 3489 - DNA, 1336 bp, Zea mays subsp. mays
  misc_feature (1)..(1336): Ceres Seq. ID no. 12342777
  misc_feature: MA Experiment ID: 108527 Result: Up-regulated in Transcription
  misc_feature: MA Experiment 108527 PARAMETER Experiment Name: Zm_5mM_NO_P Parameter: Age (day) Value: 8
  misc_feature: MA Experiment 108527 PARAMETER Experiment Name: Zm_5mM_NO_P Parameter: Organism Value: Zea mays
  misc_feature: MA Experiment 108527 PARAMETER Experiment Name: Zm_5mM_NO_P Parameter: Plant Line Value: 35A19
  misc_feature: MA Experiment 108527 PARAMETER Experiment Name: Zm_5mM_NO_P Parameter: Timepoint (hr) Value: 6
  misc_feature: MA Experiment 108527 PARAMETER Experiment Name: Zm_5mM_NO_P Parameter: Tissue Value: Aerial
  misc_feature: MA Experiment 108527 PARAMETER Experiment Name: Zm_5mM_NO_P Parameter: Treatment Value: 5mM NO vs. No Treatment
agatagatagagtagtagtaggttgttagctgaggggaggcatcgatggctggagccaagagaggaatcctgctcgtcctgtgcctggccgtcgtcttggtggcgctcgggagtggcggcgtggaggcgaggaagcgagggaagcagtccctggggttctacgagctgcgtcggggcgagttctccatggtcgtcaccaactggggcgccaccatcctctccgtcaggctccccgataagaacgggcacatcgacgacgtcgttcttggctacaagaacatcggatcgtacgtcaacgacacgacctacttcggcgcgctggtggggcgcgtggcgaaccgcatcgccggcgggcggttcaccatcagggaccacgcctaccacacgtatcggaacgacggcaacaacacgctccacggcgggccaccgcgggttcaaccaggtgttctggtccgtccgggagcgcgtcacgggggagttcccgcacatcaccttcgcctaccgcagctacgacggcgagcaagggttcccgggcaacctggacgtgctggtcacctacaagatcgacggcgactgctcgtacagcgtcaccatgtacgcgcggccgctggacaagcccacccccgtgaacctggcgcagcacacgtactggaacctccgcggccacggcaacggcaccgtcctgcgccacgccgtccagatcttcgcgtccgcggtcacgcccgtgggccgcggcctcatcccgacgggcgcggtcacccccgtcgccggcactccgttnnanttccgcgccnngtcggcgcccggcgcgcacatcgccgaggtcgagggtgggtacgacatcaactacgtgctggacggcgagacggacgggcaaggcgtgcgcaaggtggccgtggtcagcgaggcggactccgggcgcgtcatggagctntgggccgaccagccgggcctgcagttctacactggcaacatgcttaagggcgacgagggcaagggcggcgccgtctaccccaaatacgctgggatgtgcctggagacgcaagactacccggacgccgtgcacgagccggccttcccggccgaggtgtaccgccctggccaactctacaagcactacatgctctacaagttctcaatcagcaagtaggaacttctagtacctctcgtgcctgatgcctcatagtttcggtaggtttgcaacctgttgcgactagtaataagggttctgagtctttttttttagaaaaaattgcaacagaaatgtatggttcgagttcgtccaaactttgtctagtcaacattttctgccatttgaatgccatcttaatagtct

SEQ ID NO: 3490 - protein, 311 aa, Zea mays subsp. mays
  peptide (1)..(311): Ceres Seq. ID no. 12342778
  misc_feature (39)..(126): Pfam Name: Aldose 1-epimerase Pfam Description: Aldose 1-epimerase
  misc_feature (40)..(126): Homolog of NCBI NO: 37531218 NR Description: putative aldose 1-epimerase - like protein
  misc_feature (26)..(127): Homolog of NCBI NO: 7430313 NR Description: probable aldose 1-epimerase (EC 5.1.3.3) - common
  misc_feature (8)..(146): Homolog of NCBI NO: 15824565 NR Description: non-cell-autonomous protein pathway1;
  misc_feature (9)..(146): Homolog of NCBI NO: 15824567 NR Description: non-cell-autonomous protein pathway2;
  misc_feature (26)..(126): Homolog of NCBI NO: 15242223 NR Description: putative aldose 1-epimerase - like protein
  misc_feature (5)..(126): Homolog of NCBI NO: 15228261 NR Description: aldose 1-epimerase - like protein
  misc_feature (5)..(126): Homolog of NCBI NO: 21537069 NR Description: aldose 1-epimerase-like protein [Arabidopsis
  misc_feature (1)..(126): Homolog of NCBI NO: 38567884 NR Description: OSJNBa0036B21.19 [Oryza sativa (japonica
  misc_feature (4)..(125): Homolog of NCBI NO: 38567883 NR Description: OSJNBa0036B21.18 [Oryza sativa (japonica
  misc_feature (10)..(126): Homolog of NCBI NO: 40882679 NR Description: putative aldose 1-epimerase
  misc_feature (246)..(246): Xaa is any aa, unknown or other
  misc_feature (247)..(247): Xaa is any aa, unknown or other
  misc_feature (250)..(250): Xaa is any aa, unknown or other
  misc_feature (297)..(297): Xaa is any aa, unknown or other
MAGAKRGILLVLCLAVVLVALGSGGVEARKRGKQSLGFYELRRGEFSMVVTNWGATILSVRLPDKNGHIDDVVLGYKNIGSYVNDTTYFGALVGRVANRIAGGRFTIRDHAYHTYRNDGNNTLHGGPPRVQPGVLVRPGARHGGVPAHHLRLPQLRRRARVPGQPGRAGHLQDRRRLLVQRHHVRAAAGQAHPREPGAAHVLEPPRPRQRHRPAPRRPDLRVRGHARGPRPHPDGRGHPRRRHSVXXPRXVGARRAHRRGRGWVRHQLRAGRRDGRARRAQGGRGQRGGLRARHGAXGRPAGPAVLHWQHA

SEQ ID NO: 3491 - protein, 264 aa, Zea mays subsp. mays
  peptide (1)..(264): Ceres Seq. ID no. 12342779
  misc_feature (1)..(79): Pfam Name: Aldose 1-epimerase Pfam Description: Aldose 1-epimerase
  misc_feature (1)..(79): Homolog of NCBI NO: 37531218 NR Description: putative aldose 1-epimerase - like protein
  misc_feature (1)..(80): Homolog of NCBI NO: 7430313 NR Description: probable aldose 1-epimerase (EC 5.1.3.3) - common
  misc_feature (1)..(99): Homolog of NCBI NO: 15824565 NR Description: non-cell-autonomous protein pathway1;
  misc_feature (1)..(99): Homolog of NCBI NO: 15824567 NR Description: non-cell-autonomous protein pathway2;
  misc_feature (1)..(79): Homolog of NCBI NO: 15242223 NR Description: putative aldose 1-epimerase - like protein
  misc_feature (1)..(79): Homolog of NCBI NO: 15228261 NR Description: aldose 1-epimerase - like protein
  misc_feature (1)..(79): Homolog of NCBI NO: 21537069 NR Description: aldose 1-epimerase-like protein [Arabidopsis
  misc_feature (1)..(79): Homolog of NCBI NO: 38567884 NR Description: OSJNBa0036B21.19 [Oryza sativa (japonica
  misc_feature (1)..(78): Homolog of NCBI NO: 38567883 NR Description: OSJNBa0036B21.18 [Oryza sativa (japonica
  misc_feature (1)..(79): Homolog of NCBI NO: 40882679 NR Description: putative aldose 1-epimerase
  misc_feature (199)..(199): Xaa is any aa, unknown or other
  misc_feature (200)..(200): Xaa is any aa, unknown or other
  misc_feature (203)..(203): Xaa is any aa, unknown or other
  misc_feature (250)..(250): Xaa is any aa, unknown or other
MVVTNWGATILSVRLPDKNGHIDDVVLGYKNIGSYVNDTTYFGALVGRVANRIAGGRFTIRDHAYHTYRNDGNNTLHGGPPRVQPGVLVRPGARHGGVPAHHLRLPQLRRRARVPGQPGRAGHLQDRRRLLVQRHHVRAAAGQAHPREPGAAHVLEPPRPRQRHRPAPRRPDLRVRGHARGPRPHPDGRGHPRRRHSVXXPRXVGARRAHRRGRGWVRHQLRAGRRDGRARRAQGGRGQRGGLRARHGAXGRPAGPAVLHWQHA

SEQ ID NO: 3492 - protein, 185 aa, Zea mays subsp. mays
  peptide (1)..(185): Ceres Seq. ID no. 12342780
  misc_feature (1)..(180): Pfam Name: Aldose 1-epimerase Pfam Description: Aldose 1-epimerase
  misc_feature (1)..(182): Homolog of NCBI NO: 37531218 NR Description: putative aldose 1-epimerase - like protein
  misc_feature (1)..(185): Homolog of NCBI NO: 7430313 NR Description: probable aldose 1-epimerase (EC 5.1.3.3) - common
  misc_feature (1)..(185): Homolog of NCBI NO: 15824565 NR Description: non-cell-autonomous protein pathway1;
  misc_feature (1)..(185): Homolog of NCBI NO: 15824567 NR Description: non-cell-autonomous protein pathway2;
  misc_feature (1)..(183): Homolog of NCBI NO: 15242223 NR Description: putative aldose 1-epimerase - like protein
  misc_feature (1)..(182): Homolog of NCBI NO: 15228261 NR Description: aldose 1-epimerase - like protein
  misc_feature (1)..(182): Homolog of NCBI NO: 21537069 NR Description: aldose 1-epimerase-like protein [Arabidopsis
  misc_feature (1)..(182): Homolog of NCBI NO: 38567884 NR Description: OSJNBa0036B21.19 [Oryza sativa (japonica
  misc_feature (1)..(182): Homolog of NCBI NO: 38567883 NR Description: OSJNBa0036B21.18 [Oryza sativa (japonica
  misc_feature (1)..(185): Homolog of NCBI NO: 40882679 NR Description: putative aldose 1-epimerase
  misc_feature (63)..(63): Xaa is any aa, unknown or other
  misc_feature (64)..(64): Xaa is any aa, unknown or other
  misc_feature (68)..(68): Xaa is any aa, unknown or other
  misc_feature (114)..(114): Xaa is any aa, unknown or other
MYARPLDKPTPVNLAQHTYWNLRGHGNGTVLRHAVQIFASAVTPVGRGLIPTGAVTPVAGTPXXFRAXSAPGAHIAEVEGGYDINYVLDGETDGQGVRKVAVVSEADSGRVMEXWADQPGLQFYTGNMLKGDEGKGGAVYPKYAGMCLETQDYPDAVHEPAFPAEVYRPGQLYKHYMLYKFSISK

SEQ ID NO: 3493 - DNA, 1099 bp, Zea mays subsp. mays
  misc_feature (1)..(1099): Ceres Seq. ID no. 13577617
  misc_feature: MA Experiment ID: 108527 Result: Down-regulated in Transcription
  misc_feature: MA Experiment 108527 PARAMETER Experiment Name: Zm_5mM_NO_P Parameter: Age (day) Value: 8
  misc_feature: MA Experiment 108527 PARAMETER Experiment Name: Zm_5mM_NO_P Parameter: Organism Value: Zea mays
  misc_feature: MA Experiment 108527 PARAMETER Experiment Name: Zm_5mM_NO_P Parameter: Plant Line Value: 35A19
  misc_feature: MA Experiment 108527 PARAMETER Experiment Name: Zm_5mM_NO_P Parameter: Timepoint (hr) Value: 6
  misc_feature: MA Experiment 108527 PARAMETER Experiment Name: Zm_5mM_NO_P Parameter: Tissue Value: Aerial
  misc_feature: MA Experiment 108527 PARAMETER Experiment Name: Zm_5mM_NO_P Parameter: Treatment Value: 5mM NO vs. No Treatment
  misc_feature: MA Experiment ID: 108528 Result: Down-regulated in Transcription
  misc_feature: MA Experiment 108528 PARAMETER Experiment Name: Zm_Imbibed_Seeds_P Parameter: Age (day) Value: 5 vs. 2
  misc_feature: MA Experiment 108528 PARAMETER Experiment Name: Zm_Imbibed_Seeds_P Parameter: Organism Value: Zea mays
  misc_feature: MA Experiment 108528 PARAMETER Experiment Name: Zm_Imbibed_Seeds_P Parameter: Plant Line Value: 35A19
  misc_feature: MA Experiment 108528 PARAMETER Experiment Name: Zm_Imbibed_Seeds_P Parameter: Tissue Value: Aerial vs. Embryo
  misc_feature: MA Experiment ID: 108529 Result: Down-regulated in Transcription
  misc_feature: MA Experiment 108529 PARAMETER Experiment Name: Zm_Imbibed_Seeds_P Parameter: Age (day) Value: 5 vs. 2
  misc_feature: MA Experiment 108529 PARAMETER Experiment Name: Zm_Imbibed_Seeds_P Parameter: Organism Value: Zea mays
  misc_feature: MA Experiment 108529 PARAMETER Experiment Name: Zm_Imbibed_Seeds_P Parameter: Plant Line Value: 35A19
  misc_feature: MA Experiment 108529 PARAMETER Experiment Name: Zm_Imbibed_Seeds_P Parameter: Tissue Value: Roots vs. Embryo
  misc_feature: MA Experiment ID: 108530 Result: Down-regulated in Transcription
  misc_feature: MA Experiment 108530 PARAMETER Experiment Name: Zm_Imbibed_Seeds_P Parameter: Age (day) Value: 6 vs. 2
  misc_feature: MA Experiment 108530 PARAMETER Experiment Name: Zm_Imbibed_Seeds_P Parameter: Organism Value: Zea mays
  misc_feature: MA Experiment 108530 PARAMETER Experiment Name: Zm_Imbibed_Seeds_P Parameter: Plant Line Value: 35A19
  misc_feature: MA Experiment 108530 PARAMETER Experiment Name: Zm_Imbibed_Seeds_P Parameter: Tissue Value: Aerial vs. Embryo
  misc_feature: MA Experiment ID: 108535 Result: Up-regulated in Transcription
  misc_feature: MA Experiment 108535 PARAMETER Experiment Name: Zm_Meristem_P Parameter: Age (day) Value: 8
  misc_feature: MA Experiment 108535 PARAMETER Experiment Name: Zm_Meristem_P Parameter: Organism Value: Zea mays
  misc_feature: MA Experiment 108535 PARAMETER Experiment Name: Zm_Meristem_P Parameter: Plant Line Value: 35A19
  misc_feature: MA Experiment 108535 PARAMETER Experiment Name: Zm_Meristem_P Parameter: Tissue Value: Root Meristem vs. Above Root Meristem
  misc_feature: MA Experiment ID: 108544 Result: Down-regulated in Transcription
  misc_feature: MA Experiment ID: 20000108 Result: Up-regulated in Transcription
  misc_feature: MA Experiment 20000108 PARAMETER Experiment Name: Zm_Root-Tips_P Parameter: Age (day) Value: 12
  misc_feature: MA Experiment 20000108 PARAMETER Experiment Name: Zm_Root-Tips_P Parameter: Organism Value: Zea mays
  misc_feature: MA Experiment 20000108 PARAMETER Experiment Name: Zm_Root-Tips_P Parameter: Tissue Value: Root tips vs. Root mid region    35
  misc_feature: MA Experiment 20000108 PARAMETER Experiment Name: Zm_Root-Tips_P Parameter: Tissue Value: Root tips vs. Root mid region   Sequence Listing-Misc Features (4)
  misc_feature: MA Experiment ID: 20000487 Result: Up-regulated in Transcription
  misc_feature: MA Experiment 20000487 PARAMETER Experiment Name: Zm_50mM_NH4NO3_L_to_H_P Parameter: Organism Value: Zea mays
  misc_feature: MA Experiment 20000487 PARAMETER Experiment Name: Zm_50mM_NH4NO3_L_to_H_P Parameter: Timepoint (hr) Value: 4
  misc_feature: MA Experiment 20000487 PARAMETER Experiment Name: Zm_50mM_NH4NO3_L_to_H_P Parameter: Tissue Value: Leaves
  misc_feature: MA Experiment 20000487 PARAMETER Experiment Name: Zm_50mM_NH4NO3_L_to_H_P Parameter: Treatment Value: 50mM NH4NO3 vs. 100mM Mannitol
  misc_feature: MA Experiment ID: 20000488 Result: Up-regulated in Transcription
  misc_feature: MA Experiment 20000488 PARAMETER Experiment Name: Zm_50mM_NH4NO3_L_to_H_P Parameter: Organism Value: Zea mays
  misc_feature: MA Experiment 20000488 PARAMETER Experiment Name: Zm_50mM_NH4NO3_L_to_H_P Parameter: Timepoint (hr) Value: 8
  misc_feature: MA Experiment 20000488 PARAMETER Experiment Name: Zm_50mM_NH4NO3_L_to_H_P Parameter: Tissue Value: Leaves
  misc_feature: MA Experiment 20000488 PARAMETER Experiment Name: Zm_50mM_NH4NO3_L_to_H_P Parameter: Treatment Value: 50mM NH4NO3 vs. 100mM Mannitol
  misc_feature: MA Experiment ID: 20000492 Result: Up-regulated in Transcription
  misc_feature: MA Experiment 20000492 PARAMETER Experiment Name: Zm_Hybrid_Seed_Dev_P Parameter: DAP Value: 12
  misc_feature: MA Experiment 20000492 PARAMETER Experiment Name: Zm_Hybrid_Seed_Dev_P Parameter: Organism Value: Zea mays
  misc_feature: MA Experiment 20000492 PARAMETER Experiment Name: Zm_Hybrid_Seed_Dev_P Parameter: Plant Line Value: 35A19
  misc_feature: MA Experiment 20000492 PARAMETER Experiment Name: Zm_Hybrid_Seed_Dev_P Parameter: Tissue Value: Fert Kernel vs. Unfert Floret
  misc_feature: MA Experiment ID: 20000535 Result: Up-regulated in Transcription
  misc_feature: MA Experiment 20000535 PARAMETER Experiment Name: Zm_Hybrid_Seed_Dev_P Parameter: DAP Value: 30 vs. 12
  misc_feature: MA Experiment 20000535 PARAMETER Experiment Name: Zm_Hybrid_Seed_Dev_P Parameter: Organism Value: Zea mays
  misc_feature: MA Experiment 20000535 PARAMETER Experiment Name: Zm_Hybrid_Seed_Dev_P Parameter: Plant Line Value: 35A19
  misc_feature: MA Experiment 20000535 PARAMETER Experiment Name: Zm_Hybrid_Seed_Dev_P Parameter: Tissue Value: Embryo vs. Unfert Floret
  misc_feature: MA Experiment ID: 20000632 Result: Down-regulated in Transcription
  misc_feature: MA Experiment 20000632 PARAMETER Experiment Name: Zm_Herbicide-Treatments_P Parameter: Timepoint (hr) Value: 4
  misc_feature: MA Experiment 20000632 PARAMETER Experiment Name: Zm_Herbicide-Treatments_P Parameter: Tissue Value: Aerial
  misc_feature: MA Experiment 20000632 PARAMETER Experiment Name: Zm_Herbicide-Treatments_P Parameter: Treatment Value: Glean vs. No Treatment
  misc_feature: MA Experiment ID: 20000633 Result: Down-regulated in Transcription
  misc_feature: MA Experiment 20000633 PARAMETER Experiment Name: Zm_Herbicide-Treatments_P Parameter: Timepoint (hr) Value: 4
  misc_feature: MA Experiment 20000633 PARAMETER Experiment Name: Zm_Herbicide-Treatments_P Parameter: Tissue Value: Aerial
  misc_feature: MA Experiment 20000633 PARAMETER Experiment Name: Zm_Herbicide-Treatments_P Parameter: Treatment Value: Trimec vs. No Treatment
  misc_feature: MA Experiment ID: 20001613 Result: Up-regulated in Transcription
  misc_feature: MA Experiment 20001613 PARAMETER Experiment Name: Zm_50ppm_KNO3_L-to-H_P Parameter: Age (day) Value: 20
  misc_feature: MA Experiment 20001613 PARAMETER Experiment Name: Zm_50ppm_KNO3_L-to-H_P Parameter: Organism Value: Zea mays
  misc_feature: MA Experiment 20001613 PARAMETER Experiment Name: Zm_50ppm_KNO3_L-to-H_P Parameter: Plant Line Value: 35A19
  misc_feature: MA Experiment 20001613 PARAMETER Experiment Name: Zm_50ppm_KNO3_L-to-H_P Parameter: Timepoint (hr) Value: 24
  misc_feature: MA Experiment 20001613 PARAMETER Experiment Name: Zm_50ppm_KNO3_L-to-H_P Parameter: Tissue Value: Roots
  misc_feature: MA Experiment 20001613 PARAMETER Experiment Name: Zm_50ppm_KNO3_L-to-H_P Parameter: Treatment Value: 50ppm KNO3 vs. 50ppm KCl
ccaaaagggtcacagttccgcctccttttcctgccttcctcctcactagtcgctcccccgcggctcgcgcaggcgggcgacacaacgaggctaaatccctatcgcgaggaggcgtgtgaggccagcggctttgcgatgacagcaccagcggacaaggggaagaaggccaagactgatgccgacggcggcgaggagaacgaacagatcgacggcgtcctcgtcctctccatcgagaagctccaggagatacaggacgagctcgagaaggtaaatgaggaagcaagtgacaaggttatggaggtggagcagaaatacagtgagatccgcagacctgtctatctcaagaggggtgacattatcaagaccatcccggacttttggctcacagcgtttatgagccatcctctattaagtgagcttctgactgaagaggaccagaagatattcaagtacttagactccattgatgtggatgattctgatgttaaggcaggatactccattcatcttaacttctctgagaacccgtactttgaggacacaaagcttgcaaagacctatatctttgctgatgatggaacaaccacaataaaagcttccgaaattaagtggaaggaaggaatgggacctgcaaatggaaatggtattaacaagaaggggagtaagcggccattagtagaggaaagtttttttagctggtttggtgatacagagctcaagagtcttgctgatggtgtgcaagatgaggtggcggagatcataaaggaagatttgtggcctaatcctttgaagtacttcaacaatgaggttgacgatgaatttgaaggagatgaagatgatgatgatttggatggtgatgatgacgatgaaggcgatgatttggagaactgagcccttgcgcttggttcagaatgttgtccgtggatgatgtggctgggcggaactgtgacccttttgggagattttttgttgttgttgtttgacttagctggaactcaacgtagggaactgtttaatgccttatgaagtcaaccaacttgaaaggagactgcttatatcataatctcggtatatctatctagcaacgcaatttgacccc

SEQ ID NO: 3494 - protein, 296 aa, Zea mays subsp. mays
  peptide (1)..(296): Ceres Seq. ID no. 13577618
  misc_feature (77)..(272): Pfam Name: Nucleosome assembly protein (NAP) Pfam Description: Nucleosome assembly protein (NAP)
  misc_feature (77)..(272): Pfam Name: Nucleosome assembly protein (NAP) Pfam Description: Nucleosome assembly protein (NAP)
  misc_feature (46)..(296): Homolog of NCBI NO: 14550110 NR Description: nucleosome/chromatin assembly factor A [Zea mays]
  misc_feature (46)..(293): Homolog of NCBI NO: 14550112 NR Description: nucleosome/chromatin assembly factor A [Zea mays]
  misc_feature (46)..(293): Homolog of NCBI NO: 21739223 NR Description: OSJNBa0072F16.2 [Oryza sativa (japonica
  misc_feature (51)..(296): Homolog of NCBI NO: 25354177 NR Description: hypothetical protein F6A14.10 [imported] - thaliana >gi|6730705|gb|AAF27100.1|AC011809_9 Putative phospatase
  misc_feature (51)..(296): Homolog of NCBI NO: 18394656 NR Description: expressed protein [Arabidopsis thaliana] putative SET protein, phospatase 2A inhibitor [Arabidopsis
  misc_feature (46)..(293): Homolog of NCBI NO: 14550112 NR Description: nucleosome/chromatin assembly factor A [Zea mays]
  misc_feature (51)..(296): Homolog of NCBI NO: 25354177 NR Description: hypothetical protein F6A14.10 [imported] - thaliana >gi|6730705|gb|AAF27100.1|AC011809_9 Putative phospatase
  misc_feature (46)..(295): Homolog of NCBI NO: 2144100 NR Description: Set beta isoform - rat >gi|545265|gb|AAC60682.1| beta isoform [Rattus sp.] >gi|12860381|dbj|BAB31936.1| unnamed
  misc_feature (46)..(293): Homolog of NCBI NO: 28279779 NR Description: Similar to SET translocation (myeloid
  misc_feature (46)..(293): Homolog of NCBI NO: 2253411 NR Description: PP2A inhibitor [Tetraodon fluviatilis]
  misc_feature (51)..(273): Homolog of NCBI NO: 26451105 NR Description: unknown protein [Arabidopsis thaliana]
  misc_feature (50)..(296): Homolog of NCBI NO: 15221298 NR Description: SET protein, phospatase 2A inhibitor -related
  misc_feature (51)..(296): Homolog of NCBI NO: 18394656 NR Description: expressed protein [Arabidopsis thaliana] putative SET protein, phospatase 2A inhibitor [Arabidopsis
  misc_feature (46)..(293): Homolog of NCBI NO: 21739223 NR Description: OSJNBa0072F16.2 [Oryza sativa (japonica
  misc_feature (46)..(296): Homolog of NCBI NO: 14550110 NR Description: nucleosome/chromatin assembly factor A [Zea mays]
  misc_feature (50)..(296): Homolog of NCBI NO: 15221298 NR Description: SET protein, phospatase 2A inhibitor -related
  misc_feature (51)..(273): Homolog of NCBI NO: 26451105 NR Description: unknown protein [Arabidopsis thaliana]
  misc_feature (46)..(293): Homolog of NCBI NO: 2253411 NR Description: PP2A inhibitor [Tetraodon fluviatilis]
  misc_feature (46)..(293): Homolog of NCBI NO: 28279779 NR Description: Similar to SET translocation (myeloid
  misc_feature (46)..(295): Homolog of NCBI NO: 2144100 NR Description: Set beta isoform - rat >gi|545265|gb|AAC60682.1| beta isoform [Rattus sp.] >gi|12860381|dbj|BAB31936.1| unnamed
PKGSQFRLLFLPSSSLVAPPRLAQAGDTTRLNPYREEACEASGFAMTAPADKGKKAKTDADGGEENEQIDGVLVLSIEKLQEIQDELEKVNEEASDKVMEVEQKYSEIRRPVYLKRGDIIKTIPDFWLTAFMSHPLLSELLTEEDQKIFKYLDSIDVDDSDVKAGYSIHLNFSENPYFEDTKLAKTYIFADDGTTTIKASEIKWKEGMGPANGNGINKKGSKRPLVEESFFSWFGDTELKSLADGVQDEVAEIIKEDLWPNPLKYFNNEVDDEFEGDEDDDDLDGDDDDEGDDLEN

SEQ ID NO: 3495 - protein, 251 aa, Zea mays subsp. mays
  peptide (1)..(251): Ceres Seq. ID no. 13577619
  misc_feature (32)..(227): Pfam Name: Nucleosome assembly protein (NAP) Pfam Description: Nucleosome assembly protein (NAP)
  misc_feature (32)..(227): Pfam Name: Nucleosome assembly protein (NAP) Pfam Description: Nucleosome assembly protein (NAP)
  misc_feature (1)..(251): Homolog of NCBI NO: 14550110 NR Description: nucleosome/chromatin assembly factor A [Zea mays]
  misc_feature (1)..(248): Homolog of NCBI NO: 14550112 NR Description: nucleosome/chromatin assembly factor A [Zea mays]
  misc_feature (1)..(248): Homolog of NCBI NO: 21739223 NR Description: OSJNBa0072F16.2 [Oryza sativa (japonica
  misc_feature (6)..(251): Homolog of NCBI NO: 25354177 NR Description: hypothetical protein F6A14.10 [imported] - thaliana >gi|6730705|gb|AAF27100.1|AC011809_9 Putative phospatase
  misc_feature (6)..(251): Homolog of NCBI NO: 18394656 NR Description: expressed protein [Arabidopsis thaliana] putative SET protein, phospatase 2A inhibitor [Arabidopsis
  misc_feature (1)..(248): Homolog of NCBI NO: 14550112 NR Description: nucleosome/chromatin assembly factor A [Zea mays]
  misc_feature (6)..(251): Homolog of NCBI NO: 25354177 NR Description: hypothetical protein F6A14.10 [imported] - thaliana >gi|6730705|gb|AAF27100.1|AC011809_9 Putative phospatase
  misc_feature (1)..(250): Homolog of NCBI NO: 2144100 NR Description: Set beta isoform - rat >gi|545265|gb|AAC60682.1| beta isoform [Rattus sp.] >gi|12860381|dbj|BAB31936.1| unnamed
  misc_feature (1)..(248): Homolog of NCBI NO: 28279779 NR Description: Similar to SET translocation (myeloid
  misc_feature (1)..(248): Homolog of NCBI NO: 2253411 NR Description: PP2A inhibitor [Tetraodon fluviatilis]
  misc_feature (6)..(228): Homolog of NCBI NO: 26451105 NR Description: unknown protein [Arabidopsis thaliana]
  misc_feature (5)..(251): Homolog of NCBI NO: 15221298 NR Description: SET protein, phospatase 2A inhibitor -related
  misc_feature (6)..(251): Homolog of NCBI NO: 18394656 NR Description: expressed protein [Arabidopsis thaliana] putative SET protein, phospatase 2A inhibitor [Arabidopsis
  misc_feature (1)..(248): Homolog of NCBI NO: 21739223 NR Description: OSJNBa0072F16.2 [Oryza sativa (japonica
  misc_feature (1)..(251): Homolog of NCBI NO: 14550110 NR Description: nucleosome/chromatin assembly factor A [Zea mays]
  misc_feature (5)..(251): Homolog of NCBI NO: 15221298 NR Description: SET protein, phospatase 2A inhibitor -related
  misc_feature (6)..(228): Homolog of NCBI NO: 26451105 NR Description: unknown protein [Arabidopsis thaliana]
  misc_feature (1)..(248): Homolog of NCBI NO: 2253411 NR Description: PP2A inhibitor [Tetraodon fluviatilis]
  misc_feature (1)..(248): Homolog of NCBI NO: 28279779 NR Description: Similar to SET translocation (myeloid
  misc_feature (1)..(250): Homolog of NCBI NO: 2144100 NR Description: Set beta isoform - rat >gi|545265|gb|AAC60682.1| beta isoform [Rattus sp.] >gi|12860381|dbj|BAB31936.1| unnamed
MTAPADKGKKAKTDADGGEENEQIDGVLVLSIEKLQEIQDELEKVNEEASDKVMEVEQKYSEIRRPVYLKRGDIIKTIPDFWLTAFMSHPLLSELLTEEDQKIFKYLDSIDVDDSDVKAGYSIHLNFSENPYFEDTKLAKTYIFADDGTTTIKASEIKWKEGMGPANGNGINKKGSKRPLVEESFFSWFGDTELKSLADGVQDEVAEIIKEDLWPNPLKYFNNEVDDEFEGDEDDDDLDGDDDDEGDDLEN

SEQ ID NO: 3496 - protein, 198 aa, Zea mays subsp. mays
  peptide (1)..(198): Ceres Seq. ID no. 13577620
  misc_feature (1)..(174): Pfam Name: Nucleosome assembly protein (NAP) Pfam Description: Nucleosome assembly protein (NAP)
  misc_feature (1)..(174): Pfam Name: Nucleosome assembly protein (NAP) Pfam Description: Nucleosome assembly protein (NAP)
  misc_feature (1)..(198): Homolog of NCBI NO: 14550110 NR Description: nucleosome/chromatin assembly factor A [Zea mays]
  misc_feature (1)..(195): Homolog of NCBI NO: 14550112 NR Description: nucleosome/chromatin assembly factor A [Zea mays]
  misc_feature (1)..(195): Homolog of NCBI NO: 21739223 NR Description: OSJNBa0072F16.2 [Oryza sativa (japonica
  misc_feature (1)..(198): Homolog of NCBI NO: 25354177 NR Description: hypothetical protein F6A14.10 [imported] - thaliana >gi|6730705|gb|AAF27100.1|AC011809_9 Putative phospatase
  misc_feature (1)..(198): Homolog of NCBI NO: 18394656 NR Description: expressed protein [Arabidopsis thaliana] putative SET protein, phospatase 2A inhibitor [Arabidopsis
  misc_feature (1)..(195): Homolog of NCBI NO: 14550112 NR Description: nucleosome/chromatin assembly factor A [Zea mays]
  misc_feature (1)..(198): Homolog of NCBI NO: 25354177 NR Description: hypothetical protein F6A14.10 [imported] - thaliana >gi|6730705|gb|AAF27100.1|AC011809_9 Putative phospatase
  misc_feature (1)..(197): Homolog of NCBI NO: 2144100 NR Description: Set beta isoform - rat >gi|545265|gb|AAC60682.1| beta isoform [Rattus sp.] >gi|12860381|dbj|BAB31936.1| unnamed
  misc_feature (1)..(195): Homolog of NCBI NO: 28279779 NR Description: Similar to SET translocation (myeloid
  misc_feature (1)..(195): Homolog of NCBI NO: 2253411 NR Description: PP2A inhibitor [Tetraodon fluviatilis]
  misc_feature (1)..(175): Homolog of NCBI NO: 26451105 NR Description: unknown protein [Arabidopsis thaliana]
  misc_feature (1)..(198): Homolog of NCBI NO: 15221298 NR Description: SET protein, phospatase 2A inhibitor -related
  misc_feature (1)..(198): Homolog of NCBI NO: 18394656 NR Description: expressed protein [Arabidopsis thaliana] putative SET protein, phospatase 2A inhibitor [Arabidopsis
  misc_feature (1)..(195): Homolog of NCBI NO: 21739223 NR Description: OSJNBa0072F16.2 [Oryza sativa (japonica
  misc_feature (1)..(198): Homolog of NCBI NO: 14550110 NR Description: nucleosome/chromatin assembly factor A [Zea mays]
  misc_feature (1)..(198): Homolog of NCBI NO: 15221298 NR Description: SET protein, phospatase 2A inhibitor -related
  misc_feature (1)..(175): Homolog of NCBI NO: 26451105 NR Description: unknown protein [Arabidopsis thaliana]
  misc_feature (1)..(195): Homolog of NCBI NO: 2253411 NR Description: PP2A inhibitor [Tetraodon fluviatilis]
  misc_feature (1)..(195): Homolog of NCBI NO: 28279779 NR Description: Similar to SET translocation (myeloid
  misc_feature (1)..(197): Homolog of NCBI NO: 2144100 NR Description: Set beta isoform - rat >gi|545265|gb|AAC60682.1| beta isoform [Rattus sp.] >gi|12860381|dbj|BAB31936.1| unnamed
MEVEQKYSEIRRPVYLKRGDIIKTIPDFWLTAFMSHPLLSELLTEEDQKIFKYLDSIDVDDSDVKAGYSIHLNFSENPYFEDTKLAKTYIFADDGTTTIKASEIKWKEGMGPANGNGINKKGSKRPLVEESFFSWFGDTELKSLADGVQDEVAEIIKEDLWPNPLKYFNNEVDDEFEGDEDDDDLDGDDDDEGDDLEN

SEQ ID NO: 3497 - DNA, 473 bp, Zea mays subsp. mays
  misc_feature (1)..(473): Ceres Seq. ID no. 12567013
  misc_feature: MA Experiment ID: 108689 Result: Down-regulated in Transcription
  misc_feature: MA Experiment 108689 PARAMETER Experiment Name: Zm_Drought_Roots_P Parameter: Age (day) Value: 9
  misc_feature: MA Experiment 108689 PARAMETER Experiment Name: Zm_Drought_Roots_P Parameter: Organism Value: Zea mays
  misc_feature: MA Experiment 108689 PARAMETER Experiment Name: Zm_Drought_Roots_P Parameter: Plant Line Value: 35A19
  misc_feature: MA Experiment 108689 PARAMETER Experiment Name: Zm_Drought_Roots_P Parameter: Timepoint (hr) Value: 24
  misc_feature: MA Experiment 108689 PARAMETER Experiment Name: Zm_Drought_Roots_P Parameter: Tissue Value: Roots
  misc_feature: MA Experiment 108689 PARAMETER Experiment Name: Zm_Drought_Roots_P Parameter: Treatment Value: Drought vs. No Drought
atacccattttctcgcaaatccccgccacccccatttynaccgccannttcggtgccgtcagatcgatttcttgtgcatcttggagcatctacaaggggtgggcgactcagcaaaatctgctggcatctcctctcttttcttgcatcgaattttgtaattgccgactgaaccgtgcagagaagtcttgacaagcgcatgggcggaggtggaaatggggaatcgttgcgatctcctccaagtcctttttgagggggccttggctggaggagctgctggtgttgttgttgaaacagctttatatcctattgatacaataaagaccaggcttcaggctgcacaaggcggaagtaaaattcaatggaaaggcatgtatgatgggttagctggaaatattgtcggtgttcttcccgcttctgcaatttttgttggagtatatgaaccagctaaaagaaaactactggaattgtttcct

SEQ ID NO: 3498 - protein, 87 aa, Zea mays subsp. mays
  peptide (1)..(87): Ceres Seq. ID no. 13577844
  misc_feature (16)..(82): Homolog of NCBI NO: 27754081 NR Description: RIKEN cDNA 4930433D19; expressed sequence
  misc_feature (12)..(82): Homolog of NCBI NO: 24650120 NR Description: CG4743-PA [Drosophila melanogaster]
  misc_feature (1)..(86): Homolog of NCBI NO: 18399114 NR Description: allinase, putative; protein id: At1g34065.1
  misc_feature (6)..(86): Homolog of NCBI NO: 18420458 NR Description: mitochondrial carrier protein family
  misc_feature (6)..(86): Homolog of NCBI NO: 7486053 NR Description: hypothetical protein F23K16.90 - Arabidopsis
  misc_feature (2)..(86): Homolog of NCBI NO: 34394981 NR Description: mitochondrial aspartate-glutamate carrier
  misc_feature (1)..(40): Homolog of NCBI NO: 25518662 NR Description: hypothetical protein F12G12.11 [imported] -
  misc_feature (16)..(82): Homolog of NCBI NO: 34857703 NR Description: similar to RIKEN cDNA 4930433D19 [Rattus
  misc_feature (12)..(82): Homolog of NCBI NO: 19115553 NR Description: agpet8 protein. [Schizosaccharomyces pombe]
MGNRCDLLQVLFEGALAGGAAGVVVETALYPIDTIKTRLQAAQGGSKIQWKGMYDGLAGNIVGVLPASAIFVGVYEPAKRKLLELFP

SEQ ID NO: 3499 - protein, 62 aa, Zea mays subsp. mays
  peptide (1)..(62): Ceres Seq. ID no. 13577845
  misc_feature (13)..(13): Xaa is any aa, unknown or other
  misc_feature (16)..(16): Xaa is any aa, unknown or other
IPIFSQIPATPIXTAXFGAVRSISCASWSIYKGWATQQNLLASPLFSCIEFCNCRLNRAEKS

SEQ ID NO: 3500 - protein, 55 aa, Zea mays subsp. mays
  peptide (1)..(55): Ceres Seq. ID no. 13577846
  misc_feature (13)..(13): Xaa is any aa, unknown or other
  misc_feature (16)..(16): Xaa is any aa, unknown or other
YPFSRKSPPPPFXPPXSVPSDRFLVHLGASTRGGRLSKICWHLLSFLASNFVIAD

SEQ ID NO: 3501 - DNA, 1144 bp, Zea mays subsp. mays
  misc_feature (1)..(1144): Ceres Seq. ID no. 12410176
  misc_feature: MA Experiment ID: 108530 Result: Down-regulated in Transcription
  misc_feature: MA Experiment 108530 PARAMETER Experiment Name: Zm_Imbibed_Seeds_P Parameter: Age (day) Value: 6 vs. 2
  misc_feature: MA Experiment 108530 PARAMETER Experiment Name: Zm_Imbibed_Seeds_P Parameter: Organism Value: Zea mays
  misc_feature: MA Experiment 108530 PARAMETER Experiment Name: Zm_Imbibed_Seeds_P Parameter: Plant Line Value: 35A19
  misc_feature: MA Experiment 108530 PARAMETER Experiment Name: Zm_Imbibed_Seeds_P Parameter: Tissue Value: Aerial vs. Embryo
  misc_feature: MA Experiment ID: 108535 Result: Up-regulated in Transcription
  misc_feature: MA Experiment 108535 PARAMETER Experiment Name: Zm_Meristem_P Parameter: Age (day) Value: 8
  misc_feature: MA Experiment 108535 PARAMETER Experiment Name: Zm_Meristem_P Parameter: Organism Value: Zea mays
  misc_feature: MA Experiment 108535 PARAMETER Experiment Name: Zm_Meristem_P Parameter: Plant Line Value: 35A19
  misc_feature: MA Experiment 108535 PARAMETER Experiment Name: Zm_Meristem_P Parameter: Tissue Value: Root Meristem vs. Above Root Meristem
  misc_feature: MA Experiment ID: 108544 Result: Down-regulated in Transcription
  misc_feature: MA Experiment ID: 20000487 Result: Up-regulated in Transcription
  misc_feature: MA Experiment 20000487 PARAMETER Experiment Name: Zm_50mM_NH4NO3_L_to_H_P Parameter: Organism Value: Zea mays
  misc_feature: MA Experiment 20000487 PARAMETER Experiment Name: Zm_50mM_NH4NO3_L_to_H_P Parameter: Timepoint (hr) Value: 4
  misc_feature: MA Experiment 20000487 PARAMETER Experiment Name: Zm_50mM_NH4NO3_L_to_H_P Parameter: Tissue Value: Leaves
  misc_feature: MA Experiment 20000487 PARAMETER Experiment Name: Zm_50mM_NH4NO3_L_to_H_P Parameter: Treatment Value: 50mM NH4NO3 vs. 100mM Mannitol
  misc_feature: MA Experiment ID: 20000488 Result: Up-regulated in Transcription
  misc_feature: MA Experiment 20000488 PARAMETER Experiment Name: Zm_50mM_NH4NO3_L_to_H_P Parameter: Organism Value: Zea mays
  misc_feature: MA Experiment 20000488 PARAMETER Experiment Name: Zm_50mM_NH4NO3_L_to_H_P Parameter: Timepoint (hr) Value: 8
  misc_feature: MA Experiment 20000488 PARAMETER Experiment Name: Zm_50mM_NH4NO3_L_to_H_P Parameter: Tissue Value: Leaves
  misc_feature: MA Experiment 20000488 PARAMETER Experiment Name: Zm_50mM_NH4NO3_L_to_H_P Parameter: Treatment Value: 50mM NH4NO3 vs. 100mM Mannitol
  misc_feature: MA Experiment ID: 20000492 Result: Up-regulated in Transcription
  misc_feature: MA Experiment 20000492 PARAMETER Experiment Name: Zm_Hybrid_Seed_Dev_P Parameter: DAP Value: 12
  misc_feature: MA Experiment 20000492 PARAMETER Experiment Name: Zm_Hybrid_Seed_Dev_P Parameter: Organism Value: Zea mays
  misc_feature: MA Experiment 20000492 PARAMETER Experiment Name: Zm_Hybrid_Seed_Dev_P Parameter: Plant Line Value: 35A19
  misc_feature: MA Experiment 20000492 PARAMETER Experiment Name: Zm_Hybrid_Seed_Dev_P Parameter: Tissue Value: Fert Kernel vs. Unfert Floret
  misc_feature: MA Experiment ID: 20000534 Result: Down-regulated in Transcription
  misc_feature: MA Experiment 20000534 PARAMETER Experiment Name: Zm_Hybrid_Pollen_P Parameter: Age (day) Value: 8
  misc_feature: MA Experiment 20000534 PARAMETER Experiment Name: Zm_Hybrid_Pollen_P Parameter: Organism Value: Zea mays
  misc_feature: MA Experiment 20000534 PARAMETER Experiment Name: Zm_Hybrid_Pollen_P Parameter: Plant Line Value: 35A19
  misc_feature: MA Experiment 20000534 PARAMETER Experiment Name: Zm_Hybrid_Pollen_P Parameter: Tissue Value: Pollen vs. Aerial
  misc_feature: MA Experiment ID: 20000535 Result: Up-regulated in Transcription
  misc_feature: MA Experiment 20000535 PARAMETER Experiment Name: Zm_Hybrid_Seed_Dev_P Parameter: DAP Value: 30 vs. 12
  misc_feature: MA Experiment 20000535 PARAMETER Experiment Name: Zm_Hybrid_Seed_Dev_P Parameter: Organism Value: Zea mays
  misc_feature: MA Experiment 20000535 PARAMETER Experiment Name: Zm_Hybrid_Seed_Dev_P Parameter: Plant Line Value: 35A19
  misc_feature: MA Experiment 20000535 PARAMETER Experiment Name: Zm_Hybrid_Seed_Dev_P Parameter: Tissue Value: Embryo vs. Unfert Floret
  misc_feature: MA Experiment ID: 20001605 Result: Up-regulated in Transcription
  misc_feature: MA Experiment 20001605 PARAMETER Experiment Name: Zm_50ppm_KNO3_L-to-H_P Parameter: Age (day) Value: 19
  misc_feature: MA Experiment 20001605 PARAMETER Experiment Name: Zm_50ppm_KNO3_L-to-H_P Parameter: Organism Value: Zea mays
  misc_feature: MA Experiment 20001605 PARAMETER Experiment Name: Zm_50ppm_KNO3_L-to-H_P Parameter: Plant Line Value: 35A19
  misc_feature: MA Experiment 20001605 PARAMETER Experiment Name: Zm_50ppm_KNO3_L-to-H_P Parameter: Timepoint (hr) Value: 4
  misc_feature: MA Experiment 20001605 PARAMETER Experiment Name: Zm_50ppm_KNO3_L-to-H_P Parameter: Tissue Value: Shoots
  misc_feature: MA Experiment 20001605 PARAMETER Experiment Name: Zm_50ppm_KNO3_L-to-H_P Parameter: Treatment Value: 50ppm KNO3 vs. 50ppm KCl
  misc_feature: MA Experiment ID: 20001612 Result: Up-regulated in Transcription
  misc_feature: MA Experiment 20001612 PARAMETER Experiment Name: Zm_50ppm_KNO3_L-to-H_P Parameter: Age (day) Value: 19
  misc_feature: MA Experiment 20001612 PARAMETER Experiment Name: Zm_50ppm_KNO3_L-to-H_P Parameter: Organism Value: Zea mays
  misc_feature: MA Experiment 20001612 PARAMETER Experiment Name: Zm_50ppm_KNO3_L-to-H_P Parameter: Plant Line Value: 35A19
  misc_feature: MA Experiment 20001612 PARAMETER Experiment Name: Zm_50ppm_KNO3_L-to-H_P Parameter: Timepoint (hr) Value: 8
  misc_feature: MA Experiment 20001612 PARAMETER Experiment Name: Zm_50ppm_KNO3_L-to-H_P Parameter: Tissue Value: Roots
  misc_feature: MA Experiment 20001612 PARAMETER Experiment Name: Zm_50ppm_KNO3_L-to-H_P Parameter: Treatment Value: 50ppm KNO3 vs. 50ppm KCl
ctctttgcgccgccgcagccccaaaccctcatcccccatcaatctcaggggcgccccagccaccccacccttcactcacctaaccatggcggagcgcggcggcgagcgtggtggagagcgcggcgggttcggccgtggcccgcgccaagaggaagagaagtgggttcccgtcaccaagctcggccgccttgtcaaggagaacaagatcaccaagatcgaggagatctacctgcactcgctccccgtcaaggagcaccagatcgtcgagaccctcgtcccggggctcaaggacgaggtcatgaagatcacgcccgtccagaagcagacccgtgccgggcagcgcacccgcttcaaggccttcgtcgttgtcggcgatggcgacggccacgtcggcctgggagtcaagtgcgccaaggaggtggccaccgccatccgcggcgcccatcatcctagccaagctctccgtcgtccccgtcaggagggggtactgggggaacaagatcggacagccccacaccgtgccctgcaaggtcaccggcaagtgtggctccgtcactgtgcgcatggtgccccgcgcccaggggttctggcatcgtcnccgcgcgcgtgcccaagaaggtgctgcagttcgctggcattgaggatgtcttcacctcgtcccgtggctccactaagacccttggcaacttcgtcaaggcaaccttcgactgcctgatgaagacctacggcttcctcactcctgaattctggagccagaccaagttctccatggccccgttccagcagtacaccgacctgctggcaaagcccaccaagggccttgtgctcgaggccccaactgagacagtagaggagttcgaagacaagatgaaggagcttgaggggatctgcaaccccatcatcgcgaagatgtaccagggcgagggcgcgggcatgggcgctgctgctggcatggatgaggatgccccgtctggtgggagcggtgctggtcccaagatcgaggaggtggattaagttggttagtgttcgaggtttggtttggtgaggtgtgaagtgcctgaactctgatggttgtttgtgaggtgtggtcgcaatagctgcggcctgtggtgaacttctcagaaataaataagttttcgttccc

SEQ ID NO: 3502 - protein, 237 aa, Zea mays subsp. mays
  peptide (1)..(237): Ceres Seq. ID no. 12410177
  misc_feature (95)..(147): Pfam Name: Ribosomal protein S5, N-terminal domain Pfam Description: Ribosomal protein S5, N-terminal domain
  misc_feature (34)..(147): Homolog of NCBI NO: 38079225 NR Description: similar to 40S ribosomal protein S2 [Mus musculus]
  misc_feature (31)..(147): Homolog of NCBI NO: 21553851 NR Description: 40S ribosomal protein S2 [Arabidopsis thaliana]
  misc_feature (31)..(147): Homolog of NCBI NO: 15227443 NR Description: 40S ribosomal protein S2
  misc_feature (32)..(147): Homolog of NCBI NO: 21539457 NR Description: ribosomal protein S2, putative [Arabidopsis
  misc_feature (32)..(147): Homolog of NCBI NO: 15230312 NR Description: 40S ribosomal protein S2 homolog
  misc_feature (32)..(147): Homolog of NCBI NO: 21618011 NR Description: ribosomal protein S2, putative [Arabidopsis
  misc_feature (32)..(147): Homolog of NCBI NO: 25294520 NR Description: hypothetical protein RF12
  misc_feature (32)..(147): Homolog of NCBI NO: 18406325 NR Description: ribosomal protein S2, putative
  misc_feature (32)..(147): Homolog of NCBI NO: 15217951 NR Description: ribosomal protein S2, putative; protein id:
  misc_feature (34)..(147): Homolog of NCBI NO: 34393314 NR Description: putative 40S ribosomal protein S2
  misc_feature (199)..(199): Xaa is any aa, unknown or other
SLRRRSPKPSSPINLRGAPATPPFTHLTMAERGGERGGERGGFGRGPRQEEEKWVPVTKLGRLVKENKITKIEEIYLHSLPVKEHQIVETLVPGLKDEVMKITPVQKQTRAGQRTRFKAFVVVGDGDGHVGLGVKCAKEVATAIRGAHHPSQALRRPRQEGVLGEQDRTAPHRALQGHRQVWLRHCAHGAPRPGVLASXPRACPRRCCSSLALRMSSPRPVAPLRPLATSSRQPSTA

SEQ ID NO: 3503 - protein, 209 aa, Zea mays subsp. mays
  peptide (1)..(209): Ceres Seq. ID no. 12410178
  misc_feature (67)..(119): Pfam Name: Ribosomal protein S5, N-terminal domain Pfam Description: Ribosomal protein S5, N-terminal domain
  misc_feature (6)..(119): Homolog of NCBI NO: 38079225 NR Description: similar to 40S ribosomal protein S2 [Mus musculus]
  misc_feature (3)..(119): Homolog of NCBI NO: 21553851 NR Description: 40S ribosomal protein S2 [Arabidopsis thaliana]
  misc_feature (3)..(119): Homolog of NCBI NO: 15227443 NR Description: 40S ribosomal protein S2
  misc_feature (4)..(119): Homolog of NCBI NO: 21539457 NR Description: ribosomal protein S2, putative [Arabidopsis
  misc_feature (4)..(119): Homolog of NCBI NO: 15230312 NR Description: 40S ribosomal protein S2 homolog
  misc_feature (4)..(119): Homolog of NCBI NO: 18406325 NR Description: ribosomal protein S2, putative
  misc_feature (4)..(119): Homolog of NCBI NO: 21618011 NR Description: ribosomal protein S2, putative [Arabidopsis
  misc_feature (4)..(119): Homolog of NCBI NO: 25294520 NR Description: hypothetical protein RF12
  misc_feature (4)..(119): Homolog of NCBI NO: 15217951 NR Description: ribosomal protein S2, putative; protein id:
  misc_feature (6)..(119): Homolog of NCBI NO: 34393314 NR Description: putative 40S ribosomal protein S2
  misc_feature (171)..(171): Xaa is any aa, unknown or other
MAERGGERGGERGGFGRGPRQEEEKWVPVTKLGRLVKENKITKIEEIYLHSLPVKEHQIVETLVPGLKDEVMKITPVQKQTRAGQRTRFKAFVVVGDGDGHVGLGVKCAKEVATAIRGAHHPSQALRRPRQEGVLGEQDRTAPHRALQGHRQVWLRHCAHGAPRPGVLASXPRACPRRCCSSLALRMSSPRPVAPLRPLATSSRQPSTA

SEQ ID NO: 3504 - protein, 150 aa, Zea mays subsp. mays
  peptide (1)..(150): Ceres Seq. ID no. 12410179
LFAPPQPQTLIPHQSQGRPSHPTLHSPNHGGARRRAWWRARRVRPWPAPRGREVGSRHQARPPCQGEQDHQDRGDLPALAPRQGAPDRRDPRPGAQGRGHEDHARPEADPCRAAHPLQGLRRCRRWRRPRRPGSQVRQGGGHRHPRRPSS

SEQ ID NO: 3505 - DNA, 1361 bp, Zea mays subsp. mays
  misc_feature (1)..(1361): Ceres Seq. ID no. 12410173
  misc_feature: MA Experiment ID: 108543 Result: Up-regulated in Transcription
  misc_feature: MA Experiment ID: 20000492 Result: Down-regulated in Transcription
  misc_feature: MA Experiment 20000492 PARAMETER Experiment Name: Zm_Hybrid_Seed_Dev_P Parameter: DAP Value: 12
  misc_feature: MA Experiment 20000492 PARAMETER Experiment Name: Zm_Hybrid_Seed_Dev_P Parameter: Organism Value: Zea mays
  misc_feature: MA Experiment 20000492 PARAMETER Experiment Name: Zm_Hybrid_Seed_Dev_P Parameter: Plant Line Value: 35A19
  misc_feature: MA Experiment 20000492 PARAMETER Experiment Name: Zm_Hybrid_Seed_Dev_P Parameter: Tissue Value: Fert Kernel vs. Unfert Floret
agaaacgggaagttgaagtcgtcgtcgtcaggttacgagccgacgaaactgacagactgtagcaataattggtcgctccccgatccatctgggtttcgcctgccagcggcgagatgtccttcttcttccgggccgcatcgcggcagcgcccgttgccgcaggagatcgcgcgctccatcaaggactccctcgttgccctcgacaccaagaccggcgccaaggctcttgaggatgctgagaaaaacatacttacattgaggcatacacttgctggtgatggagaagtggaaccaaatcaagagcaggttttgcagatagcccttgagatttgcaaggagggtgttctttccctctttgttcagaatcttccttcattgggttgggaggctagaaaggatcttgtccactgctggtgtattttgttgagacagaaggttgatgaaagctattgttgcgtccagtatattgaaaatcattttgatcttttggatttccttgttgtttgctataagaacttggaagtcgcgttgaattgtggaaacatgttgcgagaatgcataaaatatcctacacttgcaaaatatatattggagtcaagcagcttcgagttgtttttccagtatgttgaattgtcaaacttcgatattgcatctgatgctctgaacactttcaaggatttgctaaccaaacatgaagatgccgtctctgaatttctgagctcacattatgagcagttttttggactctacacaaaacttttatcttcaactaattatgtgacacgaagacaatcagtgaagtttctttcagagtttctgttggaggccccaaatgctcaaataatgaagcgttacattttggaagttcattacttaaacattatgatgggcctgctaaaggattcaagcaaaaatatcaggatatgtgccttccacatttttaaggtatttgttgccaatccaaacaagcctcgtgagattattcaggttttggttgagaatcacagagaagtgttgaagctactccacaatctccccacaagcaaaggtgaagatgaacagcttgatgaggagagagatttaattatcaaagaaatcgagaatcttgtgcggttgtcagtataaaccctcaggaaattcgaacgtatccttgaagacatactgtgcaatatgctgccttgtatagagcttgtttttcatgtatggaaaaaaaagtttggccacaaattgcatttttcgcgagaacacttagcatttctgtcagaaaattattgtcgtgtagcagaatttgcaacaggaataatctgcattatggtgtggtgttgataccattaaggattggtgaaagtgcctgccatttgt

SEQ ID NO: 3506 - protein, 336 aa, Zea mays subsp. mays
  peptide (1)..(336): Ceres Seq. ID no. 12410174
  misc_feature (33)..(332): Pfam Name: Mo25 protein family Pfam Description: Mo25 protein family
  misc_feature (9)..(331): Homolog of NCBI NO: 37589970 NR Description: Unknown (protein for MGC:27972) [Mus musculus]
  misc_feature (15)..(331): Homolog of NCBI NO: 17647657 NR Description: Mo25 CG4083-PA
  misc_feature (15)..(331): Homolog of NCBI NO: 1794137 NR Description: DMO25 [Drosophila melanogaster]
  misc_feature (10)..(331): Homolog of NCBI NO: 34901086 NR Description: putative MO25 protein (CGI-66)
  misc_feature (1)..(333): Homolog of NCBI NO: 28277560 NR Description: Similar to MO25 protein [Danio rerio]
  misc_feature (15)..(333): Homolog of NCBI NO: 34877516 NR Description: similar to MO25 protein [Rattus norvegicus]
  misc_feature (15)..(333): Homolog of NCBI NO: 7706481 NR Description: MO25 protein [Homo sapiens]
  misc_feature (1)..(331): Homolog of NCBI NO: 18419772 NR Description: putative protein
  misc_feature (1)..(336): Homolog of NCBI NO: 34898912 NR Description: hypothetical protein, similar to Arabidopsis
  misc_feature (1)..(336): Homolog of NCBI NO: 33146499 NR Description: unknown protein [Oryza sativa (japonica
MSFFFRAASRQRPLPQEIARSIKDSLVALDTKTGAKALEDAEKNILTLRHTLAGDGEVEPNQEQVLQIALEICKEGVLSLFVQNLPSLGWEARKDLVHCWCILLRQKVDESYCCVQYIENHFDLLDFLVVCYKNLEVALNCGNMLRECIKYPTLAKYILESSSFELFFQYVELSNFDIASDALNTFKDLLTKHEDAVSEFLSSHYEQFFGLYTKLLSSTNYVTRRQSVKFLSEFLLEAPNAQIMKRYILEVHYLNIMMGLLKDSSKNIRICAFHIFKVFVANPNKPREIIQVLVENHREVLKLLHNLPTSKGEDEQLDEERDLIIKEIENLVRLSV

SEQ ID NO: 3507 - protein, 193 aa, Zea mays subsp. mays
  peptide (1)..(193): Ceres Seq. ID no. 12410175
  misc_feature (1)..(189): Pfam Name: Mo25 protein family Pfam Description: Mo25 protein family
  misc_feature (1)..(188): Homolog of NCBI NO: 37589970 NR Description: Unknown (protein for MGC:27972) [Mus musculus]
  misc_feature (1)..(188): Homolog of NCBI NO: 17647657 NR Description: Mo25 CG4083-PA
  misc_feature (1)..(188): Homolog of NCBI NO: 1794137 NR Description: DMO25 [Drosophila melanogaster]
  misc_feature (1)..(188): Homolog of NCBI NO: 34901086 NR Description: putative MO25 protein (CGI-66)
  misc_feature (1)..(190): Homolog of NCBI NO: 28277560 NR Description: Similar to MO25 protein [Danio rerio]
  misc_feature (1)..(190): Homolog of NCBI NO: 34877516 NR Description: similar to MO25 protein [Rattus norvegicus]
  misc_feature (1)..(190): Homolog of NCBI NO: 7706481 NR Description: MO25 protein [Homo sapiens]
  misc_feature (1)..(188): Homolog of NCBI NO: 18419772 NR Description: putative protein
  misc_feature (1)..(193): Homolog of NCBI NO: 34898912 NR Description: hypothetical protein, similar to Arabidopsis
  misc_feature (1)..(193): Homolog of NCBI NO: 33146499 NR Description: unknown protein [Oryza sativa (japonica
MLRECIKYPTLAKYILESSSFELFFQYVELSNFDIASDALNTFKDLLTKHEDAVSEFLSSHYEQFFGLYTKLLSSTNYVTRRQSVKFLSEFLLEAPNAQIMKRYILEVHYLNIMMGLLKDSSKNIRICAFHIFKVFVANPNKPREIIQVLVENHREVLKLLHNLPTSKGEDEQLDEERDLIIKEIENLVRLSV

SEQ ID NO: 3508 - DNA, 1339 bp, Zea mays subsp. mays
  misc_feature (1)..(1339): Ceres Seq. ID no. 12410169
  misc_feature: MA Experiment ID: 108523 Result: Down-regulated in Transcription
  misc_feature: MA Experiment 108523 PARAMETER Experiment Name: Zm_42deg_Heat_P Parameter: Age (day) Value: 8
  misc_feature: MA Experiment 108523 PARAMETER Experiment Name: Zm_42deg_Heat_P Parameter: Organism Value: Zea mays
  misc_feature: MA Experiment 108523 PARAMETER Experiment Name: Zm_42deg_Heat_P Parameter: Plant Line Value: 35A19
  misc_feature: MA Experiment 108523 PARAMETER Experiment Name: Zm_42deg_Heat_P Parameter: Temperature (deg C) Value: 42 vs. 22
  misc_feature: MA Experiment 108523 PARAMETER Experiment Name: Zm_42deg_Heat_P Parameter: Timepoint (hr) Value: 6
  misc_feature: MA Experiment 108523 PARAMETER Experiment Name: Zm_42deg_Heat_P Parameter: Tissue Value: Aerial
  misc_feature: MA Experiment ID: 108533 Result: Up-regulated in Transcription
  misc_feature: MA Experiment 108533 PARAMETER Experiment Name: Zm_4deg_Cold_P Parameter: Age (hr) Value: 8
  misc_feature: MA Experiment 108533 PARAMETER Experiment Name: Zm_4deg_Cold_P Parameter: Organism Value: Zea mays
  misc_feature: MA Experiment 108533 PARAMETER Experiment Name: Zm_4deg_Cold_P Parameter: Plant Line Value: 35A19
  misc_feature: MA Experiment 108533 PARAMETER Experiment Name: Zm_4deg_Cold_P Parameter: Temperature (deg C) Value: 4 vs. 22
  misc_feature: MA Experiment 108533 PARAMETER Experiment Name: Zm_4deg_Cold_P Parameter: Timepoint (hr) Value: 1
  misc_feature: MA Experiment 108533 PARAMETER Experiment Name: Zm_4deg_Cold_P Parameter: Tissue Value: Aerial
  misc_feature: MA Experiment ID: 108536 Result: Down-regulated in Transcription
  misc_feature: MA Experiment 108536 PARAMETER Experiment Name: Zm_Meristem_P Parameter: Age (day) Value: 8
  misc_feature: MA Experiment 108536 PARAMETER Experiment Name: Zm_Meristem_P Parameter: Organism Value: Zea mays
  misc_feature: MA Experiment 108536 PARAMETER Experiment Name: Zm_Meristem_P Parameter: Plant Line Value: 35A19
  misc_feature: MA Experiment 108536 PARAMETER Experiment Name: Zm_Meristem_P Parameter: Tissue Value: Shoot Meristem vs. Above Shoot Meristem
  misc_feature: MA Experiment ID: 108543 Result: Up-regulated in Transcription
  misc_feature: MA Experiment ID: 108544 Result: Down-regulated in Transcription
  misc_feature: MA Experiment ID: 108556 Result: Down-regulated in Transcription
  misc_feature: MA Experiment 108556 PARAMETER Experiment Name: Zm_Drought_P Parameter: Age (day) Value: 9
  misc_feature: MA Experiment 108556 PARAMETER Experiment Name: Zm_Drought_P Parameter: Organism Value: Zea mays
  misc_feature: MA Experiment 108556 PARAMETER Experiment Name: Zm_Drought_P Parameter: Plant Line Value: 35A19
  misc_feature: MA Experiment 108556 PARAMETER Experiment Name: Zm_Drought_P Parameter: Timepoint (hr) Value: 24
  misc_feature: MA Experiment 108556 PARAMETER Experiment Name: Zm_Drought_P Parameter: Tissue Value: Aerial
  misc_feature: MA Experiment 108556 PARAMETER Experiment Name: Zm_Drought_P Parameter: Treatment Value: Drought vs. No Drought
  misc_feature: MA Experiment ID: 108559 Result: Down-regulated in Transcription
  misc_feature: MA Experiment 108559 PARAMETER Experiment Name: Zm_5mM_NO_P Parameter: Age (day) Value: 8
  misc_feature: MA Experiment 108559 PARAMETER Experiment Name: Zm_5mM_NO_P Parameter: Organism Value: Zea mays
  misc_feature: MA Experiment 108559 PARAMETER Experiment Name: Zm_5mM_NO_P Parameter: Plant Line Value: 35A19
  misc_feature: MA Experiment 108559 PARAMETER Experiment Name: Zm_5mM_NO_P Parameter: Timepoint (hr) Value: 12
  misc_feature: MA Experiment 108559 PARAMETER Experiment Name: Zm_5mM_NO_P Parameter: Tissue Value: Aerial
  misc_feature: MA Experiment 108559 PARAMETER Experiment Name: Zm_5mM_NO_P Parameter: Treatment Value: 5mM NO vs. No Treatment
  misc_feature: MA Experiment ID: 20000480 Result: Down-regulated in Transcription
  misc_feature: MA Experiment 20000480 PARAMETER Experiment Name: Zm_Drought_P Parameter: Age (day) Value: 11
  misc_feature: MA Experiment 20000480 PARAMETER Experiment Name: Zm_Drought_P Parameter: Organism Value: Zea mays
  misc_feature: MA Experiment 20000480 PARAMETER Experiment Name: Zm_Drought_P Parameter: Plant Line Value: 35A19
  misc_feature: MA Experiment 20000480 PARAMETER Experiment Name: Zm_Drought_P Parameter: Timepoint (hr) Value: 72
  misc_feature: MA Experiment 20000480 PARAMETER Experiment Name: Zm_Drought_P Parameter: Tissue Value: Aerial
  misc_feature: MA Experiment 20000480 PARAMETER Experiment Name: Zm_Drought_P Parameter: Treatment Value: Drought vs. No Drought
  misc_feature: MA Experiment ID: 20000487 Result: Down-regulated in Transcription
  misc_feature: MA Experiment 20000487 PARAMETER Experiment Name: Zm_50mM_NH4NO3_L_to_H_P Parameter: Organism Value: Zea mays
  misc_feature: MA Experiment 20000487 PARAMETER Experiment Name: Zm_50mM_NH4NO3_L_to_H_P Parameter: Timepoint (hr) Value: 4
  misc_feature: MA Experiment 20000487 PARAMETER Experiment Name: Zm_50mM_NH4NO3_L_to_H_P Parameter: Tissue Value: Leaves
  misc_feature: MA Experiment 20000487 PARAMETER Experiment Name: Zm_50mM_NH4NO3_L_to_H_P Parameter: Treatment Value: 50mM NH4NO3 vs. 100mM Mannitol
  misc_feature: MA Experiment ID: 20000535 Result: Down-regulated in Transcription
  misc_feature: MA Experiment 20000535 PARAMETER Experiment Name: Zm_Hybrid_Seed_Dev_P Parameter: DAP Value: 30 vs. 12
  misc_feature: MA Experiment 20000535 PARAMETER Experiment Name: Zm_Hybrid_Seed_Dev_P Parameter: Organism Value: Zea mays
  misc_feature: MA Experiment 20000535 PARAMETER Experiment Name: Zm_Hybrid_Seed_Dev_P Parameter: Plant Line Value: 35A19
  misc_feature: MA Experiment 20000535 PARAMETER Experiment Name: Zm_Hybrid_Seed_Dev_P Parameter: Tissue Value: Embryo vs. Unfert Floret
  misc_feature: MA Experiment ID: 20000626 Result: Down-regulated in Transcription
  misc_feature: MA Experiment 20000626 PARAMETER Experiment Name: Zm_Herbicide-Treatments_P Parameter: Timepoint (hr) Value: 12
  misc_feature: MA Experiment 20000626 PARAMETER Experiment Name: Zm_Herbicide-Treatments_P Parameter: Tissue Value: Aerial
  misc_feature: MA Experiment 20000626 PARAMETER Experiment Name: Zm_Herbicide-Treatments_P Parameter: Treatment Value: Roundup vs. No Treatment
aagtcgggttggttagaagaacccaatgcaagtgtgagtgagctgacggcacggcggacgcgctctcctctcctctcctcttcttccggctctccctctccgcatgccattccaacgcattacaggttggcttttggctatgcctatcctgcctacgaatgctacaagactgttgaactaaacaaaccagagattgcgcantcatattttggtgtcagtattggattttagttgccctgttgacagttttggagagatttggagatttcacaatatcatggctaccattttactcggaagcaaagctgatgttctttgtatacttgtggtaccctaagacaaagggaactacgtatgtttatggaactttctttaaaccatatatttctcagcatgagaatgaaatagaccggaatctccttgagctgagagctcgagccaccgacacggttgtcctttattttcagaaggctgcttcggcaggacaaagtactttctttgacgttttaaaatatgttgctgcccagtcaccttctcagaaatcaaggcaacgccttcatcaggaatcacagcagccgccacaacaacagcaaccacaagtgcaggtgcagcaagcgcaaccacaaaaacaagcagcacctgttatgcgcagagcatcatccattgctgctcggcaagcagcaatggcacagcaatctcaggagactaaacccgtttcatcttctcccaagatcaagcgtcaaacatcagcaagatctggttcagtggcatccacaaagcctccggtagctgcatccgcaccaaaacctggcggtagcccaaagaaaggcgaggtcaaacctgctgccggcccagttcaaactccaaccacaggtgccgattcaccaaaacccgagcctagcgccccatcactccctggagccgaaggggtggacaatatagccatcgatgaggccagtggtgacgccccagagggcgcagaagagcttgaccctgcgctcgaagaggagacgccgatggaggagacgatccgtgtgacgcgcgccaagctaaggaggcgcatgaccaccgaagatcctgctgggaattagctgcaggccattgtttttccttcccctgcacattgtgttggtgttttttttgggggggggggggggntaggctgtcatgttgtttggtgggatggagatgtactgttgaattggttctttgtgacacagctgattactgtaccttgtttccgtgctttcttagtgcccttgtgatttaagttgtaagtaacacttttcctccgcatgtgaatacatgttagtggcacgggcaacgaacgcaacattat

SEQ ID NO: 3509 - protein, 260 aa, Zea mays subsp. mays
  peptide (1)..(260): Ceres Seq. ID no. 12410170
  misc_feature (67)..(247): Pfam Name: Granin (chromogranin or secretogranin) Pfam Description: Granin (chromogranin or secretogranin)
  misc_feature (1)..(85): Homolog of NCBI NO: 20502988 NR Description: Putative InsB from Escherichia coli
  misc_feature (1)..(107): Homolog of NCBI NO: 15222332 NR Description: hypothetical protein; protein id: At1g75700.1
  misc_feature (1)..(196): Homolog of NCBI NO: 21553813 NR Description: unknown [Arabidopsis thaliana]
  misc_feature (1)..(196): Homolog of NCBI NO: 18422223 NR Description: expressed protein
  misc_feature (1)..(196): Homolog of NCBI NO: 9759014 NR Description: gene_id:K16E1.3~unknown protein [Arabidopsis
  misc_feature (1)..(85): Homolog of NCBI NO: 21671921 NR Description: Putative protein with HVA22 domain
  misc_feature (1)..(257): Homolog of NCBI NO: 21553483 NR Description: pathogenicity protein PATH531-like protein
  misc_feature (1)..(257): Homolog of NCBI NO: 25513732 NR Description: T20H2.26 protein - Arabidopsis thaliana
  misc_feature (1)..(257): Homolog of NCBI NO: 18394805 NR Description: expressed protein
  misc_feature (1)..(100): Homolog of NCBI NO: 37531658 NR Description: putative Magnaporthe grisea pathogenicity protein
MFFVYLWYPKTKGTTYVYGTFFKPYISQHENEIDRNLLELRARATDTVVLYFQKAASAGQSTFFDVLKYVAAQSPSQKSRQRLHQESQQPPQQQQPQVQVQQAQPQKQAAPVMRRASSIAARQAAMAQQSQETKPVSSSPKIKRQTSARSGSVASTKPPVAASAPKPGGSPKKGEVKPAAGPVQTPTTGADSPKPEPSAPSLPGAEGVDNIAIDEASGDAPEGAEELDPALEEETPMEETIRVTRAKLRRRMTTEDPAGN

SEQ ID NO: 3510 - protein, 148 aa, Zea mays subsp. mays
  peptide (1)..(148): Ceres Seq. ID no. 12410171
  misc_feature (1)..(135): Pfam Name: Granin (chromogranin or secretogranin) Pfam Description: Granin (chromogranin or secretogranin)
  misc_feature (1)..(143): Homolog of NCBI NO: 21553813 NR Description: unknown [Arabidopsis thaliana]
  misc_feature (1)..(15): Homolog of NCBI NO: 30519931 NR Description: DNA segment, Chr 6, ERATO Doi 253, expressed [Mus
  misc_feature (1)..(45): Homolog of NCBI NO: 30519927 NR Description: DNA segment, Chr 10, University of California at
  misc_feature (1)..(146): Homolog of NCBI NO: 37531658 NR Description: putative Magnaporthe grisea pathogenicity protein
  misc_feature (1)..(84): Homolog of NCBI NO: 21553813 NR Description: unknown [Arabidopsis thaliana]
  misc_feature (1)..(84): Homolog of NCBI NO: 18422223 NR Description: expressed protein
  misc_feature (1)..(84): Homolog of NCBI NO: 9759014 NR Description: gene_id:K16E1.3~unknown protein [Arabidopsis
  misc_feature (1)..(145): Homolog of NCBI NO: 21553483 NR Description: pathogenicity protein PATH531-like protein
  misc_feature (1)..(145): Homolog of NCBI NO: 25513732 NR Description: T20H2.26 protein - Arabidopsis thaliana
  misc_feature (1)..(145): Homolog of NCBI NO: 18394805 NR Description: expressed protein
MRRASSIAARQAAMAQQSQETKPVSSSPKIKRQTSARSGSVASTKPPVAASAPKPGGSPKKGEVKPAAGPVQTPTTGADSPKPEPSAPSLPGAEGVDNIAIDEASGDAPEGAEELDPALEEETPMEETIRVTRAKLRRRMTTEDPAGN

SEQ ID NO: 3511 - protein, 135 aa, Zea mays subsp. mays
  peptide (1)..(135): Ceres Seq. ID no. 12410172
  misc_feature (1)..(122): Pfam Name: Granin (chromogranin or secretogranin) Pfam Description: Granin (chromogranin or secretogranin)
  misc_feature (1)..(130): Homolog of NCBI NO: 18422223 NR Description: expressed protein
  misc_feature (1)..(130): Homolog of NCBI NO: 21553813 NR Description: unknown [Arabidopsis thaliana]
  misc_feature (1)..(32): Homolog of NCBI NO: 30519927 NR Description: DNA segment, Chr 10, University of California at
  misc_feature (1)..(133): Homolog of NCBI NO: 37531658 NR Description: putative Magnaporthe grisea pathogenicity protein
  misc_feature (1)..(71): Homolog of NCBI NO: 18422223 NR Description: expressed protein
  misc_feature (1)..(71): Homolog of NCBI NO: 21553813 NR Description: unknown [Arabidopsis thaliana]
  misc_feature (1)..(71): Homolog of NCBI NO: 9759014 NR Description: gene_id:K16E1.3~unknown protein [Arabidopsis
  misc_feature (1)..(132): Homolog of NCBI NO: 21553483 NR Description: pathogenicity protein PATH531-like protein
  misc_feature (1)..(132): Homolog of NCBI NO: 25513732 NR Description: T20H2.26 protein - Arabidopsis thaliana
  misc_feature (1)..(132): Homolog of NCBI NO: 18394805 NR Description: expressed protein
MAQQSQETKPVSSSPKIKRQTSARSGSVASTKPPVAASAPKPGGSPKKGEVKPAAGPVQTPTTGADSPKPEPSAPSLPGAEGVDNIAIDEASGDAPEGAEELDPALEEETPMEETIRVTRAKLRRRMTTEDPAGN

SEQ ID NO: 3512 - DNA, 1360 bp, Zea mays subsp. mays
  misc_feature (1)..(1360): Ceres Seq. ID no. 13496132
  misc_feature: MA Experiment ID: 108522 Result: Down-regulated in Transcription
  misc_feature: MA Experiment 108522 PARAMETER Experiment Name: Zm_42deg_Heat_P Parameter: Age (day) Value: 8
  misc_feature: MA Experiment 108522 PARAMETER Experiment Name: Zm_42deg_Heat_P Parameter: Organism Value: Zea mays
  misc_feature: MA Experiment 108522 PARAMETER Experiment Name: Zm_42deg_Heat_P Parameter: Plant Line Value: 35A19
  misc_feature: MA Experiment 108522 PARAMETER Experiment Name: Zm_42deg_Heat_P Parameter: Temperature (deg C) Value: 42 vs. 22
  misc_feature: MA Experiment 108522 PARAMETER Experiment Name: Zm_42deg_Heat_P Parameter: Timepoint (hr) Value: 1
  misc_feature: MA Experiment 108522 PARAMETER Experiment Name: Zm_42deg_Heat_P Parameter: Tissue Value: Aerial
  misc_feature: MA Experiment ID: 108523 Result: Down-regulated in Transcription
  misc_feature: MA Experiment 108523 PARAMETER Experiment Name: Zm_42deg_Heat_P Parameter: Age (day) Value: 8
  misc_feature: MA Experiment 108523 PARAMETER Experiment Name: Zm_42deg_Heat_P Parameter: Organism Value: Zea mays
  misc_feature: MA Experiment 108523 PARAMETER Experiment Name: Zm_42deg_Heat_P Parameter: Plant Line Value: 35A19
  misc_feature: MA Experiment 108523 PARAMETER Experiment Name: Zm_42deg_Heat_P Parameter: Temperature (deg C) Value: 42 vs. 22
  misc_feature: MA Experiment 108523 PARAMETER Experiment Name: Zm_42deg_Heat_P Parameter: Timepoint (hr) Value: 6
  misc_feature: MA Experiment 108523 PARAMETER Experiment Name: Zm_42deg_Heat_P Parameter: Tissue Value: Aerial
  misc_feature: MA Experiment ID: 108535 Result: Down-regulated in Transcription
  misc_feature: MA Experiment 108535 PARAMETER Experiment Name: Zm_Meristem_P Parameter: Age (day) Value: 8
  misc_feature: MA Experiment 108535 PARAMETER Experiment Name: Zm_Meristem_P Parameter: Organism Value: Zea mays
  misc_feature: MA Experiment 108535 PARAMETER Experiment Name: Zm_Meristem_P Parameter: Plant Line Value: 35A19
  misc_feature: MA Experiment 108535 PARAMETER Experiment Name: Zm_Meristem_P Parameter: Tissue Value: Root Meristem vs. Above Root Meristem
  misc_feature: MA Experiment ID: 108544 Result: Down-regulated in Transcription
  misc_feature: MA Experiment ID: 108689 Result: Up-regulated in Transcription
  misc_feature: MA Experiment 108689 PARAMETER Experiment Name: Zm_Drought_Roots_P Parameter: Age (day) Value: 9
  misc_feature: MA Experiment 108689 PARAMETER Experiment Name: Zm_Drought_Roots_P Parameter: Organism Value: Zea mays
  misc_feature: MA Experiment 108689 PARAMETER Experiment Name: Zm_Drought_Roots_P Parameter: Plant Line Value: 35A19
  misc_feature: MA Experiment 108689 PARAMETER Experiment Name: Zm_Drought_Roots_P Parameter: Timepoint (hr) Value: 24
  misc_feature: MA Experiment 108689 PARAMETER Experiment Name: Zm_Drought_Roots_P Parameter: Tissue Value: Roots
  misc_feature: MA Experiment 108689 PARAMETER Experiment Name: Zm_Drought_Roots_P Parameter: Treatment Value: Drought vs. No Drought
  misc_feature: MA Experiment ID: 20000477 Result: Down-regulated in Transcription
  misc_feature: MA Experiment 20000477 PARAMETER Experiment Name: Zm_5mM_SA_P Parameter: Age (day) Value: 10
  misc_feature: MA Experiment 20000477 PARAMETER Experiment Name: Zm_5mM_SA_P Parameter: Organism Value: Zea mays
  misc_feature: MA Experiment 20000477 PARAMETER Experiment Name: Zm_5mM_SA_P Parameter: Plant Line Value: 35A19
  misc_feature: MA Experiment 20000477 PARAMETER Experiment Name: Zm_5mM_SA_P Parameter: Timepoint (hr) Value: 48
  misc_feature: MA Experiment 20000477 PARAMETER Experiment Name: Zm_5mM_SA_P Parameter: Tissue Value: Aerial
  misc_feature: MA Experiment 20000477 PARAMETER Experiment Name: Zm_5mM_SA_P Parameter: Treatment Value: 5mM SA vs. No Treatment
  misc_feature: MA Experiment ID: 20000480 Result: Down-regulated in Transcription
  misc_feature: MA Experiment 20000480 PARAMETER Experiment Name: Zm_Drought_P Parameter: Age (day) Value: 11
  misc_feature: MA Experiment 20000480 PARAMETER Experiment Name: Zm_Drought_P Parameter: Organism Value: Zea mays
  misc_feature: MA Experiment 20000480 PARAMETER Experiment Name: Zm_Drought_P Parameter: Plant Line Value: 35A19
  misc_feature: MA Experiment 20000480 PARAMETER Experiment Name: Zm_Drought_P Parameter: Timepoint (hr) Value: 72
  misc_feature: MA Experiment 20000480 PARAMETER Experiment Name: Zm_Drought_P Parameter: Tissue Value: Aerial
  misc_feature: MA Experiment 20000480 PARAMETER Experiment Name: Zm_Drought_P Parameter: Treatment Value: Drought vs. No Drought
  misc_feature: MA Experiment ID: 20000492 Result: Down-regulated in Transcription
  misc_feature: MA Experiment 20000492 PARAMETER Experiment Name: Zm_Hybrid_Seed_Dev_P Parameter: DAP Value: 12
  misc_feature: MA Experiment 20000492 PARAMETER Experiment Name: Zm_Hybrid_Seed_Dev_P Parameter: Organism Value: Zea mays
  misc_feature: MA Experiment 20000492 PARAMETER Experiment Name: Zm_Hybrid_Seed_Dev_P Parameter: Plant Line Value: 35A19
  misc_feature: MA Experiment 20000492 PARAMETER Experiment Name: Zm_Hybrid_Seed_Dev_P Parameter: Tissue Value: Fert Kernel vs. Unfert Floret
  misc_feature: MA Experiment ID: 20000535 Result: Down-regulated in Transcription
  misc_feature: MA Experiment 20000535 PARAMETER Experiment Name: Zm_Hybrid_Seed_Dev_P Parameter: DAP Value: 30 vs. 12
  misc_feature: MA Experiment 20000535 PARAMETER Experiment Name: Zm_Hybrid_Seed_Dev_P Parameter: Organism Value: Zea mays
  misc_feature: MA Experiment 20000535 PARAMETER Experiment Name: Zm_Hybrid_Seed_Dev_P Parameter: Plant Line Value: 35A19
  misc_feature: MA Experiment 20000535 PARAMETER Experiment Name: Zm_Hybrid_Seed_Dev_P Parameter: Tissue Value: Embryo vs. Unfert Floret
ataaattccgaaggcggtcttccgagagcaacagctgctcaggcaggcaggcaggcaggcaccaacagccaacccgacgcaaggaaccaattaaccaccgtcccgctgatgtcgtcggcgacgccagcgcccgcgcgccaccggacgtgccgcacgtactggtgctaccagtgcggccgcgcgctccgcatcatctcctgcccgtccaccgacgtcttctgcccgcgctgcttcggccgcttcctccacgaggaggtcgacccgccgacggcgcgccacgggttcccgccggcgcacttccttccgcacccgttccacccgcagcaccagtacgccggccgtccgcgccgctgggtcatctacggcgaggagccgacgacggtaccaggccgtgcgttccgccagcctgcgccggcacagggacctgccacgcctcctgctcctgcaccggcgctggttggacgacggcgcgtgccttccccgccgccggcgccggtgccgcggcggccgtccacgcccccggccatggaccccggggactacttcatggggccgaacctgaacagcctcatcgaggagctcacgcagaacgacaggccggggccggcgccggcgccaccgtcggcaatcgactcgctcccgacggtgcgggtcgccggggcgcacctgtcggacggctcgcagtgccccgtgtgcaaggaggacttcgagctcggggaggccgcgcggcagctgccgtgcaagcacgtctaccactccgattgcatcgtgccgtggctccgcctgcacaactcctgccccggtctgccgataccagctacctagagccgggtccaacggcagcagccaggccgcacctcgcggcggaagcaacggcaacaacaggaacagggagatggagagagagcccctgacgatggtgcaatgggggccattctcctggctgtttccaccgcgcgggatggacgaccccggggacgcgtgggagcacgggcagcgcggcaggcacgacgcggcggacgccggcgcattctacgcttggtggcgctctctgtttctcatatagatgttctcgtggagtccttatcgcatccaaagatgtacgcctcctacccagtaactatggcgccgttctctcagttcaatgtcaaagatggaagattggtggaagcctgatgccaaaatcagcgtagatgtaaaaatgaaatacgcccactgtaaagacgagtgaattacacatcgttaaagggcacgtaaaacgactgtttggatgatataccatgttaacagtaatttctggaacgcaccgaagacatttctatgtgatgtatctgatacactgaaactctgatgttggtag

SEQ ID NO: 3513 - protein, 303 aa, Zea mays subsp. mays
  peptide (1)..(303): Ceres Seq. ID no. 13496133
  misc_feature (12)..(135): Homolog of NCBI NO: 15839664 NR Description: hypothetical protein [Mycobacterium tuberculosis
KFRRRSSESNSCSGRQAGRHQQPTRRKEPINHRPADVVGDASARAPPDVPHVLVLPVRPRAPHHLLPVHRRLLPALLRPLPPRGGRPADGAPRVPAGALPSAPVPPAAPVRRPSAPLGHLRRGADDGTRPCVPPACAGTGTCHASCSCTGAGWTTARAFPAAGAGAAAAVHAPGHGPRGLLHGAEPEQPHRGAHAERQAGAGAGATVGNRLAPDGAGRRGAPVGRLAVPRVQGGLRARGGRAAAAVQARLPLRLHRAVAPPAQLLPRSADTSYLEPGPTAAARPHLAAEATATTGTGRWRESP

SEQ ID NO: 3514 - protein, 274 aa, Zea mays subsp. mays
  peptide (1)..(274): Ceres Seq. ID no. 13496134
  misc_feature (229)..(267): Pfam Name: Zinc finger, C3HC4 type (RING finger) Pfam Description: Zinc finger, C3HC4 type (RING finger)
  misc_feature (181)..(274): Homolog of NCBI NO: 34908968 NR Description: P0003D09.21 [Oryza sativa (japonica
  misc_feature (166)..(267): Homolog of NCBI NO: 15231003 NR Description: expressed protein [Arabidopsis thaliana]
  misc_feature (166)..(267): Homolog of NCBI NO: 11994207 NR Description: gene_id:MPN9.20~unknown protein [Arabidopsis
  misc_feature (179)..(267): Homolog of NCBI NO: 37535546 NR Description: putative zinc finger protein
  misc_feature (179)..(274): Homolog of NCBI NO: 18410530 NR Description: expressed protein [Arabidopsis thaliana]
  misc_feature (163)..(274): Homolog of NCBI NO: 21362321 NR Description: RIKEN cDNA 2610010O19 [Mus musculus]
  misc_feature (35)..(274): Homolog of NCBI NO: 14719329 NR Description: putative RING-H2 finger protein [Oryza sativa]
  misc_feature (52)..(274): Homolog of NCBI NO: 18405518 NR Description: RING-H2 finger protein (RHC1a) [Arabidopsis
  misc_feature (35)..(97): Homolog of NCBI NO: 15219060 NR Description: hypothetical protein [Arabidopsis thaliana]
  misc_feature (146)..(274): Homolog of NCBI NO: 15219060 NR Description: hypothetical protein [Arabidopsis thaliana]
INSEGGLPRATAAQAGRQAGTNSQPDARNQLTTVPLMSSATPAPARHRTCRTYWCYQCGRALRIISCPSTDVFCPRCFGRFLHEEVDPPTARHGFPPAHFLPHPFHPQHQYAGRPRRWVIYGEEPTTVPGRAFRQPAPAQGPATPPAPAPALVGRRRVPSPPPAPVPRRPSTPPAMDPGDYFMGPNLNSLIEELTQNDRPGPAPAPPSAIDSLPTVRVAGAHLSDGSQCPVCKEDFELGEAARQLPCKHVYHSDCIVPWLRLHNSCPGLPIPAT

SEQ ID NO: 3515 - protein, 238 aa, Zea mays subsp. mays
  peptide (1)..(238): Ceres Seq. ID no. 13496135
  misc_feature (193)..(231): Pfam Name: Zinc finger, C3HC4 type (RING finger) Pfam Description: Zinc finger, C3HC4 type (RING finger)
  misc_feature (127)..(238): Homolog of NCBI NO: 21362321 NR Description: RIKEN cDNA 2610010O19 [Mus musculus]
  misc_feature (145)..(238): Homolog of NCBI NO: 34908968 NR Description: P0003D09.21 [Oryza sativa (japonica
  misc_feature (130)..(231): Homolog of NCBI NO: 15231003 NR Description: expressed protein [Arabidopsis thaliana]
  misc_feature (130)..(231): Homolog of NCBI NO: 11994207 NR Description: gene_id:MPN9.20~unknown protein [Arabidopsis
  misc_feature (143)..(231): Homolog of NCBI NO: 37535546 NR Description: putative zinc finger protein
  misc_feature (143)..(238): Homolog of NCBI NO: 18410530 NR Description: expressed protein [Arabidopsis thaliana]
  misc_feature (1)..(238): Homolog of NCBI NO: 14719329 NR Description: putative RING-H2 finger protein [Oryza sativa]
  misc_feature (16)..(238): Homolog of NCBI NO: 18405518 NR Description: RING-H2 finger protein (RHC1a) [Arabidopsis
  misc_feature (1)..(61): Homolog of NCBI NO: 15219060 NR Description: hypothetical protein [Arabidopsis thaliana]
  misc_feature (110)..(238): Homolog of NCBI NO: 15219060 NR Description: hypothetical protein [Arabidopsis thaliana]
MSSATPAPARHRTCRTYWCYQCGRALRIISCPSTDVFCPRCFGRFLHEEVDPPTARHGFPPAHFLPHPFHPQHQYAGRPRRWVIYGEEPTTVPGRAFRQPAPAQGPATPPAPAPALVGRRRVPSPPPAPVPRRPSTPPAMDPGDYFMGPNLNSLIEELTQNDRPGPAPAPPSAIDSLPTVRVAGAHLSDGSQCPVCKEDFELGEAARQLPCKHVYHSDCIVPWLRLHNSCPGLPIPAT

SEQ ID NO: 3516 - DNA, 1557 bp, Zea mays subsp. mays
  misc_feature (1)..(1557): Ceres Seq. ID no. 12376476
  misc_feature: MA Experiment ID: 108522 Result: Down-regulated in Transcription
  misc_feature: MA Experiment 108522 PARAMETER Experiment Name: Zm_42deg_Heat_P Parameter: Age (day) Value: 8
  misc_feature: MA Experiment 108522 PARAMETER Experiment Name: Zm_42deg_Heat_P Parameter: Organism Value: Zea mays
  misc_feature: MA Experiment 108522 PARAMETER Experiment Name: Zm_42deg_Heat_P Parameter: Plant Line Value: 35A19
  misc_feature: MA Experiment 108522 PARAMETER Experiment Name: Zm_42deg_Heat_P Parameter: Temperature (deg C) Value: 42 vs. 22
  misc_feature: MA Experiment 108522 PARAMETER Experiment Name: Zm_42deg_Heat_P Parameter: Timepoint (hr) Value: 1
  misc_feature: MA Experiment 108522 PARAMETER Experiment Name: Zm_42deg_Heat_P Parameter: Tissue Value: Aerial
  misc_feature: MA Experiment ID: 108523 Result: Down-regulated in Transcription
  misc_feature: MA Experiment 108523 PARAMETER Experiment Name: Zm_42deg_Heat_P Parameter: Age (day) Value: 8
  misc_feature: MA Experiment 108523 PARAMETER Experiment Name: Zm_42deg_Heat_P Parameter: Organism Value: Zea mays
  misc_feature: MA Experiment 108523 PARAMETER Experiment Name: Zm_42deg_Heat_P Parameter: Plant Line Value: 35A19
  misc_feature: MA Experiment 108523 PARAMETER Experiment Name: Zm_42deg_Heat_P Parameter: Temperature (deg C) Value: 42 vs. 22
  misc_feature: MA Experiment 108523 PARAMETER Experiment Name: Zm_42deg_Heat_P Parameter: Timepoint (hr) Value: 6
  misc_feature: MA Experiment 108523 PARAMETER Experiment Name: Zm_42deg_Heat_P Parameter: Tissue Value: Aerial
  misc_feature: MA Experiment ID: 108527 Result: Down-regulated in Transcription
  misc_feature: MA Experiment 108527 PARAMETER Experiment Name: Zm_5mM_NO_P Parameter: Age (day) Value: 8
  misc_feature: MA Experiment 108527 PARAMETER Experiment Name: Zm_5mM_NO_P Parameter: Organism Value: Zea mays
  misc_feature: MA Experiment 108527 PARAMETER Experiment Name: Zm_5mM_NO_P Parameter: Plant Line Value: 35A19
  misc_feature: MA Experiment 108527 PARAMETER Experiment Name: Zm_5mM_NO_P Parameter: Timepoint (hr) Value: 6
  misc_feature: MA Experiment 108527 PARAMETER Experiment Name: Zm_5mM_NO_P Parameter: Tissue Value: Aerial
  misc_feature: MA Experiment 108527 PARAMETER Experiment Name: Zm_5mM_NO_P Parameter: Treatment Value: 5mM NO vs. No Treatment
  misc_feature: MA Experiment ID: 108528 Result: Up-regulated in Transcription
  misc_feature: MA Experiment 108528 PARAMETER Experiment Name: Zm_Imbibed_Seeds_P Parameter: Age (day) Value: 5 vs. 2
  misc_feature: MA Experiment 108528 PARAMETER Experiment Name: Zm_Imbibed_Seeds_P Parameter: Organism Value: Zea mays
  misc_feature: MA Experiment 108528 PARAMETER Experiment Name: Zm_Imbibed_Seeds_P Parameter: Plant Line Value: 35A19
  misc_feature: MA Experiment 108528 PARAMETER Experiment Name: Zm_Imbibed_Seeds_P Parameter: Tissue Value: Aerial vs. Embryo
  misc_feature: MA Experiment ID: 108529 Result: Up-regulated in Transcription
  misc_feature: MA Experiment 108529 PARAMETER Experiment Name: Zm_Imbibed_Seeds_P Parameter: Age (day) Value: 5 vs. 2
  misc_feature: MA Experiment 108529 PARAMETER Experiment Name: Zm_Imbibed_Seeds_P Parameter: Organism Value: Zea mays
  misc_feature: MA Experiment 108529 PARAMETER Experiment Name: Zm_Imbibed_Seeds_P Parameter: Plant Line Value: 35A19
  misc_feature: MA Experiment 108529 PARAMETER Experiment Name: Zm_Imbibed_Seeds_P Parameter: Tissue Value: Roots vs. Embryo
  misc_feature: MA Experiment ID: 108530 Result: Up-regulated in Transcription
  misc_feature: MA Experiment 108530 PARAMETER Experiment Name: Zm_Imbibed_Seeds_P Parameter: Age (day) Value: 6 vs. 2
  misc_feature: MA Experiment 108530 PARAMETER Experiment Name: Zm_Imbibed_Seeds_P Parameter: Organism Value: Zea mays
  misc_feature: MA Experiment 108530 PARAMETER Experiment Name: Zm_Imbibed_Seeds_P Parameter: Plant Line Value: 35A19
  misc_feature: MA Experiment 108530 PARAMETER Experiment Name: Zm_Imbibed_Seeds_P Parameter: Tissue Value: Aerial vs. Embryo
  misc_feature: MA Experiment ID: 108535 Result: Down-regulated in Transcription
  misc_feature: MA Experiment 108535 PARAMETER Experiment Name: Zm_Meristem_P Parameter: Age (day) Value: 8
  misc_feature: MA Experiment 108535 PARAMETER Experiment Name: Zm_Meristem_P Parameter: Organism Value: Zea mays
  misc_feature: MA Experiment 108535 PARAMETER Experiment Name: Zm_Meristem_P Parameter: Plant Line Value: 35A19
  misc_feature: MA Experiment 108535 PARAMETER Experiment Name: Zm_Meristem_P Parameter: Tissue Value: Root Meristem vs. Above Root Meristem
  misc_feature: MA Experiment ID: 108543 Result: Up-regulated in Transcription
  misc_feature: MA Experiment ID: 108547 Result: Up-regulated in Transcription
  misc_feature: MA Experiment 108547 PARAMETER Experiment Name: Zm_Imbibed_Seeds_P Parameter: Age (day) Value: 4 vs. 2
  misc_feature: MA Experiment 108547 PARAMETER Experiment Name: Zm_Imbibed_Seeds_P Parameter: Organism Value: Zea mays
  misc_feature: MA Experiment 108547 PARAMETER Experiment Name: Zm_Imbibed_Seeds_P Parameter: Plant Line Value: 35A19
  misc_feature: MA Experiment 108547 PARAMETER Experiment Name: Zm_Imbibed_Seeds_P Parameter: Tissue Value: Aerial vs. Embryo
  misc_feature: MA Experiment ID: 108556 Result: Down-regulated in Transcription
  misc_feature: MA Experiment 108556 PARAMETER Experiment Name: Zm_Drought_P Parameter: Age (day) Value: 9
  misc_feature: MA Experiment 108556 PARAMETER Experiment Name: Zm_Drought_P Parameter: Organism Value: Zea mays
  misc_feature: MA Experiment 108556 PARAMETER Experiment Name: Zm_Drought_P Parameter: Plant Line Value: 35A19
  misc_feature: MA Experiment 108556 PARAMETER Experiment Name: Zm_Drought_P Parameter: Timepoint (hr) Value: 24
  misc_feature: MA Experiment 108556 PARAMETER Experiment Name: Zm_Drought_P Parameter: Tissue Value: Aerial
  misc_feature: MA Experiment 108556 PARAMETER Experiment Name: Zm_Drought_P Parameter: Treatment Value: Drought vs. No Drought
  misc_feature: MA Experiment ID: 108559 Result: Down-regulated in Transcription
  misc_feature: MA Experiment 108559 PARAMETER Experiment Name: Zm_5mM_NO_P Parameter: Age (day) Value: 8
  misc_feature: MA Experiment 108559 PARAMETER Experiment Name: Zm_5mM_NO_P Parameter: Organism Value: Zea mays
  misc_feature: MA Experiment 108559 PARAMETER Experiment Name: Zm_5mM_NO_P Parameter: Plant Line Value: 35A19
  misc_feature: MA Experiment 108559 PARAMETER Experiment Name: Zm_5mM_NO_P Parameter: Timepoint (hr) Value: 12
  misc_feature: MA Experiment 108559 PARAMETER Experiment Name: Zm_5mM_NO_P Parameter: Tissue Value: Aerial
  misc_feature: MA Experiment 108559 PARAMETER Experiment Name: Zm_5mM_NO_P Parameter: Treatment Value: 5mM NO vs. No Treatment
  misc_feature: MA Experiment ID: 108597 Result: Down-regulated in Transcription
  misc_feature: MA Experiment 108597 PARAMETER Experiment Name: Zm_100uM_ABA_P Parameter: Age (day) Value: 9
  misc_feature: MA Experiment 108597 PARAMETER Experiment Name: Zm_100uM_ABA_P Parameter: Organism Value: Zea mays
  misc_feature: MA Experiment 108597 PARAMETER Experiment Name: Zm_100uM_ABA_P Parameter: Plant Line Value: 35A19
  misc_feature: MA Experiment 108597 PARAMETER Experiment Name: Zm_100uM_ABA_P Parameter: Timepoint (hr) Value: 24
  misc_feature: MA Experiment 108597 PARAMETER Experiment Name: Zm_100uM_ABA_P Parameter: Tissue Value: Aerial
  misc_feature: MA Experiment 108597 PARAMETER Experiment Name: Zm_100uM_ABA_P Parameter: Treatment Value: 100uM ABA vs. No Treatment
  misc_feature: MA Experiment ID: 108687 Result: Down-regulated in Transcription
  misc_feature: MA Experiment 108687 PARAMETER Experiment Name: Zm_Embryos-Flowers__P Parameter: Tissue Value: Embryo vs. Aerial+
  misc_feature: MA Experiment ID: 108688 Result: Down-regulated in Transcription
  misc_feature: MA Experiment 108688 PARAMETER Experiment Name: Zm_Embryos-Flowers__P Parameter: Tissue Value: Immature Flowers vs. Aerial+
  misc_feature: MA Experiment ID: 20000108 Result: Down-regulated in Transcription
  misc_feature: MA Experiment 20000108 PARAMETER Experiment Name: Zm_Root-Tips_P Parameter: Age (day) Value: 12
  misc_feature: MA Experiment 20000108 PARAMETER Experiment Name: Zm_Root-Tips_P Parameter: Organism Value: Zea mays
  misc_feature: MA Experiment 20000108 PARAMETER Experiment Name: Zm_Root-Tips_P Parameter: Tissue Value: Root tips vs. Root mid region    35
  misc_feature: MA Experiment 20000108 PARAMETER Experiment Name: Zm_Root-Tips_P Parameter: Tissue Value: Root tips vs. Root mid region   Sequence Listing-Misc Features (4)
  misc_feature: MA Experiment ID: 20000477 Result: Down-regulated in Transcription
  misc_feature: MA Experiment 20000477 PARAMETER Experiment Name: Zm_5mM_SA_P Parameter: Age (day) Value: 10
  misc_feature: MA Experiment 20000477 PARAMETER Experiment Name: Zm_5mM_SA_P Parameter: Organism Value: Zea mays
  misc_feature: MA Experiment 20000477 PARAMETER Experiment Name: Zm_5mM_SA_P Parameter: Plant Line Value: 35A19
  misc_feature: MA Experiment 20000477 PARAMETER Experiment Name: Zm_5mM_SA_P Parameter: Timepoint (hr) Value: 48
  misc_feature: MA Experiment 20000477 PARAMETER Experiment Name: Zm_5mM_SA_P Parameter: Tissue Value: Aerial
  misc_feature: MA Experiment 20000477 PARAMETER Experiment Name: Zm_5mM_SA_P Parameter: Treatment Value: 5mM SA vs. No Treatment
  misc_feature: MA Experiment ID: 20000478 Result: Down-regulated in Transcription
  misc_feature: MA Experiment 20000478 PARAMETER Experiment Name: Zm_5mM_SA_P Parameter: Age (day) Value: 11
  misc_feature: MA Experiment 20000478 PARAMETER Experiment Name: Zm_5mM_SA_P Parameter: Organism Value: Zea mays
  misc_feature: MA Experiment 20000478 PARAMETER Experiment Name: Zm_5mM_SA_P Parameter: Plant Line Value: 35A19
  misc_feature: MA Experiment 20000478 PARAMETER Experiment Name: Zm_5mM_SA_P Parameter: Timepoint (hr) Value: 72
  misc_feature: MA Experiment 20000478 PARAMETER Experiment Name: Zm_5mM_SA_P Parameter: Tissue Value: Aerial
  misc_feature: MA Experiment 20000478 PARAMETER Experiment Name: Zm_5mM_SA_P Parameter: Treatment Value: 5mM SA vs. No Treatment
  misc_feature: MA Experiment ID: 20000479 Result: Down-regulated in Transcription
  misc_feature: MA Experiment 20000479 PARAMETER Experiment Name: Zm_Drought_P Parameter: Age (day) Value: 10
  misc_feature: MA Experiment 20000479 PARAMETER Experiment Name: Zm_Drought_P Parameter: Organism Value: Zea mays
  misc_feature: MA Experiment 20000479 PARAMETER Experiment Name: Zm_Drought_P Parameter: Plant Line Value: 35A19
  misc_feature: MA Experiment 20000479 PARAMETER Experiment Name: Zm_Drought_P Parameter: Timepoint (hr) Value: 48
  misc_feature: MA Experiment 20000479 PARAMETER Experiment Name: Zm_Drought_P Parameter: Tissue Value: Aerial
  misc_feature: MA Experiment 20000479 PARAMETER Experiment Name: Zm_Drought_P Parameter: Treatment Value: Drought vs. No Drought
  misc_feature: MA Experiment ID: 20000480 Result: Down-regulated in Transcription
  misc_feature: MA Experiment 20000480 PARAMETER Experiment Name: Zm_Drought_P Parameter: Age (day) Value: 11
  misc_feature: MA Experiment 20000480 PARAMETER Experiment Name: Zm_Drought_P Parameter: Organism Value: Zea mays
  misc_feature: MA Experiment 20000480 PARAMETER Experiment Name: Zm_Drought_P Parameter: Plant Line Value: 35A19
  misc_feature: MA Experiment 20000480 PARAMETER Experiment Name: Zm_Drought_P Parameter: Timepoint (hr) Value: 72
  misc_feature: MA Experiment 20000480 PARAMETER Experiment Name: Zm_Drought_P Parameter: Tissue Value: Aerial
  misc_feature: MA Experiment 20000480 PARAMETER Experiment Name: Zm_Drought_P Parameter: Treatment Value: Drought vs. No Drought
  misc_feature: MA Experiment ID: 20000535 Result: Down-regulated in Transcription
  misc_feature: MA Experiment 20000535 PARAMETER Experiment Name: Zm_Hybrid_Seed_Dev_P Parameter: DAP Value: 30 vs. 12
  misc_feature: MA Experiment 20000535 PARAMETER Experiment Name: Zm_Hybrid_Seed_Dev_P Parameter: Organism Value: Zea mays
  misc_feature: MA Experiment 20000535 PARAMETER Experiment Name: Zm_Hybrid_Seed_Dev_P Parameter: Plant Line Value: 35A19
  misc_feature: MA Experiment 20000535 PARAMETER Experiment Name: Zm_Hybrid_Seed_Dev_P Parameter: Tissue Value: Embryo vs. Unfert Floret
  misc_feature: MA Experiment ID: 20000626 Result: Down-regulated in Transcription
  misc_feature: MA Experiment 20000626 PARAMETER Experiment Name: Zm_Herbicide-Treatments_P Parameter: Timepoint (hr) Value: 12
  misc_feature: MA Experiment 20000626 PARAMETER Experiment Name: Zm_Herbicide-Treatments_P Parameter: Tissue Value: Aerial
  misc_feature: MA Experiment 20000626 PARAMETER Experiment Name: Zm_Herbicide-Treatments_P Parameter: Treatment Value: Roundup vs. No Treatment
actcaaatcacaaaccccgctacctcttaactcttcacacgcacaccgtcgtcaaccatggttgctgacatgaaggagaacggcggcgcggtgttggcggcgggcgagaaggcgccgcaggtggtcgtcaagcgcggcgagccgacgctggtgccgccggcggaggcgacgccgacgggcgggcagtactacctgtccaacctggaccagaacatcgcggtgatcgtgcagacggtgtactgctacaagcccagcggcggcggcggcgacgtggcggccgcgctccgcgacgcgctggcgcgcgtgctggtgcactactacccgctggcggggcggctgggcgtaagcccggagatgaagctgaccgtggagctgaccggcgagggcgccgtgttcgtggaggccgacgccgcctgcgaactcgccaccgtcggcgacctcaccaagcccgaccccgccgcgctcggccagctcgtctactccgtccccggcgccaagcacatcctcgagatgcctcccatgaccgcgcaggtgacaaggttcaagtgtgggggcttcgcacttggcctggccatgaaccactgcatgttcgacggcatcggcgccatggagttcgtcaactcgtgggccgagacggcgcgcggcgtcgctgagctcaccgtgccgccgttcctggaccgcagcgtcctgaaggcgcgcgacccgccggtgcacaccttcccgcaccacgagttcgccgagatcccggacgtctccgacacggcggcgctctacggcgcgcaggagctgcagtaccgctccttctgcttcgacccggaccggcctggagcgcgtccgcgggctggcgcttgccgacggcgccctcggccgctgcaccaccttcgaggcgctgtcggggctcgtgtggcgcgcgcgcaccaaggcgctcgggctggcgcccgggcagcgcacgaagctgctgttcgccgtggacggacggcgccggttcgtgccgccgctcccgcggggctacttcggcaacggcatcgtgctgaccaacgccctggccacggccggcgagctgctgtccgcgcccgtgtcgcgcgcagccgggctggtgcaggaggccgtgcggatggtgactgacgactacatgcggtcggcggtggactacttcgaggcgacgcgggcccggccgtcgctggcgtccacgctgctcatcaccacgtggtcgcgcctcgagttccacggcgccgacttcgggtggggcgagcccgtcatgtcgggcccagtcacgctgccggagaaggaggtcatcctcttcctcgcacacggcaaagagaggaagagcatcaacgtgctgctcggcctgccagccaccgcgatggacgccttccaagagctcgtggacgagatatgactgattcatcggtgatgagcagcgatgacggacagggatgggttgctatacatacatatataatgcagggtgcgcctgctttggtttatgtacgaacgtgttaatattccttctatgttggtgtctaagtttaatgagcatatgagaaattgttatcg

SEQ ID NO: 3517 - protein, 355 aa, Zea mays subsp. mays
  peptide (1)..(355): Ceres Seq. ID no. 12376477
  misc_feature (24)..(255): Pfam Name: Transferase family Pfam Description: Transferase family
  misc_feature (17)..(235): Homolog of NCBI NO: 40644084 NR Description: hydroxycinnamoyl CoA quinate transferase
  misc_feature (17)..(238): Homolog of NCBI NO: 40644899 NR Description: hydroxycinnamoyl CoA quinate transferase
  misc_feature (21)..(247): Homolog of NCBI NO: 15218793 NR Description: hypothetical protein; protein id: At1g03390.1
  misc_feature (14)..(306): Homolog of NCBI NO: 20161743 NR Description: N-hydroxycinnamoyl/benzoyltransferase-like
  misc_feature (21)..(255): Homolog of NCBI NO: 15229017 NR Description: putative protein; protein id: At3g48720.1
  misc_feature (21)..(255): Homolog of NCBI NO: 34222064 NR Description: At3g48720 [Arabidopsis thaliana]
  misc_feature (21)..(255): Homolog of NCBI NO: 21553692 NR Description: acyltransferase-like protein [Arabidopsis
  misc_feature (21)..(255): Homolog of NCBI NO: 15242820 NR Description: acyltransferase-like protein
  misc_feature (24)..(255): Homolog of NCBI NO: 30693725 NR Description: transferase family [Arabidopsis thaliana]
  misc_feature (1)..(255): Homolog of NCBI NO: 30693723 NR Description: transferase family [Arabidopsis thaliana]
MVADMKENGGAVLAAGEKAPQVVVKRGEPTLVPPAEATPTGGQYYLSNLDQNIAVIVQTVYCYKPSGGGGDVAAALRDALARVLVHYYPLAGRLGVSPEMKLTVELTGEGAVFVEADAACELATVGDLTKPDPAALGQLVYSVPGAKHILEMPPMTAQVTRFKCGGFALGLAMNHCMFDGIGAMEFVNSWAETARGVAELTVPPFLDRSVLKARDPPVHTFPHHEFAEIPDVSDTAALYGAQELQYRSFCFDPDRPGARPRAGACRRRPRPLHHLRGAVGARVARAHQGARAGARAAHEAAVRRGRTAPVRAAAPAGLLRQRHRADQRPGHGRRAAVRARVARSRAGAGGRADGD

SEQ ID NO: 3518 - protein, 351 aa, Zea mays subsp. mays
  peptide (1)..(351): Ceres Seq. ID no. 12376478
  misc_feature (20)..(251): Pfam Name: Transferase family Pfam Description: Transferase family
  misc_feature (13)..(231): Homolog of NCBI NO: 40644084 NR Description: hydroxycinnamoyl CoA quinate transferase
  misc_feature (13)..(234): Homolog of NCBI NO: 40644899 NR Description: hydroxycinnamoyl CoA quinate transferase
  misc_feature (17)..(243): Homolog of NCBI NO: 15218793 NR Description: hypothetical protein; protein id: At1g03390.1
  misc_feature (10)..(302): Homolog of NCBI NO: 20161743 NR Description: N-hydroxycinnamoyl/benzoyltransferase-like
  misc_feature (17)..(251): Homolog of NCBI NO: 15229017 NR Description: putative protein; protein id: At3g48720.1
  misc_feature (17)..(251): Homolog of NCBI NO: 34222064 NR Description: At3g48720 [Arabidopsis thaliana]
  misc_feature (17)..(251): Homolog of NCBI NO: 21553692 NR Description: acyltransferase-like protein [Arabidopsis
  misc_feature (17)..(251): Homolog of NCBI NO: 15242820 NR Description: acyltransferase-like protein
  misc_feature (20)..(251): Homolog of NCBI NO: 30693725 NR Description: transferase family [Arabidopsis thaliana]
  misc_feature (1)..(251): Homolog of NCBI NO: 30693723 NR Description: transferase family [Arabidopsis thaliana]
MKENGGAVLAAGEKAPQVVVKRGEPTLVPPAEATPTGGQYYLSNLDQNIAVIVQTVYCYKPSGGGGDVAAALRDALARVLVHYYPLAGRLGVSPEMKLTVELTGEGAVFVEADAACELATVGDLTKPDPAALGQLVYSVPGAKHILEMPPMTAQVTRFKCGGFALGLAMNHCMFDGIGAMEFVNSWAETARGVAELTVPPFLDRSVLKARDPPVHTFPHHEFAEIPDVSDTAALYGAQELQYRSFCFDPDRPGARPRAGACRRRPRPLHHLRGAVGARVARAHQGARAGARAAHEAAVRRGRTAPVRAAAPAGLLRQRHRADQRPGHGRRAAVRARVARSRAGAGGRADGD

SEQ ID NO: 3519 - protein, 256 aa, Zea mays subsp. mays
  peptide (1)..(256): Ceres Seq. ID no. 12376479
  misc_feature (1)..(156): Pfam Name: Transferase family Pfam Description: Transferase family
  misc_feature (1)..(136): Homolog of NCBI NO: 40644084 NR Description: hydroxycinnamoyl CoA quinate transferase
  misc_feature (1)..(139): Homolog of NCBI NO: 40644899 NR Description: hydroxycinnamoyl CoA quinate transferase
  misc_feature (1)..(148): Homolog of NCBI NO: 15218793 NR Description: hypothetical protein; protein id: At1g03390.1
  misc_feature (1)..(207): Homolog of NCBI NO: 20161743 NR Description: N-hydroxycinnamoyl/benzoyltransferase-like
  misc_feature (1)..(156): Homolog of NCBI NO: 15229017 NR Description: putative protein; protein id: At3g48720.1
  misc_feature (1)..(156): Homolog of NCBI NO: 34222064 NR Description: At3g48720 [Arabidopsis thaliana]
  misc_feature (1)..(156): Homolog of NCBI NO: 21553692 NR Description: acyltransferase-like protein [Arabidopsis
  misc_feature (1)..(156): Homolog of NCBI NO: 15242820 NR Description: acyltransferase-like protein
  misc_feature (1)..(156): Homolog of NCBI NO: 30693725 NR Description: transferase family [Arabidopsis thaliana]
  misc_feature (1)..(156): Homolog of NCBI NO: 30693723 NR Description: transferase family [Arabidopsis thaliana]
MKLTVELTGEGAVFVEADAACELATVGDLTKPDPAALGQLVYSVPGAKHILEMPPMTAQVTRFKCGGFALGLAMNHCMFDGIGAMEFVNSWAETARGVAELTVPPFLDRSVLKARDPPVHTFPHHEFAEIPDVSDTAALYGAQELQYRSFCFDPDRPGARPRAGACRRRPRPLHHLRGAVGARVARAHQGARAGARAAHEAAVRRGRTAPVRAAAPAGLLRQRHRADQRPGHGRRAAVRARVARSRAGAGGRADGD

SEQ ID NO: 3520 - DNA, 1333 bp, Zea mays subsp. mays
  misc_feature (1)..(1333): Ceres Seq. ID no. 12367911
  misc_feature: MA Experiment ID: 108522 Result: Up-regulated in Transcription
  misc_feature: MA Experiment 108522 PARAMETER Experiment Name: Zm_42deg_Heat_P Parameter: Age (day) Value: 8
  misc_feature: MA Experiment 108522 PARAMETER Experiment Name: Zm_42deg_Heat_P Parameter: Organism Value: Zea mays
  misc_feature: MA Experiment 108522 PARAMETER Experiment Name: Zm_42deg_Heat_P Parameter: Plant Line Value: 35A19
  misc_feature: MA Experiment 108522 PARAMETER Experiment Name: Zm_42deg_Heat_P Parameter: Temperature (deg C) Value: 42 vs. 22
  misc_feature: MA Experiment 108522 PARAMETER Experiment Name: Zm_42deg_Heat_P Parameter: Timepoint (hr) Value: 1
  misc_feature: MA Experiment 108522 PARAMETER Experiment Name: Zm_42deg_Heat_P Parameter: Tissue Value: Aerial
  misc_feature: MA Experiment ID: 108556 Result: Up-regulated in Transcription
  misc_feature: MA Experiment 108556 PARAMETER Experiment Name: Zm_Drought_P Parameter: Age (day) Value: 9
  misc_feature: MA Experiment 108556 PARAMETER Experiment Name: Zm_Drought_P Parameter: Organism Value: Zea mays
  misc_feature: MA Experiment 108556 PARAMETER Experiment Name: Zm_Drought_P Parameter: Plant Line Value: 35A19
  misc_feature: MA Experiment 108556 PARAMETER Experiment Name: Zm_Drought_P Parameter: Timepoint (hr) Value: 24
  misc_feature: MA Experiment 108556 PARAMETER Experiment Name: Zm_Drought_P Parameter: Tissue Value: Aerial
  misc_feature: MA Experiment 108556 PARAMETER Experiment Name: Zm_Drought_P Parameter: Treatment Value: Drought vs. No Drought
  misc_feature: MA Experiment ID: 108689 Result: Up-regulated in Transcription
  misc_feature: MA Experiment 108689 PARAMETER Experiment Name: Zm_Drought_Roots_P Parameter: Age (day) Value: 9
  misc_feature: MA Experiment 108689 PARAMETER Experiment Name: Zm_Drought_Roots_P Parameter: Organism Value: Zea mays
  misc_feature: MA Experiment 108689 PARAMETER Experiment Name: Zm_Drought_Roots_P Parameter: Plant Line Value: 35A19
  misc_feature: MA Experiment 108689 PARAMETER Experiment Name: Zm_Drought_Roots_P Parameter: Timepoint (hr) Value: 24
  misc_feature: MA Experiment 108689 PARAMETER Experiment Name: Zm_Drought_Roots_P Parameter: Tissue Value: Roots
  misc_feature: MA Experiment 108689 PARAMETER Experiment Name: Zm_Drought_Roots_P Parameter: Treatment Value: Drought vs. No Drought
  misc_feature: MA Experiment ID: 20000480 Result: Up-regulated in Transcription
  misc_feature: MA Experiment 20000480 PARAMETER Experiment Name: Zm_Drought_P Parameter: Age (day) Value: 11
  misc_feature: MA Experiment 20000480 PARAMETER Experiment Name: Zm_Drought_P Parameter: Organism Value: Zea mays
  misc_feature: MA Experiment 20000480 PARAMETER Experiment Name: Zm_Drought_P Parameter: Plant Line Value: 35A19
  misc_feature: MA Experiment 20000480 PARAMETER Experiment Name: Zm_Drought_P Parameter: Timepoint (hr) Value: 72
  misc_feature: MA Experiment 20000480 PARAMETER Experiment Name: Zm_Drought_P Parameter: Tissue Value: Aerial
  misc_feature: MA Experiment 20000480 PARAMETER Experiment Name: Zm_Drought_P Parameter: Treatment Value: Drought vs. No Drought
aactactctactaccaggcacaccgcacacccaatacggaaagaccaccgcaaacgccaccacgcccacgcctcgccgcgcaccacatctgaaacctccagcccgacgccggcgccggcgccgctgctcgcctgctcgtcacatttcctggtgcccgccaagccccgcgacctgggctccccagctccatccatcaaccgcctgcagccgcggaaatggcagcgccgacgacgctgcgctcggcggcggcgcgggcgcgcgcgcgcgcagcggagctcgtgagagggcggtggccgcagcggcgtctggggacgacgtccgcggcggagacggagagcaaaaagaataaggaggaggaggaggagggggccgggtgggagctctcggcggcgcgggagtactacgactaccgcaagtctatctacggcgacgtcacgcaccgcgccctcctcgtcgacgccgtcggcaccctcgtcgtccccgcccagcccaccgcgcaggtgtataagagcattggtgagaagtatggagtgaagtactcggaagacgagatcctgatgagataccggcgggcatacgagcaaccatggggtggatcacgtctcaggtatgtggatgatgggagaaccttttggcagcacatagtcacttcttctacaggatgttcagatgcacagtactttgaggaactctatcaatactttatgacagaaaaggcctggaagctttgtgaccccgatgccgaaagtgtatttaaagctttgaggaaagctggcgttaaaactgcagtcgtctccaatttcgatacccgtctacggccactcctgcaggccttgaaatgtgaccactggtttgatgcagttgcagtcctctgcagaggttgcagcagagaagccgaatccaataatattcttgaaggcctgtgagttactgggcgtgaagcctgaagaagctgtgcacgttggcgacgatcgtagaaatgatatatggggagcgagagatgcaggctgcgatgcttggctctggggcagcgacgttcgctctttcaaggaggttgccgagcggatcggtgttgaggtgacgaagtgactaagtgagctaggatggtgaatatacggaggcagaggtagtacccaggatcgcggtcgtcaaggaagccagtgaccccatccttgtggtgaaattcctgtgctggtttgtaggcttgtagctgtatgtatgacaacttattagggttccgttgaacctgctatgcatgcatgcttgctgccctgacagtgacaggcgaatgcgtcccatgcacttgaatatgagggtctgggttctggacttc

SEQ ID NO: 3521 - protein, 236 aa, Zea mays subsp. mays
  peptide (1)..(236): Ceres Seq. ID no. 12367912
  misc_feature (75)..(218): Pfam Name: haloacid dehalogenase-like hydrolase Pfam Description: haloacid dehalogenase-like hydrolase
  misc_feature (76)..(225): Homolog of NCBI NO: 21312204 NR Description: RIKEN cDNA 2810435D12 [Mus musculus]
  misc_feature (76)..(204): Homolog of NCBI NO: 17553988 NR Description: Predicted CDS, haloacid dehalogenase-like
  misc_feature (76)..(218): Homolog of NCBI NO: 23041810 NR Description: hypothetical protein [Trichodesmium erythraeum
  misc_feature (76)..(218): Homolog of NCBI NO: 17231587 NR Description: hypothetical protein [Nostoc sp. PCC 7120]
  misc_feature (76)..(225): Homolog of NCBI NO: 27714603 NR Description: similar to RIKEN cDNA 2810435D12
  misc_feature (76)..(218): Homolog of NCBI NO: 37520921 NR Description: hypothetical protein gll1352 [Gloeobacter
  misc_feature (78)..(218): Homolog of NCBI NO: 30683719 NR Description: haloacid dehalogenase-like hydrolase family
  misc_feature (78)..(218): Homolog of NCBI NO: 28393346 NR Description: unknown protein [Arabidopsis thaliana]
  misc_feature (35)..(231): Homolog of NCBI NO: 15227309 NR Description: hypothetical protein
  misc_feature (1)..(218): Homolog of NCBI NO: 34899086 NR Description: contains ESTs
MAAPTTLRSAAARARARAAELVRGRWPQRRLGTTSAAETESKKNKEEEEEGAGWELSAAREYYDYRKSIYGDVTHRALLVDAVGTLVVPAQPTAQVYKSIGEKYGVKYSEDEILMRYRRAYEQPWGGSRLRYVDDGRTFWQHIVTSSTGCSDAQYFEELYQYFMTEKAWKLCDPDAESVFKALRKAGVKTAVVSNFDTRLRPLLQALKCDHWFDAVAVLCRGCSREAESNNILEGL

SEQ ID NO: 3522 - protein, 122 aa, Zea mays subsp. mays
  peptide (1)..(122): Ceres Seq. ID no. 12367913
  misc_feature (1)..(104): Pfam Name: haloacid dehalogenase-like hydrolase Pfam Description: haloacid dehalogenase-like hydrolase
  misc_feature (1)..(111): Homolog of NCBI NO: 21312204 NR Description: RIKEN cDNA 2810435D12 [Mus musculus]
  misc_feature (1)..(90): Homolog of NCBI NO: 17553988 NR Description: Predicted CDS, haloacid dehalogenase-like
  misc_feature (1)..(104): Homolog of NCBI NO: 23041810 NR Description: hypothetical protein [Trichodesmium erythraeum
  misc_feature (1)..(104): Homolog of NCBI NO: 17231587 NR Description: hypothetical protein [Nostoc sp. PCC 7120]
  misc_feature (1)..(111): Homolog of NCBI NO: 27714603 NR Description: similar to RIKEN cDNA 2810435D12
  misc_feature (1)..(104): Homolog of NCBI NO: 37520921 NR Description: hypothetical protein gll1352 [Gloeobacter
  misc_feature (1)..(104): Homolog of NCBI NO: 30683719 NR Description: haloacid dehalogenase-like hydrolase family
  misc_feature (1)..(104): Homolog of NCBI NO: 28393346 NR Description: unknown protein [Arabidopsis thaliana]
  misc_feature (1)..(117): Homolog of NCBI NO: 15227309 NR Description: hypothetical protein
  misc_feature (1)..(104): Homolog of NCBI NO: 34899086 NR Description: contains ESTs
MRYRRAYEQPWGGSRLRYVDDGRTFWQHIVTSSTGCSDAQYFEELYQYFMTEKAWKLCDPDAESVFKALRKAGVKTAVVSNFDTRLRPLLQALKCDHWFDAVAVLCRGCSREAESNNILEGL

SEQ ID NO: 3523 - DNA, 1935 bp, Zea mays subsp. mays
  misc_feature (1)..(1935): Ceres Seq. ID no. 12352214
  misc_feature: MA Experiment ID: 108527 Result: Down-regulated in Transcription
  misc_feature: MA Experiment 108527 PARAMETER Experiment Name: Zm_5mM_NO_P Parameter: Age (day) Value: 8
  misc_feature: MA Experiment 108527 PARAMETER Experiment Name: Zm_5mM_NO_P Parameter: Organism Value: Zea mays
  misc_feature: MA Experiment 108527 PARAMETER Experiment Name: Zm_5mM_NO_P Parameter: Plant Line Value: 35A19
  misc_feature: MA Experiment 108527 PARAMETER Experiment Name: Zm_5mM_NO_P Parameter: Timepoint (hr) Value: 6
  misc_feature: MA Experiment 108527 PARAMETER Experiment Name: Zm_5mM_NO_P Parameter: Tissue Value: Aerial
  misc_feature: MA Experiment 108527 PARAMETER Experiment Name: Zm_5mM_NO_P Parameter: Treatment Value: 5mM NO vs. No Treatment
  misc_feature: MA Experiment ID: 108528 Result: Up-regulated in Transcription
  misc_feature: MA Experiment 108528 PARAMETER Experiment Name: Zm_Imbibed_Seeds_P Parameter: Age (day) Value: 5 vs. 2
  misc_feature: MA Experiment 108528 PARAMETER Experiment Name: Zm_Imbibed_Seeds_P Parameter: Organism Value: Zea mays
  misc_feature: MA Experiment 108528 PARAMETER Experiment Name: Zm_Imbibed_Seeds_P Parameter: Plant Line Value: 35A19
  misc_feature: MA Experiment 108528 PARAMETER Experiment Name: Zm_Imbibed_Seeds_P Parameter: Tissue Value: Aerial vs. Embryo
  misc_feature: MA Experiment ID: 108530 Result: Up-regulated in Transcription
  misc_feature: MA Experiment 108530 PARAMETER Experiment Name: Zm_Imbibed_Seeds_P Parameter: Age (day) Value: 6 vs. 2
  misc_feature: MA Experiment 108530 PARAMETER Experiment Name: Zm_Imbibed_Seeds_P Parameter: Organism Value: Zea mays
  misc_feature: MA Experiment 108530 PARAMETER Experiment Name: Zm_Imbibed_Seeds_P Parameter: Plant Line Value: 35A19
  misc_feature: MA Experiment 108530 PARAMETER Experiment Name: Zm_Imbibed_Seeds_P Parameter: Tissue Value: Aerial vs. Embryo
  misc_feature: MA Experiment ID: 108559 Result: Down-regulated in Transcription
  misc_feature: MA Experiment 108559 PARAMETER Experiment Name: Zm_5mM_NO_P Parameter: Age (day) Value: 8
  misc_feature: MA Experiment 108559 PARAMETER Experiment Name: Zm_5mM_NO_P Parameter: Organism Value: Zea mays
  misc_feature: MA Experiment 108559 PARAMETER Experiment Name: Zm_5mM_NO_P Parameter: Plant Line Value: 35A19
  misc_feature: MA Experiment 108559 PARAMETER Experiment Name: Zm_5mM_NO_P Parameter: Timepoint (hr) Value: 12
  misc_feature: MA Experiment 108559 PARAMETER Experiment Name: Zm_5mM_NO_P Parameter: Tissue Value: Aerial
  misc_feature: MA Experiment 108559 PARAMETER Experiment Name: Zm_5mM_NO_P Parameter: Treatment Value: 5mM NO vs. No Treatment
  misc_feature: MA Experiment ID: 20000477 Result: Down-regulated in Transcription
  misc_feature: MA Experiment 20000477 PARAMETER Experiment Name: Zm_5mM_SA_P Parameter: Age (day) Value: 10
  misc_feature: MA Experiment 20000477 PARAMETER Experiment Name: Zm_5mM_SA_P Parameter: Organism Value: Zea mays
  misc_feature: MA Experiment 20000477 PARAMETER Experiment Name: Zm_5mM_SA_P Parameter: Plant Line Value: 35A19
  misc_feature: MA Experiment 20000477 PARAMETER Experiment Name: Zm_5mM_SA_P Parameter: Timepoint (hr) Value: 48
  misc_feature: MA Experiment 20000477 PARAMETER Experiment Name: Zm_5mM_SA_P Parameter: Tissue Value: Aerial
  misc_feature: MA Experiment 20000477 PARAMETER Experiment Name: Zm_5mM_SA_P Parameter: Treatment Value: 5mM SA vs. No Treatment
  misc_feature: MA Experiment ID: 20000478 Result: Down-regulated in Transcription
  misc_feature: MA Experiment 20000478 PARAMETER Experiment Name: Zm_5mM_SA_P Parameter: Age (day) Value: 11
  misc_feature: MA Experiment 20000478 PARAMETER Experiment Name: Zm_5mM_SA_P Parameter: Organism Value: Zea mays
  misc_feature: MA Experiment 20000478 PARAMETER Experiment Name: Zm_5mM_SA_P Parameter: Plant Line Value: 35A19
  misc_feature: MA Experiment 20000478 PARAMETER Experiment Name: Zm_5mM_SA_P Parameter: Timepoint (hr) Value: 72
  misc_feature: MA Experiment 20000478 PARAMETER Experiment Name: Zm_5mM_SA_P Parameter: Tissue Value: Aerial
  misc_feature: MA Experiment 20000478 PARAMETER Experiment Name: Zm_5mM_SA_P Parameter: Treatment Value: 5mM SA vs. No Treatment
  misc_feature: MA Experiment ID: 20000534 Result: Down-regulated in Transcription
  misc_feature: MA Experiment 20000534 PARAMETER Experiment Name: Zm_Hybrid_Pollen_P Parameter: Age (day) Value: 8
  misc_feature: MA Experiment 20000534 PARAMETER Experiment Name: Zm_Hybrid_Pollen_P Parameter: Organism Value: Zea mays
  misc_feature: MA Experiment 20000534 PARAMETER Experiment Name: Zm_Hybrid_Pollen_P Parameter: Plant Line Value: 35A19
  misc_feature: MA Experiment 20000534 PARAMETER Experiment Name: Zm_Hybrid_Pollen_P Parameter: Tissue Value: Pollen vs. Aerial
accccattcgcatctctgcttctttctgcttgggtgccctctgccctgaccacagggcccaaccatatcttcttcctcacacagagacactgagcgagcgagcttgagatcgatctcaggaggcggccggcggcggcagcagcagcagagcttgttggcgccgccatggcgataggtggcttcgtggaagcccctgccggcgccgactacggtggccgcgtgacgtccttcgtggtgctctcctgcatcgtagccggtagcggcggcatcctcttcggctacgacctcggcatctcaggtggggttacctccatggagtcgttccttagaaagttcttcccggacgtgtaccaccagatgaaaggagacaaggacgtgagcaactactgccgcttcgacagcgagcttctcaccgtcttcacctcctccctctacatcgccggcctcgtcgccacgctcttcgcctcctccgtcaccaggaggttcggccgccgcacctccatacttatcggaggcaccgtcttcgtcatcggctccgtcttcggcggggcagccgtcaacgtatacatgctcctactcaacaggatactccttggagtaggcctcggattcacaaaccagtccatcccgctgtacctctcagagatggcgccaccgcagtaccgtggcgccatcaacaacggcttcgagctctgcatcagcatcggcatcctcatcgccaacctcatcaactacggcgtggagaagatagcaggtggatggggctggaggatctctctgtccctggccgccgtgccggccgcgttcctcaccgtcggcgccatctacctgcccgagacgcccagcttcatcatccaacgccgcggcggcagcaacaacgtcgacgaggcaaggctgctcctccagaggctgcgtggcaccaccagggtccagaaagagctcgacgatctcgtgtccgcgaccaggacgaccaccacagggcgtcccttccgcaccatactgaggcgcaagtacaggccgcagctggtcatagctctcctcgtacccttcttcaaccaggtcaccggcatcaacgtcatcaacttctacgcgccggtcatgttccggaccatcgggctcaaggagagcgcgtccctcatgtcggccgtggtcacgcgcgtctgcgccacggccgccaacgtggtggccatggtggtcgtggacaggttcggccgccggaagctcttcctggtgggcggcgtgcagatgatcctgtcgcaggccatggtgggagcggtgctggccgccaagttccaggagcacggagggatggagaaggagtacgcgtacctggtgctcgtcatcatgtgcgtcttcgtcgcgggcttcgcctggtcctggggccctctcacctacctggtgcccaccgagatctgcccgctggagatcaggtcggcggggcagagcgtcgtcatcgccgtcatcttcttcgtcaccttcctcatcggccagaccttcctggcgatgctgtgccacctcaagttcggcaccttcttcctcttcggcggctgggtgtgcgtcatgacgctcttcgtgtatttcttcctgccggagaccaagcagctgcccatggcagcagatggaacaggtctggaggacccactggttttggaaaaggattgtagacgaagatgcagcaggggagcaaccgagagaggaagcagcaggaaccatagctctgtcgtccacgtccaccacaacatagtcatcatcaacaatactcatggcatgggcctgccctgtatagatagataattaactagctgcaccgcacagattgtctccgactataagctagctagctagttggatgcatgcatgcatgcattctgttatttctgtgaccatgaatcaaagggccttccaacagaacagaatatgagatgagatgaatcc

SEQ ID NO: 3524 - protein, 542 aa, Zea mays subsp. mays
  peptide (1)..(542): Ceres Seq. ID no. 12352215
  misc_feature (26)..(482): Pfam Name: Sugar (and other) transporter Pfam Description: Sugar (and other) transporter
  misc_feature (87)..(482): Homolog of NCBI NO: 26249364 NR Description: Galactose-proton symporter [Escherichia coli
  misc_feature (1)..(482): Homolog of NCBI NO: 347855 NR Description: glucose transporter [Saccharum hybrid cultivar
  misc_feature (1)..(522): Homolog of NCBI NO: 15220330 NR Description: glucose transporter
  misc_feature (2)..(482): Homolog of NCBI NO: 4138722 NR Description: hexose transporter [Vitis vinifera]
  misc_feature (1)..(486): Homolog of NCBI NO: 15231001 NR Description: putative monosaccharide transport protein, STP4
  misc_feature (2)..(482): Homolog of NCBI NO: 4138724 NR Description: hexose transporter [Vitis vinifera]
  misc_feature (2)..(486): Homolog of NCBI NO: 3915039 NR Description: Sugar carrier protein C
  misc_feature (8)..(482): Homolog of NCBI NO: 5803244 NR Description: Similar to hexose carrier protein HEX6 &RCCHCP_1
  misc_feature (5)..(482): Homolog of NCBI NO: 1708191 NR Description: Hexose carrier protein HEX6
  misc_feature (1)..(482): Homolog of NCBI NO: 37536854 NR Description: putative monosaccharide transporter
MAIGGFVEAPAGADYGGRVTSFVVLSCIVAGSGGILFGYDLGISGGVTSMESFLRKFFPDVYHQMKGDKDVSNYCRFDSELLTVFTSSLYIAGLVATLFASSVTRRFGRRTSILIGGTVFVIGSVFGGAAVNVYMLLLNRILLGVGLGFTNQSIPLYLSEMAPPQYRGAINNGFELCISIGILIANLINYGVEKIAGGWGWRISLSLAAVPAAFLTVGAIYLPETPSFIIQRRGGSNNVDEARLLLQRLRGTTRVQKELDDLVSATRTTTTGRPFRTILRRKYRPQLVIALLVPFFNQVTGINVINFYAPVMFRTIGLKESASLMSAVVTRVCATAANVVAMVVVDRFGRRKLFLVGGVQMILSQAMVGAVLAAKFQEHGGMEKEYAYLVLVIMCVFVAGFAWSWGPLTYLVPTEICPLEIRSAGQSVVIAVIFFVTFLIGQTFLAMLCHLKFGTFFLFGGWVCVMTLFVYFFLPETKQLPMAADGTGLEDPLVLEKDCRRRCSRGATERGSSRNHSSVVHVHHNIVIINNTHGMGLPCIDR

SEQ ID NO: 3525 - protein, 493 aa, Zea mays subsp. mays
  peptide (1)..(493): Ceres Seq. ID no. 12352216
  misc_feature (1)..(433): Pfam Name: Sugar (and other) transporter Pfam Description: Sugar (and other) transporter
  misc_feature (1)..(433): Homolog of NCBI NO: 4138724 NR Description: hexose transporter [Vitis vinifera]
  misc_feature (1)..(437): Homolog of NCBI NO: 3915039 NR Description: Sugar carrier protein C
  misc_feature (1)..(433): Homolog of NCBI NO: 5803244 NR Description: Similar to hexose carrier protein HEX6 &RCCHCP_1
  misc_feature (1)..(433): Homolog of NCBI NO: 347855 NR Description: glucose transporter [Saccharum hybrid cultivar
  misc_feature (1)..(433): Homolog of NCBI NO: 4138722 NR Description: hexose transporter [Vitis vinifera]
  misc_feature (1)..(437): Homolog of NCBI NO: 15231001 NR Description: putative monosaccharide transport protein, STP4
  misc_feature (1)..(473): Homolog of NCBI NO: 15220330 NR Description: glucose transporter
  misc_feature (38)..(433): Homolog of NCBI NO: 26249364 NR Description: Galactose-proton symporter [Escherichia coli
  misc_feature (1)..(433): Homolog of NCBI NO: 1708191 NR Description: Hexose carrier protein HEX6
  misc_feature (1)..(433): Homolog of NCBI NO: 37536854 NR Description: putative monosaccharide transporter
MESFLRKFFPDVYHQMKGDKDVSNYCRFDSELLTVFTSSLYIAGLVATLFASSVTRRFGRRTSILIGGTVFVIGSVFGGAAVNVYMLLLNRILLGVGLGFTNQSIPLYLSEMAPPQYRGAINNGFELCISIGILIANLINYGVEKIAGGWGWRISLSLAAVPAAFLTVGAIYLPETPSFIIQRRGGSNNVDEARLLLQRLRGTTRVQKELDDLVSATRTTTTGRPFRTILRRKYRPQLVIALLVPFFNQVTGINVINFYAPVMFRTIGLKESASLMSAVVTRVCATAANVVAMVVVDRFGRRKLFLVGGVQMILSQAMVGAVLAAKFQEHGGMEKEYAYLVLVIMCVFVAGFAWSWGPLTYLVPTEICPLEIRSAGQSVVIAVIFFVTFLIGQTFLAMLCHLKFGTFFLFGGWVCVMTLFVYFFLPETKQLPMAADGTGLEDPLVLEKDCRRRCSRGATERGSSRNHSSVVHVHHNIVIINNTHGMGLPCIDR

SEQ ID NO: 3526 - protein, 478 aa, Zea mays subsp. mays
  peptide (1)..(478): Ceres Seq. ID no. 12352217
  misc_feature (1)..(418): Pfam Name: Sugar (and other) transporter Pfam Description: Sugar (and other) transporter
  misc_feature (23)..(418): Homolog of NCBI NO: 26249364 NR Description: Galactose-proton symporter [Escherichia coli
  misc_feature (1)..(418): Homolog of NCBI NO: 347855 NR Description: glucose transporter [Saccharum hybrid cultivar
  misc_feature (1)..(458): Homolog of NCBI NO: 15220330 NR Description: glucose transporter
  misc_feature (1)..(418): Homolog of NCBI NO: 4138722 NR Description: hexose transporter [Vitis vinifera]
  misc_feature (1)..(422): Homolog of NCBI NO: 15231001 NR Description: putative monosaccharide transport protein, STP4
  misc_feature (1)..(418): Homolog of NCBI NO: 4138724 NR Description: hexose transporter [Vitis vinifera]
  misc_feature (1)..(422): Homolog of NCBI NO: 3915039 NR Description: Sugar carrier protein C
  misc_feature (1)..(418): Homolog of NCBI NO: 5803244 NR Description: Similar to hexose carrier protein HEX6 &RCCHCP_1
  misc_feature (1)..(418): Homolog of NCBI NO: 1708191 NR Description: Hexose carrier protein HEX6
  misc_feature (1)..(418): Homolog of NCBI NO: 37536854 NR Description: putative monosaccharide transporter
MKGDKDVSNYCRFDSELLTVFTSSLYIAGLVATLFASSVTRRFGRRTSILIGGTVFVIGSVFGGAAVNVYMLLLNRILLGVGLGFTNQSIPLYLSEMAPPQYRGAINNGFELCISIGILIANLINYGVEKIAGGWGWRISLSLAAVPAAFLTVGAIYLPETPSFIIQRRGGSNNVDEARLLLQRLRGTTRVQKELDDLVSATRTTTTGRPFRTILRRKYRPQLVIALLVPFFNQVTGINVINFYAPVMFRTIGLKESASLMSAVVTRVCATAANVVAMVVVDRFGRRKLFLVGGVQMILSQAMVGAVLAAKFQEHGGMEKEYAYLVLVIMCVFVAGFAWSWGPLTYLVPTEICPLEIRSAGQSVVIAVIFFVTFLIGQTFLAMLCHLKFGTFFLFGGWVCVMTLFVYFFLPETKQLPMAADGTGLEDPLVLEKDCRRRCSRGATERGSSRNHSSVVHVHHNIVIINNTHGMGLPCIDR

SEQ ID NO: 3527 - DNA, 1938 bp, Zea mays subsp. mays
  misc_feature (1)..(1938): Ceres Seq. ID no. 12373312
  misc_feature: MA Experiment ID: 108527 Result: Up-regulated in Transcription
  misc_feature: MA Experiment 108527 PARAMETER Experiment Name: Zm_5mM_NO_P Parameter: Age (day) Value: 8
  misc_feature: MA Experiment 108527 PARAMETER Experiment Name: Zm_5mM_NO_P Parameter: Organism Value: Zea mays
  misc_feature: MA Experiment 108527 PARAMETER Experiment Name: Zm_5mM_NO_P Parameter: Plant Line Value: 35A19
  misc_feature: MA Experiment 108527 PARAMETER Experiment Name: Zm_5mM_NO_P Parameter: Timepoint (hr) Value: 6
  misc_feature: MA Experiment 108527 PARAMETER Experiment Name: Zm_5mM_NO_P Parameter: Tissue Value: Aerial
  misc_feature: MA Experiment 108527 PARAMETER Experiment Name: Zm_5mM_NO_P Parameter: Treatment Value: 5mM NO vs. No Treatment
  misc_feature: MA Experiment ID: 108559 Result: Up-regulated in Transcription
  misc_feature: MA Experiment 108559 PARAMETER Experiment Name: Zm_5mM_NO_P Parameter: Age (day) Value: 8
  misc_feature: MA Experiment 108559 PARAMETER Experiment Name: Zm_5mM_NO_P Parameter: Organism Value: Zea mays
  misc_feature: MA Experiment 108559 PARAMETER Experiment Name: Zm_5mM_NO_P Parameter: Plant Line Value: 35A19
  misc_feature: MA Experiment 108559 PARAMETER Experiment Name: Zm_5mM_NO_P Parameter: Timepoint (hr) Value: 12
  misc_feature: MA Experiment 108559 PARAMETER Experiment Name: Zm_5mM_NO_P Parameter: Tissue Value: Aerial
  misc_feature: MA Experiment 108559 PARAMETER Experiment Name: Zm_5mM_NO_P Parameter: Treatment Value: 5mM NO vs. No Treatment
  misc_feature: MA Experiment ID: 108597 Result: Up-regulated in Transcription
  misc_feature: MA Experiment 108597 PARAMETER Experiment Name: Zm_100uM_ABA_P Parameter: Age (day) Value: 9
  misc_feature: MA Experiment 108597 PARAMETER Experiment Name: Zm_100uM_ABA_P Parameter: Organism Value: Zea mays
  misc_feature: MA Experiment 108597 PARAMETER Experiment Name: Zm_100uM_ABA_P Parameter: Plant Line Value: 35A19
  misc_feature: MA Experiment 108597 PARAMETER Experiment Name: Zm_100uM_ABA_P Parameter: Timepoint (hr) Value: 24
  misc_feature: MA Experiment 108597 PARAMETER Experiment Name: Zm_100uM_ABA_P Parameter: Tissue Value: Aerial
  misc_feature: MA Experiment 108597 PARAMETER Experiment Name: Zm_100uM_ABA_P Parameter: Treatment Value: 100uM ABA vs. No Treatment
  misc_feature: MA Experiment ID: 20000478 Result: Up-regulated in Transcription
  misc_feature: MA Experiment 20000478 PARAMETER Experiment Name: Zm_5mM_SA_P Parameter: Age (day) Value: 11
  misc_feature: MA Experiment 20000478 PARAMETER Experiment Name: Zm_5mM_SA_P Parameter: Organism Value: Zea mays
  misc_feature: MA Experiment 20000478 PARAMETER Experiment Name: Zm_5mM_SA_P Parameter: Plant Line Value: 35A19
  misc_feature: MA Experiment 20000478 PARAMETER Experiment Name: Zm_5mM_SA_P Parameter: Timepoint (hr) Value: 72
  misc_feature: MA Experiment 20000478 PARAMETER Experiment Name: Zm_5mM_SA_P Parameter: Tissue Value: Aerial
  misc_feature: MA Experiment 20000478 PARAMETER Experiment Name: Zm_5mM_SA_P Parameter: Treatment Value: 5mM SA vs. No Treatment
  misc_feature: MA Experiment ID: 20000479 Result: Up-regulated in Transcription
  misc_feature: MA Experiment 20000479 PARAMETER Experiment Name: Zm_Drought_P Parameter: Age (day) Value: 10
  misc_feature: MA Experiment 20000479 PARAMETER Experiment Name: Zm_Drought_P Parameter: Organism Value: Zea mays
  misc_feature: MA Experiment 20000479 PARAMETER Experiment Name: Zm_Drought_P Parameter: Plant Line Value: 35A19
  misc_feature: MA Experiment 20000479 PARAMETER Experiment Name: Zm_Drought_P Parameter: Timepoint (hr) Value: 48
  misc_feature: MA Experiment 20000479 PARAMETER Experiment Name: Zm_Drought_P Parameter: Tissue Value: Aerial
  misc_feature: MA Experiment 20000479 PARAMETER Experiment Name: Zm_Drought_P Parameter: Treatment Value: Drought vs. No Drought
  misc_feature: MA Experiment ID: 20000480 Result: Up-regulated in Transcription
  misc_feature: MA Experiment 20000480 PARAMETER Experiment Name: Zm_Drought_P Parameter: Age (day) Value: 11
  misc_feature: MA Experiment 20000480 PARAMETER Experiment Name: Zm_Drought_P Parameter: Organism Value: Zea mays
  misc_feature: MA Experiment 20000480 PARAMETER Experiment Name: Zm_Drought_P Parameter: Plant Line Value: 35A19
  misc_feature: MA Experiment 20000480 PARAMETER Experiment Name: Zm_Drought_P Parameter: Timepoint (hr) Value: 72
  misc_feature: MA Experiment 20000480 PARAMETER Experiment Name: Zm_Drought_P Parameter: Tissue Value: Aerial
  misc_feature: MA Experiment 20000480 PARAMETER Experiment Name: Zm_Drought_P Parameter: Treatment Value: Drought vs. No Drought
  misc_feature: MA Experiment ID: 20000626 Result: Up-regulated in Transcription
  misc_feature: MA Experiment 20000626 PARAMETER Experiment Name: Zm_Herbicide-Treatments_P Parameter: Timepoint (hr) Value: 12
  misc_feature: MA Experiment 20000626 PARAMETER Experiment Name: Zm_Herbicide-Treatments_P Parameter: Tissue Value: Aerial
  misc_feature: MA Experiment 20000626 PARAMETER Experiment Name: Zm_Herbicide-Treatments_P Parameter: Treatment Value: Roundup vs. No Treatment
tcgcagaagccgcagccacgccccacgcccccacaccaagccgtatcgtcttctccctcttgtccggttcgggtggtccgcggtcggggtgagtgagtgagcagctttgcttctccatctccccattcccttccctccccagcccccccggcccggcggcggtacgtgaccctgacgccgcagcgctagctagctcgccggaacggcaggtggcggcgcgcgacctgagagcacagcagcaccggaccggctcaggcaggcgaccggcagaaaagatggcgggagcagcagctgtggagacggcggcggcggcggcggcggcggcggcagcggccaacggaaaagcgtgctgccacgccgccaaggggcccgggtacgccacgccgctggaggccatggagaagggccccagggagaagctcgtctacgtcacctgcgtctacaacggcactggaattaacaagccggattaccttgcgacggtggatttggatcccagctctcctacatactcccaggtgatccacaggctcccggtcacccacatcggcgacgagctgcatcactctggctggaactcctgcagctcctgccacggtgacccatcggccaagcgccgcttcctgatcctgccttccttgctgtcaggccgtgtgtatgtcgtcgacacagcgacagacccaagggcgccatccttgcataaggtggttgagtctgaggacattgctgagaatactgggcttgggttccctcacacgtctcattgccttgcgtctggcgacattatgatttcttgccttggggacaaggaggggaatgcagctggcaatggcttcctgctgttggattcagagtttaatgtcaaaggacgttgggaaaagccaggtcacagtcccttggttggatatgacttctggtaccagcctcgccacaagacgatgatcagttcctcatggggagcccctgcagcctttaggacaggtttcgatcttcaacatgtccaggatggcctgtatggaaggcacctgcatgtgtacgactggcctggcggtgagctcaagcagacacttgatctaggtgacactggactccttccccttgaggtgaggtttttacatgatccatcaaaggacactggctatgttggctgtgctttaacaagcaacatggtgagatttttcaagaccgcggatggatcgtggagccatgaggttgctatctctgtgaaaccactgaaggtccgcaactggattctgccggaaatgccaggattgataactgattttgtcatctctcttgatgaccgttatctctactttgtaaactggcttcatggcgatattaggcagtacaacattgaggatcccgcaaagcctttcttggctggacaagtatgggttggtggtcttcttcagaagggcagtgatgtcgtctatgttactgatgatggtcaggaacagcagtataatgtgcctcaagtcaagggtcatcgacttagaggtgggccacagatgattcagctgagcttggatggcaagaggatatacgtgacaaactcacttttcagccgatgggatgagcagtttttcggtgatgatcttgtcaagaagggctcccacatgttgcagatcgatgtcgacaccgagaaaggaggcctggctgtcaaccccaacttcttcgtcgattttggcaccgagcctgatggtcctgccctggcccacgagatgagatatcctggtggggactgcacctctgatatatggatctgaggtcaaggattcggcgtaattaacaggctgctggagaatccctgttgttgtatgcactgtaattaacatggtatccgtgcggtgttccgtcttgtactgcgactgttgccagtggaataaggcatggtttcatgagaactctagattaataaaagaagtcctgattctg

SEQ ID NO: 3528 - protein, 497 aa, Zea mays subsp. mays
  peptide (1)..(497): Ceres Seq. ID no. 12373313
  misc_feature (29)..(497): Pfam Name: 56kDa selenium binding protein (SBP56) Pfam Description: 56kDa selenium binding protein (SBP56)
  misc_feature (8)..(497): Homolog of NCBI NO: 7488184 NR Description: probable selenium-binding protein - Arabidopsis
  misc_feature (10)..(497): Homolog of NCBI NO: 22530900 NR Description: selenium-binding protein-like protein
  misc_feature (16)..(497): Homolog of NCBI NO: 13605825 NR Description: AT4g14040/dl3061c [Arabidopsis thaliana]
  misc_feature (10)..(497): Homolog of NCBI NO: 15236386 NR Description: selenium-binding protein like
  misc_feature (19)..(497): Homolog of NCBI NO: 15485716 NR Description: selenium binding protein [Lotus japonicus]
  misc_feature (6)..(497): Homolog of NCBI NO: 15236385 NR Description: selenium-binding protein like
  misc_feature (13)..(497): Homolog of NCBI NO: 15485720 NR Description: selenium binding protein [Medicago sativa]
  misc_feature (41)..(497): Homolog of NCBI NO: 13560275 NR Description: putative selenium binding protein [Oryza sativa]
  misc_feature (17)..(497): Homolog of NCBI NO: 34906970 NR Description: putative selenium binding protein
MAGAAAVETAAAAAAAAAAANGKACCHAAKGPGYATPLEAMEKGPREKLVYVTCVYNGTGINKPDYLATVDLDPSSPTYSQVIHRLPVTHIGDELHHSGWNSCSSCHGDPSAKRRFLILPSLLSGRVYVVDTATDPRAPSLHKVVESEDIAENTGLGFPHTSHCLASGDIMISCLGDKEGNAAGNGFLLLDSEFNVKGRWEKPGHSPLVGYDFWYQPRHKTMISSSWGAPAAFRTGFDLQHVQDGLYGRHLHVYDWPGGELKQTLDLGDTGLLPLEVRFLHDPSKDTGYVGCALTSNMVRFFKTADGSWSHEVAISVKPLKVRNWILPEMPGLITDFVISLDDRYLYFVNWLHGDIRQYNIEDPAKPFLAGQVWVGGLLQKGSDVVYVTDDGQEQQYNVPQVKGHRLRGGPQMIQLSLDGKRIYVTNSLFSRWDEQFFGDDLVKKGSHMLQIDVDTEKGGLAVNPNFFVDFGTEPDGPALAHEMRYPGGDCTSDIWI

SEQ ID NO: 3529 - protein, 457 aa, Zea mays subsp. mays
  peptide (1)..(457): Ceres Seq. ID no. 12373314
  misc_feature (1)..(457): Pfam Name: 56kDa selenium binding protein (SBP56) Pfam Description: 56kDa selenium binding protein (SBP56)
  misc_feature (1)..(457): Homolog of NCBI NO: 7488184 NR Description: probable selenium-binding protein - Arabidopsis
  misc_feature (1)..(457): Homolog of NCBI NO: 22530900 NR Description: selenium-binding protein-like protein
  misc_feature (1)..(457): Homolog of NCBI NO: 13605825 NR Description: AT4g14040/dl3061c [Arabidopsis thaliana]
  misc_feature (1)..(457): Homolog of NCBI NO: 15236386 NR Description: selenium-binding protein like
  misc_feature (1)..(457): Homolog of NCBI NO: 15485716 NR Description: selenium binding protein [Lotus japonicus]
  misc_feature (1)..(457): Homolog of NCBI NO: 15236385 NR Description: selenium-binding protein like
  misc_feature (1)..(457): Homolog of NCBI NO: 15485720 NR Description: selenium binding protein [Medicago sativa]
  misc_feature (1)..(457): Homolog of NCBI NO: 13560275 NR Description: putative selenium binding protein [Oryza sativa]
  misc_feature (1)..(457): Homolog of NCBI NO: 34906970 NR Description: putative selenium binding protein
MEKGPREKLVYVTCVYNGTGINKPDYLATVDLDPSSPTYSQVIHRLPVTHIGDELHHSGWNSCSSCHGDPSAKRRFLILPSLLSGRVYVVDTATDPRAPSLHKVVESEDIAENTGLGFPHTSHCLASGDIMISCLGDKEGNAAGNGFLLLDSEFNVKGRWEKPGHSPLVGYDFWYQPRHKTMISSSWGAPAAFRTGFDLQHVQDGLYGRHLHVYDWPGGELKQTLDLGDTGLLPLEVRFLHDPSKDTGYVGCALTSNMVRFFKTADGSWSHEVAISVKPLKVRNWILPEMPGLITDFVISLDDRYLYFVNWLHGDIRQYNIEDPAKPFLAGQVWVGGLLQKGSDVVYVTDDGQEQQYNVPQVKGHRLRGGPQMIQLSLDGKRIYVTNSLFSRWDEQFFGDDLVKKGSHMLQIDVDTEKGGLAVNPNFFVDFGTEPDGPALAHEMRYPGGDCTSDIWI

SEQ ID NO: 3530 - protein, 327 aa, Zea mays subsp. mays
  peptide (1)..(327): Ceres Seq. ID no. 12373315
  misc_feature (1)..(327): Pfam Name: 56kDa selenium binding protein (SBP56) Pfam Description: 56kDa selenium binding protein (SBP56)
  misc_feature (1)..(327): Homolog of NCBI NO: 7488184 NR Description: probable selenium-binding protein - Arabidopsis
  misc_feature (1)..(327): Homolog of NCBI NO: 22530900 NR Description: selenium-binding protein-like protein
  misc_feature (1)..(327): Homolog of NCBI NO: 13605825 NR Description: AT4g14040/dl3061c [Arabidopsis thaliana]
  misc_feature (1)..(327): Homolog of NCBI NO: 15236386 NR Description: selenium-binding protein like
  misc_feature (1)..(327): Homolog of NCBI NO: 15485716 NR Description: selenium binding protein [Lotus japonicus]
  misc_feature (1)..(327): Homolog of NCBI NO: 15236385 NR Description: selenium-binding protein like
  misc_feature (1)..(327): Homolog of NCBI NO: 15485720 NR Description: selenium binding protein [Medicago sativa]
  misc_feature (1)..(327): Homolog of NCBI NO: 13560275 NR Description: putative selenium binding protein [Oryza sativa]
  misc_feature (1)..(327): Homolog of NCBI NO: 34906970 NR Description: putative selenium binding protein
MISCLGDKEGNAAGNGFLLLDSEFNVKGRWEKPGHSPLVGYDFWYQPRHKTMISSSWGAPAAFRTGFDLQHVQDGLYGRHLHVYDWPGGELKQTLDLGDTGLLPLEVRFLHDPSKDTGYVGCALTSNMVRFFKTADGSWSHEVAISVKPLKVRNWILPEMPGLITDFVISLDDRYLYFVNWLHGDIRQYNIEDPAKPFLAGQVWVGGLLQKGSDVVYVTDDGQEQQYNVPQVKGHRLRGGPQMIQLSLDGKRIYVTNSLFSRWDEQFFGDDLVKKGSHMLQIDVDTEKGGLAVNPNFFVDFGTEPDGPALAHEMRYPGGDCTSDIWI

SEQ ID NO: 3531 - DNA, 1163 bp, Zea mays subsp. mays
  misc_feature (1)..(1163): Ceres Seq. ID no. 12352218
  misc_feature: MA Experiment ID: 108527 Result: Up-regulated in Transcription
  misc_feature: MA Experiment 108527 PARAMETER Experiment Name: Zm_5mM_NO_P Parameter: Age (day) Value: 8
  misc_feature: MA Experiment 108527 PARAMETER Experiment Name: Zm_5mM_NO_P Parameter: Organism Value: Zea mays
  misc_feature: MA Experiment 108527 PARAMETER Experiment Name: Zm_5mM_NO_P Parameter: Plant Line Value: 35A19
  misc_feature: MA Experiment 108527 PARAMETER Experiment Name: Zm_5mM_NO_P Parameter: Timepoint (hr) Value: 6
  misc_feature: MA Experiment 108527 PARAMETER Experiment Name: Zm_5mM_NO_P Parameter: Tissue Value: Aerial
  misc_feature: MA Experiment 108527 PARAMETER Experiment Name: Zm_5mM_NO_P Parameter: Treatment Value: 5mM NO vs. No Treatment
  misc_feature: MA Experiment ID: 108528 Result: Down-regulated in Transcription
  misc_feature: MA Experiment 108528 PARAMETER Experiment Name: Zm_Imbibed_Seeds_P Parameter: Age (day) Value: 5 vs. 2
  misc_feature: MA Experiment 108528 PARAMETER Experiment Name: Zm_Imbibed_Seeds_P Parameter: Organism Value: Zea mays
  misc_feature: MA Experiment 108528 PARAMETER Experiment Name: Zm_Imbibed_Seeds_P Parameter: Plant Line Value: 35A19
  misc_feature: MA Experiment 108528 PARAMETER Experiment Name: Zm_Imbibed_Seeds_P Parameter: Tissue Value: Aerial vs. Embryo
  misc_feature: MA Experiment ID: 108530 Result: Down-regulated in Transcription
  misc_feature: MA Experiment 108530 PARAMETER Experiment Name: Zm_Imbibed_Seeds_P Parameter: Age (day) Value: 6 vs. 2
  misc_feature: MA Experiment 108530 PARAMETER Experiment Name: Zm_Imbibed_Seeds_P Parameter: Organism Value: Zea mays
  misc_feature: MA Experiment 108530 PARAMETER Experiment Name: Zm_Imbibed_Seeds_P Parameter: Plant Line Value: 35A19
  misc_feature: MA Experiment 108530 PARAMETER Experiment Name: Zm_Imbibed_Seeds_P Parameter: Tissue Value: Aerial vs. Embryo
  misc_feature: MA Experiment ID: 108536 Result: Up-regulated in Transcription
  misc_feature: MA Experiment 108536 PARAMETER Experiment Name: Zm_Meristem_P Parameter: Age (day) Value: 8
  misc_feature: MA Experiment 108536 PARAMETER Experiment Name: Zm_Meristem_P Parameter: Organism Value: Zea mays
  misc_feature: MA Experiment 108536 PARAMETER Experiment Name: Zm_Meristem_P Parameter: Plant Line Value: 35A19
  misc_feature: MA Experiment 108536 PARAMETER Experiment Name: Zm_Meristem_P Parameter: Tissue Value: Shoot Meristem vs. Above Shoot Meristem
  misc_feature: MA Experiment ID: 108547 Result: Down-regulated in Transcription
  misc_feature: MA Experiment 108547 PARAMETER Experiment Name: Zm_Imbibed_Seeds_P Parameter: Age (day) Value: 4 vs. 2
  misc_feature: MA Experiment 108547 PARAMETER Experiment Name: Zm_Imbibed_Seeds_P Parameter: Organism Value: Zea mays
  misc_feature: MA Experiment 108547 PARAMETER Experiment Name: Zm_Imbibed_Seeds_P Parameter: Plant Line Value: 35A19
  misc_feature: MA Experiment 108547 PARAMETER Experiment Name: Zm_Imbibed_Seeds_P Parameter: Tissue Value: Aerial vs. Embryo
  misc_feature: MA Experiment ID: 108559 Result: Up-regulated in Transcription
  misc_feature: MA Experiment 108559 PARAMETER Experiment Name: Zm_5mM_NO_P Parameter: Age (day) Value: 8
  misc_feature: MA Experiment 108559 PARAMETER Experiment Name: Zm_5mM_NO_P Parameter: Organism Value: Zea mays
  misc_feature: MA Experiment 108559 PARAMETER Experiment Name: Zm_5mM_NO_P Parameter: Plant Line Value: 35A19
  misc_feature: MA Experiment 108559 PARAMETER Experiment Name: Zm_5mM_NO_P Parameter: Timepoint (hr) Value: 12
  misc_feature: MA Experiment 108559 PARAMETER Experiment Name: Zm_5mM_NO_P Parameter: Tissue Value: Aerial
  misc_feature: MA Experiment 108559 PARAMETER Experiment Name: Zm_5mM_NO_P Parameter: Treatment Value: 5mM NO vs. No Treatment
  misc_feature: MA Experiment ID: 20000477 Result: Down-regulated in Transcription
  misc_feature: MA Experiment 20000477 PARAMETER Experiment Name: Zm_5mM_SA_P Parameter: Age (day) Value: 10
  misc_feature: MA Experiment 20000477 PARAMETER Experiment Name: Zm_5mM_SA_P Parameter: Organism Value: Zea mays
  misc_feature: MA Experiment 20000477 PARAMETER Experiment Name: Zm_5mM_SA_P Parameter: Plant Line Value: 35A19
  misc_feature: MA Experiment 20000477 PARAMETER Experiment Name: Zm_5mM_SA_P Parameter: Timepoint (hr) Value: 48
  misc_feature: MA Experiment 20000477 PARAMETER Experiment Name: Zm_5mM_SA_P Parameter: Tissue Value: Aerial
  misc_feature: MA Experiment 20000477 PARAMETER Experiment Name: Zm_5mM_SA_P Parameter: Treatment Value: 5mM SA vs. No Treatment
  misc_feature: MA Experiment ID: 20000533 Result: Up-regulated in Transcription
  misc_feature: MA Experiment 20000533 PARAMETER Experiment Name: Zm_0.001percent_MeJA_P Parameter: Age (day) Value: 11
  misc_feature: MA Experiment 20000533 PARAMETER Experiment Name: Zm_0.001percent_MeJA_P Parameter: Organism Value: Zea mays
  misc_feature: MA Experiment 20000533 PARAMETER Experiment Name: Zm_0.001percent_MeJA_P Parameter: Plant Line Value: 35A19
  misc_feature: MA Experiment 20000533 PARAMETER Experiment Name: Zm_0.001percent_MeJA_P Parameter: Timepoint (hr) Value: 72
  misc_feature: MA Experiment 20000533 PARAMETER Experiment Name: Zm_0.001percent_MeJA_P Parameter: Tissue Value: Aerial
  misc_feature: MA Experiment 20000533 PARAMETER Experiment Name: Zm_0.001percent_MeJA_P Parameter: Treatment Value: 0.001percent MeJA vs. No Treatment
  misc_feature: MA Experiment ID: 20000535 Result: Up-regulated in Transcription
  misc_feature: MA Experiment 20000535 PARAMETER Experiment Name: Zm_Hybrid_Seed_Dev_P Parameter: DAP Value: 30 vs. 12
  misc_feature: MA Experiment 20000535 PARAMETER Experiment Name: Zm_Hybrid_Seed_Dev_P Parameter: Organism Value: Zea mays
  misc_feature: MA Experiment 20000535 PARAMETER Experiment Name: Zm_Hybrid_Seed_Dev_P Parameter: Plant Line Value: 35A19
  misc_feature: MA Experiment 20000535 PARAMETER Experiment Name: Zm_Hybrid_Seed_Dev_P Parameter: Tissue Value: Embryo vs. Unfert Floret
  misc_feature: MA Experiment ID: 20000626 Result: Down-regulated in Transcription
  misc_feature: MA Experiment 20000626 PARAMETER Experiment Name: Zm_Herbicide-Treatments_P Parameter: Timepoint (hr) Value: 12
  misc_feature: MA Experiment 20000626 PARAMETER Experiment Name: Zm_Herbicide-Treatments_P Parameter: Tissue Value: Aerial
  misc_feature: MA Experiment 20000626 PARAMETER Experiment Name: Zm_Herbicide-Treatments_P Parameter: Treatment Value: Roundup vs. No Treatment
  misc_feature: MA Experiment ID: 20000627 Result: Down-regulated in Transcription
  misc_feature: MA Experiment 20000627 PARAMETER Experiment Name: Zm_Herbicide-Treatments_P Parameter: Timepoint (hr) Value: 12
  misc_feature: MA Experiment 20000627 PARAMETER Experiment Name: Zm_Herbicide-Treatments_P Parameter: Tissue Value: Aerial
  misc_feature: MA Experiment 20000627 PARAMETER Experiment Name: Zm_Herbicide-Treatments_P Parameter: Treatment Value: Finale vs. No Treatment
  misc_feature: MA Experiment ID: 20000628 Result: Down-regulated in Transcription
  misc_feature: MA Experiment 20000628 PARAMETER Experiment Name: Zm_Herbicide-Treatments_P Parameter: Timepoint (hr) Value: 12
  misc_feature: MA Experiment 20000628 PARAMETER Experiment Name: Zm_Herbicide-Treatments_P Parameter: Tissue Value: Aerial
  misc_feature: MA Experiment 20000628 PARAMETER Experiment Name: Zm_Herbicide-Treatments_P Parameter: Treatment Value: Glean vs. No Treatment
  misc_feature: MA Experiment ID: 20000629 Result: Down-regulated in Transcription
  misc_feature: MA Experiment 20000629 PARAMETER Experiment Name: Zm_Herbicide-Treatments_P Parameter: Timepoint (hr) Value: 12
  misc_feature: MA Experiment 20000629 PARAMETER Experiment Name: Zm_Herbicide-Treatments_P Parameter: Tissue Value: Aerial
  misc_feature: MA Experiment 20000629 PARAMETER Experiment Name: Zm_Herbicide-Treatments_P Parameter: Treatment Value: Trimec vs. No Treatment
  misc_feature: MA Experiment ID: 20000630 Result: Up-regulated in Transcription
  misc_feature: MA Experiment 20000630 PARAMETER Experiment Name: Zm_Herbicide-Treatments_P Parameter: Timepoint (hr) Value: 4
  misc_feature: MA Experiment 20000630 PARAMETER Experiment Name: Zm_Herbicide-Treatments_P Parameter: Tissue Value: Aerial
  misc_feature: MA Experiment 20000630 PARAMETER Experiment Name: Zm_Herbicide-Treatments_P Parameter: Treatment Value: Roundup vs. No Treatment
actctcccgactcaggatttatacccacccccgtcggtcgatcccctccctccctcccgccgccgccgccgccgcccgtagccaagaccaagatcccgtctcgcccggcgtcgcacctgacctaaccctgagccctgtgatatgccggttcaggtcggaggcagcaaggtggcggacccgaggccggccagggtggtggacctatcgcccgtaggcgacaggtcccgcgcctcctccaagaagaaccgccgccgccacaagaaggccgacgccgcctcttccatctcgcccatgcagaggctcttcgacaccagcagggaggtcttcgccaactcctacccgggcttcgtcccgccgccggacgccgtcgcccgcctctcgggcctcctcaatgagctgaagcctcgtgacgtcagggttgccccaagcatgtccgtcttcaagcatgccgatcctacaagcccccctccagttacctatttgcacttctacggttcctccgagttttcgtttggtatcttctgtttaccgaaatcggcaattattcccctccacaaccatcctgggatgacagtgtttagcaagatactgtttggttccatgcacctcaagtcctatgattgggctaaaagtctgccggcgggtagcaacgataatgcacttgagaactctgatggagcaggagctcgtctggccaaggtgaacacagatgccgtttttgacgcttcatctgagaccgtagttctgtaccctgaaaatggagggaacttgcactgctttacggcgctgaccccttgtgccgtgctggatgtgatgggccctccctacaaccgtgctcaaggaagggattgcgcgtattacagcgaatcgccctactcgtgtgctggagatgcacaatattcttggctcaaagaggttcacagcacatttgagatggaaggcataaagatggagcccaacttcatcgtctaataattaagcaggcatggcatggcatgtcatcgtaatgctgctagtttcatgtagataatctctagctgcgggggtgtagtacaactggaagacggccagatgctcttttgacattcgtttgccttaatttcatatgcctccctttatgtatgttaacaattcgaatcttgggtcatggtcactttttttcc

SEQ ID NO: 3532 - protein, 276 aa, Zea mays subsp. mays
  peptide (1)..(276): Ceres Seq. ID no. 12352219
  misc_feature (52)..(243): Homolog of NCBI NO: 25370572 NR Description: hypothetical protein At2g42670 [imported] -
  misc_feature (49)..(246): Homolog of NCBI NO: 21618020 NR Description: unknown [Arabidopsis thaliana]
  misc_feature (52)..(243): Homolog of NCBI NO: 18406030 NR Description: expressed protein
  misc_feature (49)..(246): Homolog of NCBI NO: 18394617 NR Description: expressed protein
  misc_feature (51)..(250): Homolog of NCBI NO: 29244630 NR Description: hypothetical protein [Oryza sativa (japonica
  misc_feature (42)..(275): Homolog of NCBI NO: 34906308 NR Description: unnamed protein product [Oryza sativa (japonica
  misc_feature (38)..(244): Homolog of NCBI NO: 15242218 NR Description: putative protein; protein id: At5g15120.1
  misc_feature (26)..(258): Homolog of NCBI NO: 15242505 NR Description: putative protein
  misc_feature (26)..(258): Homolog of NCBI NO: 10176982 NR Description: contains similarity to unknown
  misc_feature (26)..(273): Homolog of NCBI NO: 34912166 NR Description: P0712E02.27 [Oryza sativa (japonica
MPVQVGGSKVADPRPARVVDLSPVGDRSRASSKKNRRRHKKADAASSISPMQRLFDTSREVFANSYPGFVPPPDAVARLSGLLNELKPRDVRVAPSMSVFKHADPTSPPPVTYLHFYGSSEFSFGIFCLPKSAIIPLHNHPGMTVFSKILFGSMHLKSYDWAKSLPAGSNDNALENSDGAGARLAKVNTDAVFDASSETVVLYPENGGNLHCFTALTPCAVLDVMGPPYNRAQGRDCAYYSESPYSCAGDAQYSWLKEVHSTFEMEGIKMEPNFIV

SEQ ID NO: 3533 - protein, 226 aa, Zea mays subsp. mays
  peptide (1)..(226): Ceres Seq. ID no. 12352220
  misc_feature (2)..(193): Homolog of NCBI NO: 25370572 NR Description: hypothetical protein At2g42670 [imported] -
  misc_feature (1)..(196): Homolog of NCBI NO: 21618020 NR Description: unknown [Arabidopsis thaliana]
  misc_feature (2)..(193): Homolog of NCBI NO: 18406030 NR Description: expressed protein
  misc_feature (1)..(196): Homolog of NCBI NO: 18394617 NR Description: expressed protein
  misc_feature (1)..(200): Homolog of NCBI NO: 29244630 NR Description: hypothetical protein [Oryza sativa (japonica
  misc_feature (1)..(225): Homolog of NCBI NO: 34906308 NR Description: unnamed protein product [Oryza sativa (japonica
  misc_feature (1)..(194): Homolog of NCBI NO: 15242218 NR Description: putative protein; protein id: At5g15120.1
  misc_feature (1)..(208): Homolog of NCBI NO: 15242505 NR Description: putative protein
  misc_feature (1)..(208): Homolog of NCBI NO: 10176982 NR Description: contains similarity to unknown
  misc_feature (1)..(223): Homolog of NCBI NO: 34912166 NR Description: P0712E02.27 [Oryza sativa (japonica
MQRLFDTSREVFANSYPGFVPPPDAVARLSGLLNELKPRDVRVAPSMSVFKHADPTSPPPVTYLHFYGSSEFSFGIFCLPKSAIIPLHNHPGMTVFSKILFGSMHLKSYDWAKSLPAGSNDNALENSDGAGARLAKVNTDAVFDASSETVVLYPENGGNLHCFTALTPCAVLDVMGPPYNRAQGRDCAYYSESPYSCAGDAQYSWLKEVHSTFEMEGIKMEPNFIV

SEQ ID NO: 3534 - protein, 180 aa, Zea mays subsp. mays
  peptide (1)..(180): Ceres Seq. ID no. 12352221
  misc_feature (1)..(147): Homolog of NCBI NO: 25370572 NR Description: hypothetical protein At2g42670 [imported] -
  misc_feature (1)..(150): Homolog of NCBI NO: 21618020 NR Description: unknown [Arabidopsis thaliana]
  misc_feature (1)..(147): Homolog of NCBI NO: 18406030 NR Description: expressed protein
  misc_feature (1)..(150): Homolog of NCBI NO: 18394617 NR Description: expressed protein
  misc_feature (1)..(154): Homolog of NCBI NO: 29244630 NR Description: hypothetical protein [Oryza sativa (japonica
  misc_feature (1)..(179): Homolog of NCBI NO: 34906308 NR Description: unnamed protein product [Oryza sativa (japonica
  misc_feature (1)..(148): Homolog of NCBI NO: 15242218 NR Description: putative protein; protein id: At5g15120.1
  misc_feature (1)..(162): Homolog of NCBI NO: 15242505 NR Description: putative protein
  misc_feature (1)..(162): Homolog of NCBI NO: 10176982 NR Description: contains similarity to unknown
  misc_feature (1)..(177): Homolog of NCBI NO: 34912166 NR Description: P0712E02.27 [Oryza sativa (japonica
MSVFKHADPTSPPPVTYLHFYGSSEFSFGIFCLPKSAIIPLHNHPGMTVFSKILFGSMHLKSYDWAKSLPAGSNDNALENSDGAGARLAKVNTDAVFDASSETVVLYPENGGNLHCFTALTPCAVLDVMGPPYNRAQGRDCAYYSESPYSCAGDAQYSWLKEVHSTFEMEGIKMEPNFIV

SEQ ID NO: 3535 - DNA, 901 bp, Zea mays subsp. mays
  misc_feature (1)..(901): Ceres Seq. ID no. 12351498
  misc_feature: MA Experiment ID: 108530 Result: Down-regulated in Transcription
  misc_feature: MA Experiment 108530 PARAMETER Experiment Name: Zm_Imbibed_Seeds_P Parameter: Age (day) Value: 6 vs. 2
  misc_feature: MA Experiment 108530 PARAMETER Experiment Name: Zm_Imbibed_Seeds_P Parameter: Organism Value: Zea mays
  misc_feature: MA Experiment 108530 PARAMETER Experiment Name: Zm_Imbibed_Seeds_P Parameter: Plant Line Value: 35A19
  misc_feature: MA Experiment 108530 PARAMETER Experiment Name: Zm_Imbibed_Seeds_P Parameter: Tissue Value: Aerial vs. Embryo
  misc_feature: MA Experiment ID: 108535 Result: Up-regulated in Transcription
  misc_feature: MA Experiment 108535 PARAMETER Experiment Name: Zm_Meristem_P Parameter: Age (day) Value: 8
  misc_feature: MA Experiment 108535 PARAMETER Experiment Name: Zm_Meristem_P Parameter: Organism Value: Zea mays
  misc_feature: MA Experiment 108535 PARAMETER Experiment Name: Zm_Meristem_P Parameter: Plant Line Value: 35A19
  misc_feature: MA Experiment 108535 PARAMETER Experiment Name: Zm_Meristem_P Parameter: Tissue Value: Root Meristem vs. Above Root Meristem
  misc_feature: MA Experiment ID: 108544 Result: Down-regulated in Transcription
  misc_feature: MA Experiment ID: 20000534 Result: Down-regulated in Transcription
  misc_feature: MA Experiment 20000534 PARAMETER Experiment Name: Zm_Hybrid_Pollen_P Parameter: Age (day) Value: 8
  misc_feature: MA Experiment 20000534 PARAMETER Experiment Name: Zm_Hybrid_Pollen_P Parameter: Organism Value: Zea mays
  misc_feature: MA Experiment 20000534 PARAMETER Experiment Name: Zm_Hybrid_Pollen_P Parameter: Plant Line Value: 35A19
  misc_feature: MA Experiment 20000534 PARAMETER Experiment Name: Zm_Hybrid_Pollen_P Parameter: Tissue Value: Pollen vs. Aerial
  misc_feature: MA Experiment ID: 20001612 Result: Up-regulated in Transcription
  misc_feature: MA Experiment 20001612 PARAMETER Experiment Name: Zm_50ppm_KNO3_L-to-H_P Parameter: Age (day) Value: 19
  misc_feature: MA Experiment 20001612 PARAMETER Experiment Name: Zm_50ppm_KNO3_L-to-H_P Parameter: Organism Value: Zea mays
  misc_feature: MA Experiment 20001612 PARAMETER Experiment Name: Zm_50ppm_KNO3_L-to-H_P Parameter: Plant Line Value: 35A19
  misc_feature: MA Experiment 20001612 PARAMETER Experiment Name: Zm_50ppm_KNO3_L-to-H_P Parameter: Timepoint (hr) Value: 8
  misc_feature: MA Experiment 20001612 PARAMETER Experiment Name: Zm_50ppm_KNO3_L-to-H_P Parameter: Tissue Value: Roots
  misc_feature: MA Experiment 20001612 PARAMETER Experiment Name: Zm_50ppm_KNO3_L-to-H_P Parameter: Treatment Value: 50ppm KNO3 vs. 50ppm KCl
ttccacttcacagcctctccgcctccgctcctcgcgccgccgccgcgtctcctcctgtacaggtaaggagaggaagagggcgaaatggtgaagcacaacaacgtcatccccaacgggcacttcaagaagcactggcagaactatgtcaagacatggttcaaccagcccgcccgcaagcagaggcgccgcatcgctcgtcaaaagaaggctgtgaagatattcccccgcccgactgctggtcctctacgccccattgttcaatgccagactttaaagtacaacatgaagtcaagggctgggagaggctttacccttgaggagctgaaggctgctggcatcccaaagaagcttgctccaaccattggtatttctgttgatcaccgccgcaagaacaaatcccttgagggactgcaggccaatgtccagaggcttaagacatacaaggccaagctggttatcttcccaaggcgtgcacacaaggttaaggctggtgactctactccagaggagcttgccaccgctacccaggtccagggtgactacatgccatttactcgtggtgagaaacgttcagttgaggttgtgaaggtcacagatgagatgaagtcatttgctgcctatggcaagctccgccttgagcggatgaacaagaaacatcttggtgcccgccagaagaaggcagctgaggcagagaaggaagataagaagtgaagcggttgaagatagtaccctgttttgttctattcagtcattagtgaatgctactacttaaagtgcttgttctatgttttttttgcggtaatggaaatagagcccagacaaacattttggtgtcctactgtttgatgccttgtacttgtttgcgaactcagctatctaatgggttattggattcttgctc

SEQ ID NO: 3536 - protein, 208 aa, Zea mays subsp. mays
  peptide (1)..(208): Ceres Seq. ID no. 12351499
  misc_feature (6)..(185): Pfam Name: Ribosomal protein L13e Pfam Description: Ribosomal protein L13e
  misc_feature (2)..(208): Homolog of NCBI NO: 15237847 NR Description: 60S ribosomal protein L13
  misc_feature (2)..(208): Homolog of NCBI NO: 7441102 NR Description: ribosomal protein L13.A, cytosolic - rape
  misc_feature (2)..(208): Homolog of NCBI NO: 730449 NR Description: 60S RIBOSOMAL PROTEIN L13-1 (COLD INDUCED PROTEIN
  misc_feature (2)..(208): Homolog of NCBI NO: 7441103 NR Description: ribosomal protein L13.B, cytosolic - rape
  misc_feature (1)..(208): Homolog of NCBI NO: 12580867 NR Description: 60S ribosomal protein L13E [Picea abies]
  misc_feature (2)..(208): Homolog of NCBI NO: 730450 NR Description: 60S RIBOSOMAL PROTEIN L13-2 (COLD INDUCED PROTEIN
  misc_feature (2)..(208): Homolog of NCBI NO: 21537149 NR Description: 60S ribosomal protein L13, BBC1 protein
  misc_feature (2)..(208): Homolog of NCBI NO: 15229064 NR Description: 60S ribosomal protein L13, BBC1 protein
  misc_feature (1)..(208): Homolog of NCBI NO: 18873677 NR Description: putative cold-induced protein
  misc_feature (1)..(208): Homolog of NCBI NO: 34897952 NR Description: ESTs AU077873(S1878),D40121(S1878) correspond to region of the predicted gene.~Similar to Arabidopsis thaliana 60S
MVKHNNVIPNGHFKKHWQNYVKTWFNQPARKQRRRIARQKKAVKIFPRPTAGPLRPIVQCQTLKYNMKSRAGRGFTLEELKAAGIPKKLAPTIGISVDHRRKNKSLEGLQANVQRLKTYKAKLVIFPRRAHKVKAGDSTPEELATATQVQGDYMPFTRGEKRSVEVVKVTDEMKSFAAYGKLRLERMNKKHLGARQKKAAEAEKEDKK

SEQ ID NO: 3537 - protein, 142 aa, Zea mays subsp. mays
  peptide (1)..(142): Ceres Seq. ID no. 12351500
  misc_feature (1)..(119): Pfam Name: Ribosomal protein L13e Pfam Description: Ribosomal protein L13e
  misc_feature (1)..(142): Homolog of NCBI NO: 34897952 NR Description: ESTs AU077873(S1878),D40121(S1878) correspond to region of the predicted gene.~Similar to Arabidopsis thaliana 60S
  misc_feature (1)..(142): Homolog of NCBI NO: 15237847 NR Description: 60S ribosomal protein L13
  misc_feature (1)..(142): Homolog of NCBI NO: 7441102 NR Description: ribosomal protein L13.A, cytosolic - rape
  misc_feature (1)..(142): Homolog of NCBI NO: 730449 NR Description: 60S RIBOSOMAL PROTEIN L13-1 (COLD INDUCED PROTEIN
  misc_feature (1)..(142): Homolog of NCBI NO: 7441103 NR Description: ribosomal protein L13.B, cytosolic - rape
  misc_feature (1)..(142): Homolog of NCBI NO: 12580867 NR Description: 60S ribosomal protein L13E [Picea abies]
  misc_feature (1)..(142): Homolog of NCBI NO: 730450 NR Description: 60S RIBOSOMAL PROTEIN L13-2 (COLD INDUCED PROTEIN
  misc_feature (1)..(142): Homolog of NCBI NO: 21537149 NR Description: 60S ribosomal protein L13, BBC1 protein
  misc_feature (1)..(142): Homolog of NCBI NO: 15229064 NR Description: 60S ribosomal protein L13, BBC1 protein
  misc_feature (1)..(142): Homolog of NCBI NO: 18873677 NR Description: putative cold-induced protein
MKSRAGRGFTLEELKAAGIPKKLAPTIGISVDHRRKNKSLEGLQANVQRLKTYKAKLVIFPRRAHKVKAGDSTPEELATATQVQGDYMPFTRGEKRSVEVVKVTDEMKSFAAYGKLRLERMNKKHLGARQKKAAEAEKEDKK

SEQ ID NO: 3538 - protein, 104 aa, Zea mays subsp. mays
  peptide (1)..(104): Ceres Seq. ID no. 12351501
PLHSLSASAPRAAAASPPVQVRRGRGRNGEAQQRHPQRALQEALAELCQDMVQPARPQAEAPHRSSKEGCEDIPPPDCWSSTPHCSMPDFKVQHEVKGWERLYP

SEQ ID NO: 3539 - DNA, 1524 bp, Zea mays subsp. mays
  misc_feature (1)..(1524): Ceres Seq. ID no. 12352222
  misc_feature: MA Experiment ID: 108504 Result: Down-regulated in Transcription
  misc_feature: MA Experiment 108504 PARAMETER Experiment Name: Zm_Drought_P Parameter: Age (day) Value: 8
  misc_feature: MA Experiment 108504 PARAMETER Experiment Name: Zm_Drought_P Parameter: Organism Value: Zea mays
  misc_feature: MA Experiment 108504 PARAMETER Experiment Name: Zm_Drought_P Parameter: Plant Line Value: 35A19
  misc_feature: MA Experiment 108504 PARAMETER Experiment Name: Zm_Drought_P Parameter: Timepoint (hr) Value: 12
  misc_feature: MA Experiment 108504 PARAMETER Experiment Name: Zm_Drought_P Parameter: Tissue Value: Aerial
  misc_feature: MA Experiment 108504 PARAMETER Experiment Name: Zm_Drought_P Parameter: Treatment Value: Drought vs. No Drought
  misc_feature: MA Experiment ID: 108522 Result: Down-regulated in Transcription
  misc_feature: MA Experiment 108522 PARAMETER Experiment Name: Zm_42deg_Heat_P Parameter: Age (day) Value: 8
  misc_feature: MA Experiment 108522 PARAMETER Experiment Name: Zm_42deg_Heat_P Parameter: Organism Value: Zea mays
  misc_feature: MA Experiment 108522 PARAMETER Experiment Name: Zm_42deg_Heat_P Parameter: Plant Line Value: 35A19
  misc_feature: MA Experiment 108522 PARAMETER Experiment Name: Zm_42deg_Heat_P Parameter: Temperature (deg C) Value: 42 vs. 22
  misc_feature: MA Experiment 108522 PARAMETER Experiment Name: Zm_42deg_Heat_P Parameter: Timepoint (hr) Value: 1
  misc_feature: MA Experiment 108522 PARAMETER Experiment Name: Zm_42deg_Heat_P Parameter: Tissue Value: Aerial
  misc_feature: MA Experiment ID: 108523 Result: Down-regulated in Transcription
  misc_feature: MA Experiment 108523 PARAMETER Experiment Name: Zm_42deg_Heat_P Parameter: Age (day) Value: 8
  misc_feature: MA Experiment 108523 PARAMETER Experiment Name: Zm_42deg_Heat_P Parameter: Organism Value: Zea mays
  misc_feature: MA Experiment 108523 PARAMETER Experiment Name: Zm_42deg_Heat_P Parameter: Plant Line Value: 35A19
  misc_feature: MA Experiment 108523 PARAMETER Experiment Name: Zm_42deg_Heat_P Parameter: Temperature (deg C) Value: 42 vs. 22
  misc_feature: MA Experiment 108523 PARAMETER Experiment Name: Zm_42deg_Heat_P Parameter: Timepoint (hr) Value: 6
  misc_feature: MA Experiment 108523 PARAMETER Experiment Name: Zm_42deg_Heat_P Parameter: Tissue Value: Aerial
  misc_feature: MA Experiment ID: 108528 Result: Up-regulated in Transcription
  misc_feature: MA Experiment 108528 PARAMETER Experiment Name: Zm_Imbibed_Seeds_P Parameter: Age (day) Value: 5 vs. 2
  misc_feature: MA Experiment 108528 PARAMETER Experiment Name: Zm_Imbibed_Seeds_P Parameter: Organism Value: Zea mays
  misc_feature: MA Experiment 108528 PARAMETER Experiment Name: Zm_Imbibed_Seeds_P Parameter: Plant Line Value: 35A19
  misc_feature: MA Experiment 108528 PARAMETER Experiment Name: Zm_Imbibed_Seeds_P Parameter: Tissue Value: Aerial vs. Embryo
  misc_feature: MA Experiment ID: 108540 Result: Down-regulated in Transcription
  misc_feature: MA Experiment 108540 PARAMETER Experiment Name: Zm_20percent_PEG_P Parameter: Age (day) Value: 8
  misc_feature: MA Experiment 108540 PARAMETER Experiment Name: Zm_20percent_PEG_P Parameter: Organism Value: Zea mays
  misc_feature: MA Experiment 108540 PARAMETER Experiment Name: Zm_20percent_PEG_P Parameter: Plant Line Value: 35A19
  misc_feature: MA Experiment 108540 PARAMETER Experiment Name: Zm_20percent_PEG_P Parameter: Timepoint (hr) Value: 6
  misc_feature: MA Experiment 108540 PARAMETER Experiment Name: Zm_20percent_PEG_P Parameter: Tissue Value: Aerial
  misc_feature: MA Experiment 108540 PARAMETER Experiment Name: Zm_20percent_PEG_P Parameter: Treatment Value: 20percent PEG vs. No Treatment
  misc_feature: MA Experiment ID: 108597 Result: Down-regulated in Transcription
  misc_feature: MA Experiment 108597 PARAMETER Experiment Name: Zm_100uM_ABA_P Parameter: Age (day) Value: 9
  misc_feature: MA Experiment 108597 PARAMETER Experiment Name: Zm_100uM_ABA_P Parameter: Organism Value: Zea mays
  misc_feature: MA Experiment 108597 PARAMETER Experiment Name: Zm_100uM_ABA_P Parameter: Plant Line Value: 35A19
  misc_feature: MA Experiment 108597 PARAMETER Experiment Name: Zm_100uM_ABA_P Parameter: Timepoint (hr) Value: 24
  misc_feature: MA Experiment 108597 PARAMETER Experiment Name: Zm_100uM_ABA_P Parameter: Tissue Value: Aerial
  misc_feature: MA Experiment 108597 PARAMETER Experiment Name: Zm_100uM_ABA_P Parameter: Treatment Value: 100uM ABA vs. No Treatment
  misc_feature: MA Experiment ID: 20000478 Result: Down-regulated in Transcription
  misc_feature: MA Experiment 20000478 PARAMETER Experiment Name: Zm_5mM_SA_P Parameter: Age (day) Value: 11
  misc_feature: MA Experiment 20000478 PARAMETER Experiment Name: Zm_5mM_SA_P Parameter: Organism Value: Zea mays
  misc_feature: MA Experiment 20000478 PARAMETER Experiment Name: Zm_5mM_SA_P Parameter: Plant Line Value: 35A19
  misc_feature: MA Experiment 20000478 PARAMETER Experiment Name: Zm_5mM_SA_P Parameter: Timepoint (hr) Value: 72
  misc_feature: MA Experiment 20000478 PARAMETER Experiment Name: Zm_5mM_SA_P Parameter: Tissue Value: Aerial
  misc_feature: MA Experiment 20000478 PARAMETER Experiment Name: Zm_5mM_SA_P Parameter: Treatment Value: 5mM SA vs. No Treatment
  misc_feature: MA Experiment ID: 20000626 Result: Down-regulated in Transcription
  misc_feature: MA Experiment 20000626 PARAMETER Experiment Name: Zm_Herbicide-Treatments_P Parameter: Timepoint (hr) Value: 12
  misc_feature: MA Experiment 20000626 PARAMETER Experiment Name: Zm_Herbicide-Treatments_P Parameter: Tissue Value: Aerial
  misc_feature: MA Experiment 20000626 PARAMETER Experiment Name: Zm_Herbicide-Treatments_P Parameter: Treatment Value: Roundup vs. No Treatment
  misc_feature: MA Experiment ID: 20000630 Result: Down-regulated in Transcription
  misc_feature: MA Experiment 20000630 PARAMETER Experiment Name: Zm_Herbicide-Treatments_P Parameter: Timepoint (hr) Value: 4
  misc_feature: MA Experiment 20000630 PARAMETER Experiment Name: Zm_Herbicide-Treatments_P Parameter: Tissue Value: Aerial
  misc_feature: MA Experiment 20000630 PARAMETER Experiment Name: Zm_Herbicide-Treatments_P Parameter: Treatment Value: Roundup vs. No Treatment
aggatacacctatctgcttctgctagctttctttacagagacgacaggatagctagagccgagggagagatcagggtcgacgatagatgggggtgcatggggctgttgccaaacgaccctgcagcaggcagcatctcctcctcctcgtcgtcgctattctcataggtagctacttcgccgccgccgccgccgccgctgcggacgagcagaaaagcaggaatagaggagctggtcgtcgcagccgcaggaggcgggccgcggcggcagtgacgtcgccgcctgcgcccctcatggtgcccatcaccatcctcgagtccgccgtcgacttgggagccgtgtgcatggacggaacaccgcctgcttaccacctgcacccgggctccggagcagggaacaacagctggatcgtcaacctggaggtgaacgggttttacttccgcgggcagcgcgtctgggacgccaccgtccggcacctcctctccatcgggatggccgctgcggaccaggtgttgctcgctggctgctccgccggcgggctggcggtcatactgcactgcgaccagttccaggccttcttccctcggtccaacaacgccgccgccgccggcggtaccaccaccactactaccgtcaagtgcctcgccgacgccggcctcttcctcgacgccatcgacgtctccggcgggcgcagccttcggtcctactactccgacatcgtggccatgcagggggtgggtcccaacctgccgccggcgtgcactgcccgtttggacaccgcctcgtgcttcttccctcagaacgtgatcgatggcgtaaacacccccatcttcctgctcaacgcagcgtacgacgcctggcagatacaggagagcctggcacccagcggagctgaccccagcggagcctggcgagcctgcaagtccaaccactctgcctgcgacgcgacccagatgaaattcctgcaaggtttcagggaccagatggtagcgtccgtgttgggcgggcgcttcgccggctccaggagcaacaacgggctcttcatcaactcctgcttcgcgcactgccagtccgagctgccggccacctggagctggagccacgcggcaggtgcctcccccgccatccaaagcagggggattgccaagtcagtgggcgactggtacttcggtcgagctcaagtcaaggcgatcgactgcccctacccctgcgacggaacatgccgcaacatcatatgatcacagacagacaggctcatgttgttgtaccctgtggctttgtgccgcacacgtcggccgtgtccgctgcagcttgcataactctcgtgggccactaaaagccgacggaattaattgattctcgtcggtggtcaacagaaattaattaaaccttgtccacaaagtcccatcggttctcaagaaccgacgagaattactaattttcgtcgatatattgcttattctcaggtgtgagaaatgttcccgtcattattcatcaagaatggcactcgacatgtgtgttttgccg

SEQ ID NO: 3540 - protein, 382 aa, Zea mays subsp. mays
  peptide (1)..(382): Ceres Seq. ID no. 12352223
  misc_feature (47)..(115): Pfam Name: Pectinacetylesterase Pfam Description: Pectinacetylesterase
  misc_feature (117)..(382): Homolog of NCBI NO: 30696158 NR Description: pectinacetylesterase, putative [Arabidopsis
  misc_feature (117)..(382): Homolog of NCBI NO: 25347293 NR Description: probable pectinacetylesterase precursor T8L23.6
  misc_feature (67)..(115): Homolog of NCBI NO: 18397406 NR Description: pectinacetylesterase, putative
  misc_feature (117)..(382): Homolog of NCBI NO: 18397406 NR Description: pectinacetylesterase, putative
  misc_feature (18)..(115): Homolog of NCBI NO: 28392968 NR Description: putative pectinacetylesterase [Arabidopsis
  misc_feature (111)..(382): Homolog of NCBI NO: 28392968 NR Description: putative pectinacetylesterase [Arabidopsis
  misc_feature (61)..(115): Homolog of NCBI NO: 15226462 NR Description: pectinacetylesterase, putative
  misc_feature (111)..(382): Homolog of NCBI NO: 15226462 NR Description: pectinacetylesterase, putative
  misc_feature (16)..(115): Homolog of NCBI NO: 34894654 NR Description: P0028G04.28 [Oryza sativa (japonica
  misc_feature (117)..(382): Homolog of NCBI NO: 34894654 NR Description: P0028G04.28 [Oryza sativa (japonica
MGVHGAVAKRPCSRQHLLLLVVAILIGSYFAAAAAAAADEQKSRNRGAGRRSRRRRAAAAVTSPPAPLMVPITILESAVDLGAVCMDGTPPAYHLHPGSGAGNNSWIVNLEVNGFYFRGQRVWDATVRHLLSIGMAAADQVLLAGCSAGGLAVILHCDQFQAFFPRSNNAAAAGGTTTTTTVKCLADAGLFLDAIDVSGGRSLRSYYSDIVAMQGVGPNLPPACTARLDTASCFFPQNVIDGVNTPIFLLNAAYDAWQIQESLAPSGADPSGAWRACKSNHSACDATQMKFLQGFRDQMVASVLGGRFAGSRSNNGLFINSCFAHCQSELPATWSWSHAAGASPAIQSRGIAKSVGDWYFGRAQVKAIDCPYPCDGTCRNII

SEQ ID NO: 3541 - protein, 314 aa, Zea mays subsp. mays
  peptide (1)..(314): Ceres Seq. ID no. 12352224
  misc_feature (49)..(300): Pfam Name: Pectinacetylesterase Pfam Description: Pectinacetylesterase
  misc_feature (49)..(314): Homolog of NCBI NO: 30696158 NR Description: pectinacetylesterase, putative [Arabidopsis
  misc_feature (49)..(314): Homolog of NCBI NO: 25347293 NR Description: probable pectinacetylesterase precursor T8L23.6
  misc_feature (1)..(47): Homolog of NCBI NO: 18397406 NR Description: pectinacetylesterase, putative
  misc_feature (49)..(314): Homolog of NCBI NO: 18397406 NR Description: pectinacetylesterase, putative
  misc_feature (1)..(47): Homolog of NCBI NO: 28392968 NR Description: putative pectinacetylesterase [Arabidopsis
  misc_feature (43)..(314): Homolog of NCBI NO: 28392968 NR Description: putative pectinacetylesterase [Arabidopsis
  misc_feature (1)..(47): Homolog of NCBI NO: 15226462 NR Description: pectinacetylesterase, putative
  misc_feature (43)..(314): Homolog of NCBI NO: 15226462 NR Description: pectinacetylesterase, putative
  misc_feature (1)..(47): Homolog of NCBI NO: 34894654 NR Description: P0028G04.28 [Oryza sativa (japonica
  misc_feature (49)..(314): Homolog of NCBI NO: 34894654 NR Description: P0028G04.28 [Oryza sativa (japonica
MVPITILESAVDLGAVCMDGTPPAYHLHPGSGAGNNSWIVNLEVNGFYFRGQRVWDATVRHLLSIGMAAADQVLLAGCSAGGLAVILHCDQFQAFFPRSNNAAAAGGTTTTTTVKCLADAGLFLDAIDVSGGRSLRSYYSDIVAMQGVGPNLPPACTARLDTASCFFPQNVIDGVNTPIFLLNAAYDAWQIQESLAPSGADPSGAWRACKSNHSACDATQMKFLQGFRDQMVASVLGGRFAGSRSNNGLFINSCFAHCQSELPATWSWSHAAGASPAIQSRGIAKSVGDWYFGRAQVKAIDCPYPCDGTCRNII

SEQ ID NO: 3542 - protein, 297 aa, Zea mays subsp. mays
  peptide (1)..(297): Ceres Seq. ID no. 12352225
  misc_feature (32)..(283): Pfam Name: Pectinacetylesterase Pfam Description: Pectinacetylesterase
  misc_feature (32)..(297): Homolog of NCBI NO: 30696158 NR Description: pectinacetylesterase, putative [Arabidopsis
  misc_feature (32)..(297): Homolog of NCBI NO: 25347293 NR Description: probable pectinacetylesterase precursor T8L23.6
  misc_feature (1)..(30): Homolog of NCBI NO: 18397406 NR Description: pectinacetylesterase, putative
  misc_feature (32)..(297): Homolog of NCBI NO: 18397406 NR Description: pectinacetylesterase, putative
  misc_feature (1)..(30): Homolog of NCBI NO: 28392968 NR Description: putative pectinacetylesterase [Arabidopsis
  misc_feature (26)..(297): Homolog of NCBI NO: 28392968 NR Description: putative pectinacetylesterase [Arabidopsis
  misc_feature (1)..(30): Homolog of NCBI NO: 15226462 NR Description: pectinacetylesterase, putative
  misc_feature (26)..(297): Homolog of NCBI NO: 15226462 NR Description: pectinacetylesterase, putative
  misc_feature (1)..(30): Homolog of NCBI NO: 34894654 NR Description: P0028G04.28 [Oryza sativa (japonica
  misc_feature (32)..(297): Homolog of NCBI NO: 34894654 NR Description: P0028G04.28 [Oryza sativa (japonica
MDGTPPAYHLHPGSGAGNNSWIVNLEVNGFYFRGQRVWDATVRHLLSIGMAAADQVLLAGCSAGGLAVILHCDQFQAFFPRSNNAAAAGGTTTTTTVKCLADAGLFLDAIDVSGGRSLRSYYSDIVAMQGVGPNLPPACTARLDTASCFFPQNVIDGVNTPIFLLNAAYDAWQIQESLAPSGADPSGAWRACKSNHSACDATQMKFLQGFRDQMVASVLGGRFAGSRSNNGLFINSCFAHCQSELPATWSWSHAAGASPAIQSRGIAKSVGDWYFGRAQVKAIDCPYPCDGTCRNII

SEQ ID NO: 3543 - DNA, 1736 bp, Zea mays subsp. mays
  misc_feature (1)..(1736): Ceres Seq. ID no. 12390518
  misc_feature: MA Experiment ID: 108546 Result: Down-regulated in Transcription
  misc_feature: MA Experiment 108546 PARAMETER Experiment Name: Zm_Imbibed_Seeds_P Parameter: Age (day) Value: 3 vs. 2
  misc_feature: MA Experiment 108546 PARAMETER Experiment Name: Zm_Imbibed_Seeds_P Parameter: Organism Value: Zea mays
  misc_feature: MA Experiment 108546 PARAMETER Experiment Name: Zm_Imbibed_Seeds_P Parameter: Plant Line Value: 35A19
  misc_feature: MA Experiment 108546 PARAMETER Experiment Name: Zm_Imbibed_Seeds_P Parameter: Tissue Value: Roots vs. Embryo
  misc_feature: MA Experiment ID: 108689 Result: Down-regulated in Transcription
  misc_feature: MA Experiment 108689 PARAMETER Experiment Name: Zm_Drought_Roots_P Parameter: Age (day) Value: 9
  misc_feature: MA Experiment 108689 PARAMETER Experiment Name: Zm_Drought_Roots_P Parameter: Organism Value: Zea mays
  misc_feature: MA Experiment 108689 PARAMETER Experiment Name: Zm_Drought_Roots_P Parameter: Plant Line Value: 35A19
  misc_feature: MA Experiment 108689 PARAMETER Experiment Name: Zm_Drought_Roots_P Parameter: Timepoint (hr) Value: 24
  misc_feature: MA Experiment 108689 PARAMETER Experiment Name: Zm_Drought_Roots_P Parameter: Tissue Value: Roots
  misc_feature: MA Experiment 108689 PARAMETER Experiment Name: Zm_Drought_Roots_P Parameter: Treatment Value: Drought vs. No Drought
aatgacaagctagaagattaccaggcattccccctcccccaaaatgattgcaacgacatcgcactgagtccaagtatcagagtaggatgatgtattcccctccgcgcaccgatcccgacagagaggaagagcagtgcttctcaatcggaagcatgcaagagggggttcagctctacagttctactggagatgctcaactaaatagaaatatgaacacaggcaagtgtttagaggatggcaaaaggaagggttctggagaggacagttcatcactacgttctctaggtgaaaccagtgcattgcagcgagaagtcagcatggagtgtgctgatgagaaggcgggtgatgctagaggccaagagagaggactacgtgcatgtccgggcaaagcgcggccaagccaccaacagccacaggccttgcagaaagatttcgaagggaaaagataaatgaaaggatgaagcttcttcaagaccttgtcccaggttgcaacaagattacaggcaaggccatgatgcttgatgagatcataaactatgtgcaatctctgcagcgacagattgagttcctttcgatgaagctctcagcgatcggccctgggctcaactgtgacctcgacctacaagatatcctctgcacacaagatgctagctctgcttttccaggatacaacctgcaaacgagcaatgtgcatattaatctgtacagagcatctgaagaaggtttctcacacaggaacaggatcatccctagtccagcaaatgttcacgtgacaagaaacgcccagctatctgcatttcctcagagaggagttatctggaacgaggagctttgcagcatcgcttcagatagaaatgctggtagcctgattcaatgaaagtggagtgacattgtggcaactgacaagccggcagtttaatggtgatcaactctgaaagtcttgacaagttgggttgctactgaggtgccttttcaagttgcagtggtagcacgacttctcttgggatgagctagttaacttttggtatttgagaggaattctggtgtgtccacccatcctgtacagttattagaataactaatcaaaggagtactgtgaaattcttgcgatctggtggagaaaatagtggacaattttcgtctggaatttctgacacaactgagttagtgctttggtggggtgtggctccacctaattatttaaaaaaaaaaaaaaaaaacggcacgagaagctttttttttttttttttcgaatatgcatatttttacatgttttttattcgcttttgtttatgttgaatcagaaactggatggtagaaagaaaataagcctctccagctgtcccatgagccatctatgtttctgggctctcttacagatttatattatgtgatgaactagagttcatatatcatatatgaggataagaacagtacagttgttgtactccaacaccatgaaaccaacagttgaccaactttatttattcctataagtatttgtagcagcagtgcgcatacgacatcccggccaccaactagcagctcaatcaaggagtgtattcggatgtggatcagccgcctagtacaacttgtagttcaggtccaatgcaagcgactagtagtatcaagtctcatcaacacaataacgacagaatgaatcgggcactagcctagaaagcattcataaactccgagcctgtacaccatctacagcctaaagactgacttgactc

SEQ ID NO: 3544 - protein, 166 aa, Zea mays subsp. mays
  peptide (1)..(166): Ceres Seq. ID no. 12390519
  misc_feature (15)..(59): Pfam Name: Helix-loop-helix DNA-binding domain Pfam Description: Helix-loop-helix DNA-binding domain
  misc_feature (15)..(102): Homolog of NCBI NO: 30688981 NR Description: bHLH protein family [Arabidopsis thaliana]
  misc_feature (15)..(154): Homolog of NCBI NO: 18423212 NR Description: Expressed protein
  misc_feature (15)..(96): Homolog of NCBI NO: 5923912 NR Description: bHLH transcription factor GBOF-1 [Tulipa
  misc_feature (15)..(121): Homolog of NCBI NO: 15222679 NR Description: bHLH protein; protein id: At1g26260.1
  misc_feature (15)..(93): Homolog of NCBI NO: 21539493 NR Description: unknown protein [Arabidopsis thaliana]
  misc_feature (15)..(93): Homolog of NCBI NO: 22329164 NR Description: bHLH protein
  misc_feature (15)..(93): Homolog of NCBI NO: 20127066 NR Description: putative bHLH transcription factor [Arabidopsis
  misc_feature (15)..(93): Homolog of NCBI NO: 7487656 NR Description: hypothetical protein T4L20.110 - Arabidopsis
  misc_feature (15)..(108): Homolog of NCBI NO: 28273388 NR Description: putative Helix-loop-helix DNA-binding domain
  misc_feature (15)..(143): Homolog of NCBI NO: 27311243 NR Description: Hypothetical protein [Oryza sativa (japonica
MSGQSAAKPPTATGLAERFRREKINERMKLLQDLVPGCNKITGKAMMLDEIINYVQSLQRQIEFLSMKLSAIGPGLNCDLDLQDILCTQDASSAFPGYNLQTSNVHINLYRASEEGFSHRNRIIPSPANVHVTRNAQLSAFPQRGVIWNEELCSIASDRNAGSLIQ

SEQ ID NO: 3545 - protein, 139 aa, Zea mays subsp. mays
  peptide (1)..(139): Ceres Seq. ID no. 12390520
  misc_feature (1)..(75): Homolog of NCBI NO: 30688981 NR Description: bHLH protein family [Arabidopsis thaliana]
  misc_feature (1)..(127): Homolog of NCBI NO: 18423212 NR Description: Expressed protein
  misc_feature (1)..(69): Homolog of NCBI NO: 5923912 NR Description: bHLH transcription factor GBOF-1 [Tulipa
  misc_feature (1)..(94): Homolog of NCBI NO: 15222679 NR Description: bHLH protein; protein id: At1g26260.1
  misc_feature (1)..(66): Homolog of NCBI NO: 21539493 NR Description: unknown protein [Arabidopsis thaliana]
  misc_feature (1)..(66): Homolog of NCBI NO: 22329164 NR Description: bHLH protein
  misc_feature (1)..(66): Homolog of NCBI NO: 20127066 NR Description: putative bHLH transcription factor [Arabidopsis
  misc_feature (1)..(66): Homolog of NCBI NO: 7487656 NR Description: hypothetical protein T4L20.110 - Arabidopsis
  misc_feature (1)..(81): Homolog of NCBI NO: 28273388 NR Description: putative Helix-loop-helix DNA-binding domain
  misc_feature (1)..(116): Homolog of NCBI NO: 27311243 NR Description: Hypothetical protein [Oryza sativa (japonica
MKLLQDLVPGCNKITGKAMMLDEIINYVQSLQRQIEFLSMKLSAIGPGLNCDLDLQDILCTQDASSAFPGYNLQTSNVHINLYRASEEGFSHRNRIIPSPANVHVTRNAQLSAFPQRGVIWNEELCSIASDRNAGSLIQ

SEQ ID NO: 3546 - protein, 121 aa, Zea mays subsp. mays
  peptide (1)..(121): Ceres Seq. ID no. 12390521
  misc_feature (1)..(57): Homolog of NCBI NO: 30688981 NR Description: bHLH protein family [Arabidopsis thaliana]
  misc_feature (1)..(109): Homolog of NCBI NO: 18423212 NR Description: Expressed protein
  misc_feature (1)..(51): Homolog of NCBI NO: 5923912 NR Description: bHLH transcription factor GBOF-1 [Tulipa
  misc_feature (1)..(76): Homolog of NCBI NO: 15222679 NR Description: bHLH protein; protein id: At1g26260.1
  misc_feature (1)..(48): Homolog of NCBI NO: 21539493 NR Description: unknown protein [Arabidopsis thaliana]
  misc_feature (1)..(48): Homolog of NCBI NO: 22329164 NR Description: bHLH protein
  misc_feature (1)..(48): Homolog of NCBI NO: 20127066 NR Description: putative bHLH transcription factor [Arabidopsis
  misc_feature (1)..(48): Homolog of NCBI NO: 7487656 NR Description: hypothetical protein T4L20.110 - Arabidopsis
  misc_feature (1)..(63): Homolog of NCBI NO: 28273388 NR Description: putative Helix-loop-helix DNA-binding domain
  misc_feature (1)..(98): Homolog of NCBI NO: 27311243 NR Description: Hypothetical protein [Oryza sativa (japonica
MMLDEIINYVQSLQRQIEFLSMKLSAIGPGLNCDLDLQDILCTQDASSAFPGYNLQTSNVHINLYRASEEGFSHRNRIIPSPANVHVTRNAQLSAFPQRGVIWNEELCSIASDRNAGSLIQ

SEQ ID NO: 3547 - DNA, 1466 bp, Zea mays subsp. mays
  misc_feature (1)..(1466): Ceres Seq. ID no. 12410153
  misc_feature: MA Experiment ID: 108543 Result: Down-regulated in Transcription
aacaaaaaaaaaaccctagaactccaaaaccttcagccccacgctatggccctcgcactgcgcctccgtcgggtcctcgcggcggcctccaccgcggcacccctgctccgcccgtccacctcggtcgcccggccttgcccgctcgttcccctcgcctccccggtcgcgccgctcccgctgccgccgtggcgattcctgcccggcggcggcgccgggttcaggtccacggcggcggcggctgcgcggggcgggaccgactatgggacggacgacagcaagatctcccccgacgagatcctcttcgagggctgcgactacaaccactggctcatcaccatggacttcccggaccccaagccgtcgcgcgaagagatgatcgagacatacctccagactctcgccaaggtcgtcgggagttatgaggaggccaagaagaggatgtatgcttttagtacgacgacttatgttggttttcaggctgtaatgaccgaggaaatgtcagaaaaatttcgcggtttgcctggagtagttttcattttgcctgattcatatctatatccagaaacaaaggagtacggaggagacaaatatgacaatggtgtcatcactccaagaccaccacctgttcattatagcagaccatcaagaactgacaggaaccgtaactaccgaggaaactaccaggatggccctccacagcaaggaaattaccagaacaaccgtcctccaccagaaggtggttaccagaacaacccgccgcagcaaggaaactaccagacataccgctcgcagcaagatggaagaggctatgccccacagcagaattatgcacaaggtggtcaggatggtagaggtttggaaggaatgattacacagaccgttcaggctacaatggaccacctgattttcgaagtcaaactcagtaccaagggcatgtaaatccagctgggcaaggtcaaggttacaacaacccccaagagcgtagcaacttctcgcaagggcagggaggaggttttaggcctggtggtccttcagcacctgggtcttatggccaaccatcagcacctggatcttatggtcaacctaatacacttggtaactatgggcaggtacctccatcagtgaatcctggtggtaacagagttcctggtgtgaatcctagttatggtggggatggcagacagggggctggaccagcatatggtggagataactggcaaagaggttctggtcagtatcctagcccaggtgaaggacaaggaaactggcaggtatgagagcatttgatatacacatttcacttttaaaatgccgttactgtttgaattgaaatacagcagtttaaagttaaaccgggacatcctttgtttgaccagttctagattgaattcgtaaactgtgtgccgagtttcagatgtacgactacagtttttctccctgttaaatgttttttagatttatgagct

SEQ ID NO: 3548 - protein, 312 aa, Zea mays subsp. mays
  peptide (1)..(312): Ceres Seq. ID no. 12410154
  misc_feature (186)..(288): Pfam Name: High molecular weight glutenin subunit Pfam Description: High molecular weight glutenin subunit
  misc_feature (90)..(279): Homolog of NCBI NO: 15235263 NR Description: DAG-like protein; protein id: At4g20020.1
  misc_feature (15)..(241): Homolog of NCBI NO: 34897972 NR Description: putative plastid protein [Oryza sativa (japonica
  misc_feature (96)..(221): Homolog of NCBI NO: 15230785 NR Description: DAG protein, putative; protein id: At3g06790.1
  misc_feature (21)..(288): Homolog of NCBI NO: 15241580 NR Description: unknown protein; protein id: At5g44780.1
  misc_feature (61)..(232): Homolog of NCBI NO: 21593052 NR Description: DAG protein, putative [Arabidopsis thaliana]
  misc_feature (36)..(245): Homolog of NCBI NO: 6014904 NR Description: DAG PROTEIN, CHLOROPLAST PRECURSOR
  misc_feature (61)..(232): Homolog of NCBI NO: 15220382 NR Description: DAG protein, putative
  misc_feature (96)..(221): Homolog of NCBI NO: 27754695 NR Description: putative DAG protein [Arabidopsis thaliana]
  misc_feature (28)..(241): Homolog of NCBI NO: 15226934 NR Description: unknown protein
  misc_feature (27)..(245): Homolog of NCBI NO: 38636775 NR Description: putative DAG protein [Oryza sativa (japonica
NKKKTLELQNLQPHAMALALRLRRVLAAASTAAPLLRPSTSVARPCPLVPLASPVAPLPLPPWRFLPGGGAGFRSTAAAAARGGTDYGTDDSKISPDEILFEGCDYNHWLITMDFPDPKPSREEMIETYLQTLAKVVGSYEEAKKRMYAFSTTTYVGFQAVMTEEMSEKFRGLPGVVFILPDSYLYPETKEYGGDKYDNGVITPRPPPVHYSRPSRTDRNRNYRGNYQDGPPQQGNYQNNRPPPEGGYQNNPPQQGNYQTYRSQQDGRGYAPQQNYAQGGQDGRGLEGMITQTVQATMDHLIFEVKLSTKGM

SEQ ID NO: 3549 - protein, 297 aa, Zea mays subsp. mays
  peptide (1)..(297): Ceres Seq. ID no. 12410155
  misc_feature (171)..(273): Pfam Name: High molecular weight glutenin subunit Pfam Description: High molecular weight glutenin subunit
  misc_feature (1)..(226): Homolog of NCBI NO: 34897972 NR Description: putative plastid protein [Oryza sativa (japonica
  misc_feature (13)..(226): Homolog of NCBI NO: 15226934 NR Description: unknown protein
  misc_feature (81)..(206): Homolog of NCBI NO: 15230785 NR Description: DAG protein, putative; protein id: At3g06790.1
  misc_feature (81)..(206): Homolog of NCBI NO: 27754695 NR Description: putative DAG protein [Arabidopsis thaliana]
  misc_feature (6)..(273): Homolog of NCBI NO: 15241580 NR Description: unknown protein; protein id: At5g44780.1
  misc_feature (46)..(217): Homolog of NCBI NO: 15220382 NR Description: DAG protein, putative
  misc_feature (46)..(217): Homolog of NCBI NO: 21593052 NR Description: DAG protein, putative [Arabidopsis thaliana]
  misc_feature (21)..(230): Homolog of NCBI NO: 6014904 NR Description: DAG PROTEIN, CHLOROPLAST PRECURSOR
  misc_feature (75)..(264): Homolog of NCBI NO: 15235263 NR Description: DAG-like protein; protein id: At4g20020.1
  misc_feature (12)..(230): Homolog of NCBI NO: 38636775 NR Description: putative DAG protein [Oryza sativa (japonica
MALALRLRRVLAAASTAAPLLRPSTSVARPCPLVPLASPVAPLPLPPWRFLPGGGAGFRSTAAAAARGGTDYGTDDSKISPDEILFEGCDYNHWLITMDFPDPKPSREEMIETYLQTLAKVVGSYEEAKKRMYAFSTTTYVGFQAVMTEEMSEKFRGLPGVVFILPDSYLYPETKEYGGDKYDNGVITPRPPPVHYSRPSRTDRNRNYRGNYQDGPPQQGNYQNNRPPPEGGYQNNPPQQGNYQTYRSQQDGRGYAPQQNYAQGGQDGRGLEGMITQTVQATMDHLIFEVKLSTKGM

SEQ ID NO: 3550 - protein, 200 aa, Zea mays subsp. mays
  peptide (1)..(200): Ceres Seq. ID no. 12410156
  misc_feature (74)..(176): Pfam Name: High molecular weight glutenin subunit Pfam Description: High molecular weight glutenin subunit
  misc_feature (1)..(129): Homolog of NCBI NO: 34897972 NR Description: putative plastid protein [Oryza sativa (japonica
  misc_feature (1)..(129): Homolog of NCBI NO: 15226934 NR Description: unknown protein
  misc_feature (1)..(109): Homolog of NCBI NO: 15230785 NR Description: DAG protein, putative; protein id: At3g06790.1
  misc_feature (1)..(109): Homolog of NCBI NO: 27754695 NR Description: putative DAG protein [Arabidopsis thaliana]
  misc_feature (1)..(176): Homolog of NCBI NO: 15241580 NR Description: unknown protein; protein id: At5g44780.1
  misc_feature (1)..(120): Homolog of NCBI NO: 15220382 NR Description: DAG protein, putative
  misc_feature (1)..(120): Homolog of NCBI NO: 21593052 NR Description: DAG protein, putative [Arabidopsis thaliana]
  misc_feature (1)..(133): Homolog of NCBI NO: 6014904 NR Description: DAG PROTEIN, CHLOROPLAST PRECURSOR
  misc_feature (1)..(167): Homolog of NCBI NO: 15235263 NR Description: DAG-like protein; protein id: At4g20020.1
  misc_feature (1)..(133): Homolog of NCBI NO: 38636775 NR Description: putative DAG protein [Oryza sativa (japonica
MDFPDPKPSREEMIETYLQTLAKVVGSYEEAKKRMYAFSTTTYVGFQAVMTEEMSEKFRGLPGVVFILPDSYLYPETKEYGGDKYDNGVITPRPPPVHYSRPSRTDRNRNYRGNYQDGPPQQGNYQNNRPPPEGGYQNNPPQQGNYQTYRSQQDGRGYAPQQNYAQGGQDGRGLEGMITQTVQATMDHLIFEVKLSTKGM

SEQ ID NO: 3551 - DNA, 1105 bp, Zea mays subsp. mays
  misc_feature (1)..(1105): Ceres Seq. ID no. 12410149
  misc_feature: MA Experiment ID: 108504 Result: Up-regulated in Transcription
  misc_feature: MA Experiment 108504 PARAMETER Experiment Name: Zm_Drought_P Parameter: Age (day) Value: 8
  misc_feature: MA Experiment 108504 PARAMETER Experiment Name: Zm_Drought_P Parameter: Organism Value: Zea mays
  misc_feature: MA Experiment 108504 PARAMETER Experiment Name: Zm_Drought_P Parameter: Plant Line Value: 35A19
  misc_feature: MA Experiment 108504 PARAMETER Experiment Name: Zm_Drought_P Parameter: Timepoint (hr) Value: 12
  misc_feature: MA Experiment 108504 PARAMETER Experiment Name: Zm_Drought_P Parameter: Tissue Value: Aerial
  misc_feature: MA Experiment 108504 PARAMETER Experiment Name: Zm_Drought_P Parameter: Treatment Value: Drought vs. No Drought
  misc_feature: MA Experiment ID: 108515 Result: Up-regulated in Transcription
  misc_feature: MA Experiment 108515 PARAMETER Experiment Name: Zm_2mM_SA_P Parameter: Age (day) Value: 8
  misc_feature: MA Experiment 108515 PARAMETER Experiment Name: Zm_2mM_SA_P Parameter: Organism Value: Zea mays
  misc_feature: MA Experiment 108515 PARAMETER Experiment Name: Zm_2mM_SA_P Parameter: Plant Line Value: 35A19
  misc_feature: MA Experiment 108515 PARAMETER Experiment Name: Zm_2mM_SA_P Parameter: Timepoint (hr) Value: 12
  misc_feature: MA Experiment 108515 PARAMETER Experiment Name: Zm_2mM_SA_P Parameter: Tissue Value: Aerial
  misc_feature: MA Experiment 108515 PARAMETER Experiment Name: Zm_2mM_SA_P Parameter: Treatment Value: 2mM SA vs. No Treatment
  misc_feature: MA Experiment ID: 108523 Result: Up-regulated in Transcription
  misc_feature: MA Experiment 108523 PARAMETER Experiment Name: Zm_42deg_Heat_P Parameter: Age (day) Value: 8
  misc_feature: MA Experiment 108523 PARAMETER Experiment Name: Zm_42deg_Heat_P Parameter: Organism Value: Zea mays
  misc_feature: MA Experiment 108523 PARAMETER Experiment Name: Zm_42deg_Heat_P Parameter: Plant Line Value: 35A19
  misc_feature: MA Experiment 108523 PARAMETER Experiment Name: Zm_42deg_Heat_P Parameter: Temperature (deg C) Value: 42 vs. 22
  misc_feature: MA Experiment 108523 PARAMETER Experiment Name: Zm_42deg_Heat_P Parameter: Timepoint (hr) Value: 6
  misc_feature: MA Experiment 108523 PARAMETER Experiment Name: Zm_42deg_Heat_P Parameter: Tissue Value: Aerial
  misc_feature: MA Experiment ID: 108527 Result: Up-regulated in Transcription
  misc_feature: MA Experiment 108527 PARAMETER Experiment Name: Zm_5mM_NO_P Parameter: Age (day) Value: 8
  misc_feature: MA Experiment 108527 PARAMETER Experiment Name: Zm_5mM_NO_P Parameter: Organism Value: Zea mays
  misc_feature: MA Experiment 108527 PARAMETER Experiment Name: Zm_5mM_NO_P Parameter: Plant Line Value: 35A19
  misc_feature: MA Experiment 108527 PARAMETER Experiment Name: Zm_5mM_NO_P Parameter: Timepoint (hr) Value: 6
  misc_feature: MA Experiment 108527 PARAMETER Experiment Name: Zm_5mM_NO_P Parameter: Tissue Value: Aerial
  misc_feature: MA Experiment 108527 PARAMETER Experiment Name: Zm_5mM_NO_P Parameter: Treatment Value: 5mM NO vs. No Treatment
  misc_feature: MA Experiment ID: 108534 Result: Up-regulated in Transcription
  misc_feature: MA Experiment 108534 PARAMETER Experiment Name: Zm_4deg_Cold_P Parameter: Age (hr) Value: 8
  misc_feature: MA Experiment 108534 PARAMETER Experiment Name: Zm_4deg_Cold_P Parameter: Organism Value: Zea mays
  misc_feature: MA Experiment 108534 PARAMETER Experiment Name: Zm_4deg_Cold_P Parameter: Plant Line Value: 35A19
  misc_feature: MA Experiment 108534 PARAMETER Experiment Name: Zm_4deg_Cold_P Parameter: Temperature (deg C) Value: 4 vs. 22
  misc_feature: MA Experiment 108534 PARAMETER Experiment Name: Zm_4deg_Cold_P Parameter: Timepoint (hr) Value: 6
  misc_feature: MA Experiment 108534 PARAMETER Experiment Name: Zm_4deg_Cold_P Parameter: Tissue Value: Aerial
  misc_feature: MA Experiment ID: 108535 Result: Up-regulated in Transcription
  misc_feature: MA Experiment 108535 PARAMETER Experiment Name: Zm_Meristem_P Parameter: Age (day) Value: 8
  misc_feature: MA Experiment 108535 PARAMETER Experiment Name: Zm_Meristem_P Parameter: Organism Value: Zea mays
  misc_feature: MA Experiment 108535 PARAMETER Experiment Name: Zm_Meristem_P Parameter: Plant Line Value: 35A19
  misc_feature: MA Experiment 108535 PARAMETER Experiment Name: Zm_Meristem_P Parameter: Tissue Value: Root Meristem vs. Above Root Meristem
  misc_feature: MA Experiment ID: 108543 Result: Up-regulated in Transcription
  misc_feature: MA Experiment ID: 108559 Result: Up-regulated in Transcription
  misc_feature: MA Experiment 108559 PARAMETER Experiment Name: Zm_5mM_NO_P Parameter: Age (day) Value: 8
  misc_feature: MA Experiment 108559 PARAMETER Experiment Name: Zm_5mM_NO_P Parameter: Organism Value: Zea mays
  misc_feature: MA Experiment 108559 PARAMETER Experiment Name: Zm_5mM_NO_P Parameter: Plant Line Value: 35A19
  misc_feature: MA Experiment 108559 PARAMETER Experiment Name: Zm_5mM_NO_P Parameter: Timepoint (hr) Value: 12
  misc_feature: MA Experiment 108559 PARAMETER Experiment Name: Zm_5mM_NO_P Parameter: Tissue Value: Aerial
  misc_feature: MA Experiment 108559 PARAMETER Experiment Name: Zm_5mM_NO_P Parameter: Treatment Value: 5mM NO vs. No Treatment
  misc_feature: MA Experiment ID: 20000478 Result: Down-regulated in Transcription
  misc_feature: MA Experiment 20000478 PARAMETER Experiment Name: Zm_5mM_SA_P Parameter: Age (day) Value: 11
  misc_feature: MA Experiment 20000478 PARAMETER Experiment Name: Zm_5mM_SA_P Parameter: Organism Value: Zea mays
  misc_feature: MA Experiment 20000478 PARAMETER Experiment Name: Zm_5mM_SA_P Parameter: Plant Line Value: 35A19
  misc_feature: MA Experiment 20000478 PARAMETER Experiment Name: Zm_5mM_SA_P Parameter: Timepoint (hr) Value: 72
  misc_feature: MA Experiment 20000478 PARAMETER Experiment Name: Zm_5mM_SA_P Parameter: Tissue Value: Aerial
  misc_feature: MA Experiment 20000478 PARAMETER Experiment Name: Zm_5mM_SA_P Parameter: Treatment Value: 5mM SA vs. No Treatment
  misc_feature: MA Experiment ID: 20000629 Result: Up-regulated in Transcription
  misc_feature: MA Experiment 20000629 PARAMETER Experiment Name: Zm_Herbicide-Treatments_P Parameter: Timepoint (hr) Value: 12
  misc_feature: MA Experiment 20000629 PARAMETER Experiment Name: Zm_Herbicide-Treatments_P Parameter: Tissue Value: Aerial
  misc_feature: MA Experiment 20000629 PARAMETER Experiment Name: Zm_Herbicide-Treatments_P Parameter: Treatment Value: Trimec vs. No Treatment
  misc_feature: MA Experiment ID: 20000633 Result: Up-regulated in Transcription
  misc_feature: MA Experiment 20000633 PARAMETER Experiment Name: Zm_Herbicide-Treatments_P Parameter: Timepoint (hr) Value: 4
  misc_feature: MA Experiment 20000633 PARAMETER Experiment Name: Zm_Herbicide-Treatments_P Parameter: Tissue Value: Aerial
  misc_feature: MA Experiment 20000633 PARAMETER Experiment Name: Zm_Herbicide-Treatments_P Parameter: Treatment Value: Trimec vs. No Treatment
agttccacttccaccaccgcggccgccgcgccctataaatggccgccatcggcagctgcactccggtaccaatccccgattccttacacgctaagccacgcaacgcaacgcaactagccatgacgatgaagtccagcagcggcggcggccatgtcatcggggtcccggtcacctccaaggcgcacgggatagaggaggtgtccagggatccgtccttcggcaagggcgccggcgatcacctcgccgtctcgttgacgcaccccagcccttacgcgtctttcggctacaagcacacaggcagcaaaggccaggtgacccactgggtgagcaagctgagcagaagggcgcagggcttcagagagcatgtgaccttgggggccgaagctgtcggagacggtgaaggggaagctgagcctgggcgcgcggatcctgcaggccggcggggtggagcgcgtgttccgccaggccttctccgccgccgacaagggcgagcggctgctcaaggcgctgcagtgctacatctacaccacgggcgggcccatcgccggcatgctcttcgtctccaccaggaaggtcgccttccgcagcgaccgccccatcaccgtcacctcccccggcggcggcggcgacacggcgcgggtcacctacaaggtggccatcccgctgcggaggatccgcagggtgcggcccagcgagaacgtccacaggcccgaggagaagtacatccacgtctccaccgtcgacggcttcgagttctggttcatgggcttcgtcagctaccagaggtcgtgcaagtacatgcagcaggccgtctcggagatgcgatgaccggtgtctgtatcgctgccccctgtcggaacgatgtgaagtgactaggatgttatgggtctcgcttcgccatcttttgtcgccaagcagccgtagctaaaaagattgccctgtctttaattttggatcggtgcaattgtgttccttccgcgtacgaatttggaccagcatctctgttgttcccaaagtggttgctctcgatctactagtacacatggaccgaaaaaattaaccatttgtgcatctttgttgaatgcaacagttctatgtgtttctg

SEQ ID NO: 3552 - protein, 277 aa, Zea mays subsp. mays
  peptide (1)..(277): Ceres Seq. ID no. 12410150
  misc_feature (31)..(127): Homolog of NCBI NO: 38344445 NR Description: OSJNBa0038O10.17 [Oryza sativa (japonica
MAAIGSCTPVPIPDSLHAKPRNATQLAMTMKSSSGGGHVIGVPVTSKAHGIEEVSRDPSFGKGAGDHLAVSLTHPSPYASFGYKHTGSKGQVTHWVSKLSRRAQGFREHVTLGAEAVGDGEGEAEPGRADPAGRRGGARVPPGLLRRRQGRAAAQGAAVLHLHHGRAHRRHALRLHQEGRLPQRPPHHRHLPRRRRRHGAGHLQGGHPAAEDPQGAAQRERPQARGEVHPRLHRRRLRVLVHGLRQLPEVVQVHAAGRLGDAMTGVCIAAPCRNDVK

SEQ ID NO: 3553 - protein, 250 aa, Zea mays subsp. mays
  peptide (1)..(250): Ceres Seq. ID no. 12410151
  misc_feature (4)..(100): Homolog of NCBI NO: 38344445 NR Description: OSJNBa0038O10.17 [Oryza sativa (japonica
MTMKSSSGGGHVIGVPVTSKAHGIEEVSRDPSFGKGAGDHLAVSLTHPSPYASFGYKHTGSKGQVTHWVSKLSRRAQGFREHVTLGAEAVGDGEGEAEPGRADPAGRRGGARVPPGLLRRRQGRAAAQGAAVLHLHHGRAHRRHALRLHQEGRLPQRPPHHRHLPRRRRRHGAGHLQGGHPAAEDPQGAAQRERPQARGEVHPRLHRRRLRVLVHGLRQLPEVVQVHAAGRLGDAMTGVCIAAPCRNDVK

SEQ ID NO: 3554 - protein, 248 aa, Zea mays subsp. mays
  peptide (1)..(248): Ceres Seq. ID no. 12410152
  misc_feature (2)..(98): Homolog of NCBI NO: 38344445 NR Description: OSJNBa0038O10.17 [Oryza sativa (japonica
MKSSSGGGHVIGVPVTSKAHGIEEVSRDPSFGKGAGDHLAVSLTHPSPYASFGYKHTGSKGQVTHWVSKLSRRAQGFREHVTLGAEAVGDGEGEAEPGRADPAGRRGGARVPPGLLRRRQGRAAAQGAAVLHLHHGRAHRRHALRLHQEGRLPQRPPHHRHLPRRRRRHGAGHLQGGHPAAEDPQGAAQRERPQARGEVHPRLHRRRLRVLVHGLRQLPEVVQVHAAGRLGDAMTGVCIAAPCRNDVK

SEQ ID NO: 3555 - DNA, 1448 bp, Zea mays subsp. mays
  misc_feature (1)..(1448): Ceres Seq. ID no. 12343332
  misc_feature: MA Experiment ID: 108559 Result: Up-regulated in Transcription
  misc_feature: MA Experiment 108559 PARAMETER Experiment Name: Zm_5mM_NO_P Parameter: Age (day) Value: 8
  misc_feature: MA Experiment 108559 PARAMETER Experiment Name: Zm_5mM_NO_P Parameter: Organism Value: Zea mays
  misc_feature: MA Experiment 108559 PARAMETER Experiment Name: Zm_5mM_NO_P Parameter: Plant Line Value: 35A19
  misc_feature: MA Experiment 108559 PARAMETER Experiment Name: Zm_5mM_NO_P Parameter: Timepoint (hr) Value: 12
  misc_feature: MA Experiment 108559 PARAMETER Experiment Name: Zm_5mM_NO_P Parameter: Tissue Value: Aerial
  misc_feature: MA Experiment 108559 PARAMETER Experiment Name: Zm_5mM_NO_P Parameter: Treatment Value: 5mM NO vs. No Treatment
  misc_feature: MA Experiment ID: 20000633 Result: Down-regulated in Transcription
  misc_feature: MA Experiment 20000633 PARAMETER Experiment Name: Zm_Herbicide-Treatments_P Parameter: Timepoint (hr) Value: 4
  misc_feature: MA Experiment 20000633 PARAMETER Experiment Name: Zm_Herbicide-Treatments_P Parameter: Tissue Value: Aerial
  misc_feature: MA Experiment 20000633 PARAMETER Experiment Name: Zm_Herbicide-Treatments_P Parameter: Treatment Value: Trimec vs. No Treatment
aacgagtctaaaccactgaaaaaaaggctcctgtatctcccatagtcccatcttcttgcagccgaagcaaagtgagggcggcgagatgaacggcggcggggaggacgggaagcagcagccgcacctggtactggcgcacaagctgttcctcctgtcgcactccgacgtcgacgacctcgccaaggtcgacctacgcgctgacgtgttcgcggcagtcaaatccgatgacatggcagctctgtacgagtcgttggcggcggacggcgtactggagacggacgcggcgctgctggccgagatgcgcgccaggatcgacgaggagatccggaagctcgacgagaagattgctgatgcagaggagaacttgggtgagagtgaagtgcgtgaggcccatctcgccaaatccttatatttcataagggttggggagaaggagaaagcactggagcagcttaaagttactgaaggaaaaactgtagctgttgggcaaaagatggaccttgttttctacacactacaaataggattgttctatatggactttgatctcatctcgaagtccattgacaaagcgaaaaacttgtttgaggaaggtggtgattgggaaaggaagaacagattgaaagtatatgaagggttgtactgcatggcaactagaaacttcaagaaagctgctagtttattcttggattcaatttcaactttcacgacatatgagctattcacatatgatacattcatcttctacacagtcctcacgagtgttatatctctggaccgtgtatctctgaaacaaaaggttgtagatgcacctgagatcttagccgtaattggcaaagtacctcacctctcagagtttctcaattccctctacaattgccagtacaagtcattttttattgcattctctggcttgactgaaccaatcaagttagagcgttacttgcagcctcattttcgctactacatgcgtgaagtgcgcactgttgtctactcacagtttctggaatcgtacaagagtgtgacaatggaagccatggctgctgcatttggcgttacagtcgactttatagaccaggaactgtcacgcttcattgccgctgggaagctccactgcaagatagacaaagttgctggcgtcttggaaacgaaccgacctgatgctaggaacgccttctaccaggcaaccatcaagcaaggagactttttgctgaaccgcatccagaagctgtcacgagttatcgacctgtaggggagagcccttcatgcaggagcttgccttggttcctggagtgtacgggcggtgcttgactttcaatgggtctcagttgaagaagcttttagggatatttgtgttctgagaaattgtgttctgcactttttagcctaactacatgaagccccaaaaaaaattcatggcgttgcttgtagacgtctcttcattgatg

SEQ ID NO: 3556 - protein, 388 aa, Zea mays subsp. mays
  peptide (1)..(388): Ceres Seq. ID no. 12343333
  misc_feature (253)..(357): Pfam Name: PCI domain Pfam Description: PCI domain
  misc_feature (1)..(388): Homolog of NCBI NO: 20978545 NR Description: 26S proteasome non-ATPase regulatory subunit 6
  misc_feature (1)..(388): Homolog of NCBI NO: 18416433 NR Description: 26S proteasome regulatory subunit (RPN7), protein id: At4g24820.1, supported by cDNA: 38927., supported by gi_15450839, supported by cDNA: gi_20259841 [Arabidopsis
  misc_feature (1)..(274): Homolog of NCBI NO: 7484780 NR Description: 26S proteasome regulatory particle chain RPN7
  misc_feature (157)..(388): Homolog of NCBI NO: 2982297 NR Description: KIAA0107-like protein [Picea mariana]
  misc_feature (6)..(388): Homolog of NCBI NO: 21313464 NR Description: RIKEN cDNA 2400006A19 [Mus musculus]
  misc_feature (6)..(388): Homolog of NCBI NO: 20978552 NR Description: 26S proteasome non-ATPase regulatory subunit 6 proteasome regulatory subunit S10) (p42A) putative KIAA0107 homologue [Mus musculus]
  misc_feature (6)..(388): Homolog of NCBI NO: 29436940 NR Description: Unknown (protein for MGC:56471) [Danio rerio]
  misc_feature (6)..(388): Homolog of NCBI NO: 7661914 NR Description: KIAA0107 gene product [Homo sapiens]
  misc_feature (6)..(388): Homolog of NCBI NO: 38454206 NR Description: Unknown (protein for MGC:72968) [Rattus >gi|37748489|gb|AAH59159.1| Unknown (protein for MGC:72968)
  misc_feature (6)..(388): Homolog of NCBI NO: 39795842 NR Description: Unknown (protein for MGC:76241) [Silurana
MNGGGEDGKQQPHLVLAHKLFLLSHSDVDDLAKVDLRADVFAAVKSDDMAALYESLAADGVLETDAALLAEMRARIDEEIRKLDEKIADAEENLGESEVREAHLAKSLYFIRVGEKEKALEQLKVTEGKTVAVGQKMDLVFYTLQIGLFYMDFDLISKSIDKAKNLFEEGGDWERKNRLKVYEGLYCMATRNFKKAASLFLDSISTFTTYELFTYDTFIFYTVLTSVISLDRVSLKQKVVDAPEILAVIGKVPHLSEFLNSLYNCQYKSFFIAFSGLTEPIKLERYLQPHFRYYMREVRTVVYSQFLESYKSVTMEAMAAAFGVTVDFIDQELSRFIAAGKLHCKIDKVAGVLETNRPDARNAFYQATIKQGDFLLNRIQKLSRVIDL

SEQ ID NO: 3557 - protein, 340 aa, Zea mays subsp. mays
  peptide (1)..(340): Ceres Seq. ID no. 12343334
  misc_feature (205)..(309): Pfam Name: PCI domain Pfam Description: PCI domain
  misc_feature (1)..(340): Homolog of NCBI NO: 20978545 NR Description: 26S proteasome non-ATPase regulatory subunit 6
  misc_feature (1)..(340): Homolog of NCBI NO: 18416433 NR Description: 26S proteasome regulatory subunit (RPN7), protein id: At4g24820.1, supported by cDNA: 38927., supported by gi_15450839, supported by cDNA: gi_20259841 [Arabidopsis
  misc_feature (1)..(226): Homolog of NCBI NO: 7484780 NR Description: 26S proteasome regulatory particle chain RPN7
  misc_feature (109)..(340): Homolog of NCBI NO: 2982297 NR Description: KIAA0107-like protein [Picea mariana]
  misc_feature (1)..(340): Homolog of NCBI NO: 21313464 NR Description: RIKEN cDNA 2400006A19 [Mus musculus]
  misc_feature (1)..(340): Homolog of NCBI NO: 20978552 NR Description: 26S proteasome non-ATPase regulatory subunit 6 proteasome regulatory subunit S10) (p42A) putative KIAA0107 homologue [Mus musculus]
  misc_feature (1)..(340): Homolog of NCBI NO: 29436940 NR Description: Unknown (protein for MGC:56471) [Danio rerio]
  misc_feature (1)..(340): Homolog of NCBI NO: 7661914 NR Description: KIAA0107 gene product [Homo sapiens]
  misc_feature (1)..(340): Homolog of NCBI NO: 38454206 NR Description: Unknown (protein for MGC:72968) [Rattus >gi|37748489|gb|AAH59159.1| Unknown (protein for MGC:72968)
  misc_feature (1)..(340): Homolog of NCBI NO: 39795842 NR Description: Unknown (protein for MGC:76241) [Silurana
MAALYESLAADGVLETDAALLAEMRARIDEEIRKLDEKIADAEENLGESEVREAHLAKSLYFIRVGEKEKALEQLKVTEGKTVAVGQKMDLVFYTLQIGLFYMDFDLISKSIDKAKNLFEEGGDWERKNRLKVYEGLYCMATRNFKKAASLFLDSISTFTTYELFTYDTFIFYTVLTSVISLDRVSLKQKVVDAPEILAVIGKVPHLSEFLNSLYNCQYKSFFIAFSGLTEPIKLERYLQPHFRYYMREVRTVVYSQFLESYKSVTMEAMAAAFGVTVDFIDQELSRFIAAGKLHCKIDKVAGVLETNRPDARNAFYQATIKQGDFLLNRIQKLSRVIDL

SEQ ID NO: 3558 - protein, 317 aa, Zea mays subsp. mays
  peptide (1)..(317): Ceres Seq. ID no. 12343335
  misc_feature (182)..(286): Pfam Name: PCI domain Pfam Description: PCI domain
  misc_feature (1)..(317): Homolog of NCBI NO: 20978545 NR Description: 26S proteasome non-ATPase regulatory subunit 6
  misc_feature (1)..(317): Homolog of NCBI NO: 18416433 NR Description: 26S proteasome regulatory subunit (RPN7), protein id: At4g24820.1, supported by cDNA: 38927., supported by gi_15450839, supported by cDNA: gi_20259841 [Arabidopsis
  misc_feature (1)..(203): Homolog of NCBI NO: 7484780 NR Description: 26S proteasome regulatory particle chain RPN7
  misc_feature (86)..(317): Homolog of NCBI NO: 2982297 NR Description: KIAA0107-like protein [Picea mariana]
  misc_feature (1)..(317): Homolog of NCBI NO: 21313464 NR Description: RIKEN cDNA 2400006A19 [Mus musculus]
  misc_feature (1)..(317): Homolog of NCBI NO: 20978552 NR Description: 26S proteasome non-ATPase regulatory subunit 6 proteasome regulatory subunit S10) (p42A) putative KIAA0107 homologue [Mus musculus]
  misc_feature (1)..(317): Homolog of NCBI NO: 29436940 NR Description: Unknown (protein for MGC:56471) [Danio rerio]
  misc_feature (1)..(317): Homolog of NCBI NO: 7661914 NR Description: KIAA0107 gene product [Homo sapiens]
  misc_feature (1)..(317): Homolog of NCBI NO: 38454206 NR Description: Unknown (protein for MGC:72968) [Rattus >gi|37748489|gb|AAH59159.1| Unknown (protein for MGC:72968)
  misc_feature (1)..(317): Homolog of NCBI NO: 39795842 NR Description: Unknown (protein for MGC:76241) [Silurana
MRARIDEEIRKLDEKIADAEENLGESEVREAHLAKSLYFIRVGEKEKALEQLKVTEGKTVAVGQKMDLVFYTLQIGLFYMDFDLISKSIDKAKNLFEEGGDWERKNRLKVYEGLYCMATRNFKKAASLFLDSISTFTTYELFTYDTFIFYTVLTSVISLDRVSLKQKVVDAPEILAVIGKVPHLSEFLNSLYNCQYKSFFIAFSGLTEPIKLERYLQPHFRYYMREVRTVVYSQFLESYKSVTMEAMAAAFGVTVDFIDQELSRFIAAGKLHCKIDKVAGVLETNRPDARNAFYQATIKQGDFLLNRIQKLSRVIDL

SEQ ID NO: 3559 - DNA, 1535 bp, Zea mays subsp. mays
  misc_feature (1)..(1535): Ceres Seq. ID no. 12410145
  misc_feature: MA Experiment ID: 108535 Result: Up-regulated in Transcription
  misc_feature: MA Experiment 108535 PARAMETER Experiment Name: Zm_Meristem_P Parameter: Age (day) Value: 8
  misc_feature: MA Experiment 108535 PARAMETER Experiment Name: Zm_Meristem_P Parameter: Organism Value: Zea mays
  misc_feature: MA Experiment 108535 PARAMETER Experiment Name: Zm_Meristem_P Parameter: Plant Line Value: 35A19
  misc_feature: MA Experiment 108535 PARAMETER Experiment Name: Zm_Meristem_P Parameter: Tissue Value: Root Meristem vs. Above Root Meristem
  misc_feature: MA Experiment ID: 108543 Result: Up-regulated in Transcription
gcacggcacacatcatcctagcaaacgtccttatccggctacaactttcgcgacgtctgcgacatcagaaaactgagctcgccccctcttgccttccctcctccgccggaccgctgctgtccgcctccaaccctccagttcgacgcaggcggcgacggcggcgcgccgagatgaaggtctccgtgaagacgctcaagggatctagcttccagatcgaagtggagcccaccgacaaggttgctgctgtgaaaaaggtcatagagaatatgcaagagcaggcttcctatccagctgaccaacaagtccttatacatcaaggaaaggtgctcagcgatgacaccacattagaggaaaatcaagtgactgagaataatttccttgttataatgctcagacagaacaagggatcatcaagtgcagcaccggctaagacaactgcgaatcaggcacctcctactcagacagtgcctgttgttccacctcaaacgtcagcagccccagctgcaccagcacctattgtacctgtcagtgcactggctgcaactgctacagcctcagcagctcctgctgttgctgtatccaccgaggcagatagttatggtcaggctgcctcaaacctagttgctggcagcaacttggaaggaacaattcaatccattcttgaaatgggtggcgggatatgggacagagacactgtactacgtgccctgcgggttgcgtataacaacccagagcgcgctgttgagtacttatattctgggattcctgaacaaatggatgttcctacatcacctccgagtatccagccagtcaatcctgtccaggctgcacaagcagctcaaactgcagctccatctggaccaaatgctaaccctctagacctctttccccaatctcttccgaatgcttccgccaatgctggcacaggaaaccttgatgttttgcgcaataacgtacaattccaaaacctgcttggtttggtgcaggctaatcctcagattttgcagccattgcttcaagaattgggtaaacaaaatccccaggttatgcagctaatccaggaaaaccaagcagagttcatgcggatgatcaatgaaccacttgagggagacgaagagaatgaaatgatgctggaccagatggcggatgcagctgagaccattgcagtgactccagaggagaacgaagctatacttcgtcttgaagggatgggctttgaccgggcactggtcctggaagtgttcttcgcgtgcaacaagaatgagcagctgaccgccaactacctcttggatcacatgcacgagttcgacaacgatgacgggctcggagggccaccgctatgagggcgctctcgatccctacatcatgcgaacgaaggctgtagggcagtagtaggaaaacgttttgggattcgtcccgtctgttcgctcactctacatattcgtttggctttgctgtttagtacagaatttctagatttacggacttactacttgatatcctgatatagaggtcacggccaagcttactttttc

SEQ ID NO: 3560 - protein, 446 aa, Zea mays subsp. mays
  peptide (1)..(446): Ceres Seq. ID no. 12410146
  misc_feature (57)..(134): Pfam Name: Ubiquitin family Pfam Description: Ubiquitin family
  misc_feature (57)..(437): Homolog of NCBI NO: 30409722 NR Description: RAD23-like protein [Arabidopsis thaliana]
  misc_feature (57)..(437): Homolog of NCBI NO: 30409718 NR Description: RAD23-like protein [Arabidopsis thaliana]
  misc_feature (57)..(437): Homolog of NCBI NO: 30699439 NR Description: DNA repair protein RAD23 -related [Arabidopsis
  misc_feature (57)..(437): Homolog of NCBI NO: 15221013 NR Description: hypothetical protein; protein id: At1g16190.1
  misc_feature (136)..(438): Homolog of NCBI NO: 38175472 NR Description: putative osRAD23 [Oryza sativa (japonica
  misc_feature (57)..(436): Homolog of NCBI NO: 7446459 NR Description: RAD23 protein, isoform I - carrot
  misc_feature (57)..(436): Homolog of NCBI NO: 5640111 NR Description: RAD23 protein [Lycopersicon esculentum]
  misc_feature (57)..(437): Homolog of NCBI NO: 14335004 NR Description: unknown protein [Arabidopsis thaliana]
  misc_feature (57)..(437): Homolog of NCBI NO: 15240922 NR Description: DNA repair protein RAD23 homolog
  misc_feature (57)..(445): Homolog of NCBI NO: 7446462 NR Description: RAD23 protein homolog - rice
TAHIILANVLIRLQLSRRLRHQKTELAPSCLPSSAGPLLSASNPPVRRRRRRRRAEMKVSVKTLKGSSFQIEVEPTDKVAAVKKVIENMQEQASYPADQQVLIHQGKVLSDDTTLEENQVTENNFLVIMLRQNKGSSSAAPAKTTANQAPPTQTVPVVPPQTSAAPAAPAPIVPVSALAATATASAAPAVAVSTEADSYGQAASNLVAGSNLEGTIQSILEMGGGIWDRDTVLRALRVAYNNPERAVEYLYSGIPEQMDVPTSPPSIQPVNPVQAAQAAQTAAPSGPNANPLDLFPQSLPNASANAGTGNLDVLRNNVQFQNLLGLVQANPQILQPLLQELGKQNPQVMQLIQENQAEFMRMINEPLEGDEENEMMLDQMADAAETIAVTPEENEAILRLEGMGFDRALVLEVFFACNKNEQLTANYLLDHMHEFDNDDGLGGPPL

SEQ ID NO: 3561 - protein, 390 aa, Zea mays subsp. mays
  peptide (1)..(390): Ceres Seq. ID no. 12410147
  misc_feature (1)..(78): Pfam Name: Ubiquitin family Pfam Description: Ubiquitin family
  misc_feature (1)..(381): Homolog of NCBI NO: 30409722 NR Description: RAD23-like protein [Arabidopsis thaliana]
  misc_feature (1)..(381): Homolog of NCBI NO: 30409718 NR Description: RAD23-like protein [Arabidopsis thaliana]
  misc_feature (1)..(381): Homolog of NCBI NO: 30699439 NR Description: DNA repair protein RAD23 -related [Arabidopsis
  misc_feature (1)..(381): Homolog of NCBI NO: 15221013 NR Description: hypothetical protein; protein id: At1g16190.1
  misc_feature (80)..(382): Homolog of NCBI NO: 38175472 NR Description: putative osRAD23 [Oryza sativa (japonica
  misc_feature (1)..(380): Homolog of NCBI NO: 7446459 NR Description: RAD23 protein, isoform I - carrot
  misc_feature (1)..(380): Homolog of NCBI NO: 5640111 NR Description: RAD23 protein [Lycopersicon esculentum]
  misc_feature (1)..(381): Homolog of NCBI NO: 14335004 NR Description: unknown protein [Arabidopsis thaliana]
  misc_feature (1)..(381): Homolog of NCBI NO: 15240922 NR Description: DNA repair protein RAD23 homolog
  misc_feature (1)..(389): Homolog of NCBI NO: 7446462 NR Description: RAD23 protein homolog - rice
MKVSVKTLKGSSFQIEVEPTDKVAAVKKVIENMQEQASYPADQQVLIHQGKVLSDDTTLEENQVTENNFLVIMLRQNKGSSSAAPAKTTANQAPPTQTVPVVPPQTSAAPAAPAPIVPVSALAATATASAAPAVAVSTEADSYGQAASNLVAGSNLEGTIQSILEMGGGIWDRDTVLRALRVAYNNPERAVEYLYSGIPEQMDVPTSPPSIQPVNPVQAAQAAQTAAPSGPNANPLDLFPQSLPNASANAGTGNLDVLRNNVQFQNLLGLVQANPQILQPLLQELGKQNPQVMQLIQENQAEFMRMINEPLEGDEENEMMLDQMADAAETIAVTPEENEAILRLEGMGFDRALVLEVFFACNKNEQLTANYLLDHMHEFDNDDGLGGPPL

SEQ ID NO: 3562 - protein, 358 aa, Zea mays subsp. mays
  peptide (1)..(358): Ceres Seq. ID no. 12410148
  misc_feature (123)..(165): Pfam Name: UBA/TS-N domain Pfam Description: UBA/TS-N domain
  misc_feature (1)..(357): Homolog of NCBI NO: 7446462 NR Description: RAD23 protein homolog - rice
  misc_feature (1)..(349): Homolog of NCBI NO: 30409722 NR Description: RAD23-like protein [Arabidopsis thaliana]
  misc_feature (1)..(349): Homolog of NCBI NO: 30409718 NR Description: RAD23-like protein [Arabidopsis thaliana]
  misc_feature (1)..(349): Homolog of NCBI NO: 30699439 NR Description: DNA repair protein RAD23 -related [Arabidopsis
  misc_feature (1)..(349): Homolog of NCBI NO: 15221013 NR Description: hypothetical protein; protein id: At1g16190.1
  misc_feature (48)..(350): Homolog of NCBI NO: 38175472 NR Description: putative osRAD23 [Oryza sativa (japonica
  misc_feature (1)..(348): Homolog of NCBI NO: 7446459 NR Description: RAD23 protein, isoform I - carrot
  misc_feature (1)..(348): Homolog of NCBI NO: 5640111 NR Description: RAD23 protein [Lycopersicon esculentum]
  misc_feature (1)..(349): Homolog of NCBI NO: 14335004 NR Description: unknown protein [Arabidopsis thaliana]
  misc_feature (1)..(349): Homolog of NCBI NO: 15240922 NR Description: DNA repair protein RAD23 homolog
MQEQASYPADQQVLIHQGKVLSDDTTLEENQVTENNFLVIMLRQNKGSSSAAPAKTTANQAPPTQTVPVVPPQTSAAPAAPAPIVPVSALAATATASAAPAVAVSTEADSYGQAASNLVAGSNLEGTIQSILEMGGGIWDRDTVLRALRVAYNNPERAVEYLYSGIPEQMDVPTSPPSIQPVNPVQAAQAAQTAAPSGPNANPLDLFPQSLPNASANAGTGNLDVLRNNVQFQNLLGLVQANPQILQPLLQELGKQNPQVMQLIQENQAEFMRMINEPLEGDEENEMMLDQMADAAETIAVTPEENEAILRLEGMGFDRALVLEVFFACNKNEQLTANYLLDHMHEFDNDDGLGGPPL

SEQ ID NO: 3563 - DNA, 1486 bp, Zea mays subsp. mays
  misc_feature (1)..(1486): Ceres Seq. ID no. 12406450
  misc_feature: MA Experiment ID: 20000535 Result: Down-regulated in Transcription
  misc_feature: MA Experiment 20000535 PARAMETER Experiment Name: Zm_Hybrid_Seed_Dev_P Parameter: DAP Value: 30 vs. 12
  misc_feature: MA Experiment 20000535 PARAMETER Experiment Name: Zm_Hybrid_Seed_Dev_P Parameter: Organism Value: Zea mays
  misc_feature: MA Experiment 20000535 PARAMETER Experiment Name: Zm_Hybrid_Seed_Dev_P Parameter: Plant Line Value: 35A19
  misc_feature: MA Experiment 20000535 PARAMETER Experiment Name: Zm_Hybrid_Seed_Dev_P Parameter: Tissue Value: Embryo vs. Unfert Floret
actagctccactccaccacacacaccgcgcagctagctgtcaccggagcaagaaggaagaaaaaccagcggcaccgatcgatcgacgacacgcgcgcgatcgaggtgaggagcgaaagaaaaggtggccttttcgaagccgccggacggagtgtagcgctagctagctccccaggccggagaggaggatggtgggacgaggagcggcgacggccctcgtgtgggcggcggtggtggcggtcgcgacggtggtgtcgcgggcgcagcagctgcaggtggggttctacgacacgctgtgcccggcggcggagatcatcgtgcaggaggaggtgagcaaggcggcgtccggcaaccccggcgtcgccgcgggcctcctgcgcctccacttccacgactgcttcgtcagggggtgcgacgcgtcggtgctgctggactcgtcggcgggcaaccaggcggagaaggacgcggcgcccaacgccagcctgcgcgggttcgaggtcatcgacagcgccaagacgcggctggagcaggcctgcttcggcgtcgtctcctgcgccgacgtcctcgccttcgccgcccgcgacgccctcgcgctggtcgggggcgacgcgtaccaggtgccggcggggcggagggacggcaacgtctcctcggcgcaggaggcgggcgcgaacctgccgccgccgacggcgagcgcgagccagctgacgcaggcgttcggcgccaaggggctgagccaggccgagatggtggcgctgtcgggggcgcacacggtgggcgcggcgcgctgcagctccttcgcgccccgcctctactcgtacgggcccagcggcgcggggcaggacccgtccatggaccccgcgtacctggcggcgctggcgcagcagtgcccgccgcaggggaccggcgccgccgacccgcccctccccatggaccccgtcacgcccaccgccttcgacaccaactactacgccaacctggtcgccaggcgcggcctgctcgcctccgaccaggcgctgctcgccgacccggccaccgccgcgcaggtgctcgcctacaccaacagccccgccaccttccagaccgacttcgtcgccgccatgatcaagatgggtgccatacaggtgctcaaccggcacagccggcaccgtccggaccaactgcagggtggctagctagctagctcatccatgagaatgtacctgtanactcatgtgcttaaaatcatacgacgaaactgtacgtacggcgtagagtggtgtggcggggtccaatgattcagattgtacgtacgtgtccatcgatccaactgtagttgtgtacgcagtacagtacgtgctagctacggatcagttgcttatatatagcttgtgcgtttttttacactttcttttgtccttttggtttataatttttattaagatatacaaatatttctcttcagattcggatcgaatacaaatattaaaaatggttcgttctttttc

SEQ ID NO: 3564 - protein, 328 aa, Zea mays subsp. mays
  peptide (1)..(328): Ceres Seq. ID no. 12406451
  misc_feature (44)..(293): Pfam Name: Peroxidase Pfam Description: Peroxidase
  misc_feature (28)..(313): Homolog of NCBI NO: 12056448 NR Description: peroxidase [Zea mays]
  misc_feature (1)..(314): Homolog of NCBI NO: 34894758 NR Description: putative peroxidase [Oryza sativa (japonica
  misc_feature (10)..(313): Homolog of NCBI NO: 34894766 NR Description: putative peroxidase [Oryza sativa (japonica
  misc_feature (13)..(314): Homolog of NCBI NO: 4760702 NR Description: peroxidase 2 [Scutellaria baicalensis]
  misc_feature (10)..(314): Homolog of NCBI NO: 7453849 NR Description: peroxidase prx12 precursor [Spinacia oleracea]
  misc_feature (11)..(314): Homolog of NCBI NO: 4760700 NR Description: peroxidase 1 [Scutellaria baicalensis]
  misc_feature (28)..(314): Homolog of NCBI NO: 34902236 NR Description: Putative peroxidase [Oryza sativa (japonica
  misc_feature (9)..(314): Homolog of NCBI NO: 34902232 NR Description: Putative peroxidase [Oryza sativa (japonica
  misc_feature (5)..(318): Homolog of NCBI NO: 37536450 NR Description: putative peroxidase [Oryza sativa (japonica
  misc_feature (21)..(314): Homolog of NCBI NO: 34902230 NR Description: Putative peroxidase [Oryza sativa (japonica
MVGRGAATALVWAAVVAVATVVSRAQQLQVGFYDTLCPAAEIIVQEEVSKAASGNPGVAAGLLRLHFHDCFVRGCDASVLLDSSAGNQAEKDAAPNASLRGFEVIDSAKTRLEQACFGVVSCADVLAFAARDALALVGGDAYQVPAGRRDGNVSSAQEAGANLPPPTASASQLTQAFGAKGLSQAEMVALSGAHTVGAARCSSFAPRLYSYGPSGAGQDPSMDPAYLAALAQQCPPQGTGAADPPLPMDPVTPTAFDTNYYANLVARRGLLASDQALLADPATAAQVLAYTNSPATFQTDFVAAMIKMGAIQVLNRHSRHRPDQLQGG

SEQ ID NO: 3565 - DNA, 1381 bp, Zea mays subsp. mays
  misc_feature (1)..(1381): Ceres Seq. ID no. 12364411
  misc_feature: MA Experiment ID: 108535 Result: Up-regulated in Transcription
  misc_feature: MA Experiment 108535 PARAMETER Experiment Name: Zm_Meristem_P Parameter: Age (day) Value: 8
  misc_feature: MA Experiment 108535 PARAMETER Experiment Name: Zm_Meristem_P Parameter: Organism Value: Zea mays
  misc_feature: MA Experiment 108535 PARAMETER Experiment Name: Zm_Meristem_P Parameter: Plant Line Value: 35A19
  misc_feature: MA Experiment 108535 PARAMETER Experiment Name: Zm_Meristem_P Parameter: Tissue Value: Root Meristem vs. Above Root Meristem
  misc_feature: MA Experiment ID: 20000108 Result: Up-regulated in Transcription
  misc_feature: MA Experiment 20000108 PARAMETER Experiment Name: Zm_Root-Tips_P Parameter: Age (day) Value: 12
  misc_feature: MA Experiment 20000108 PARAMETER Experiment Name: Zm_Root-Tips_P Parameter: Organism Value: Zea mays
  misc_feature: MA Experiment 20000108 PARAMETER Experiment Name: Zm_Root-Tips_P Parameter: Tissue Value: Root tips vs. Root mid region    35
  misc_feature: MA Experiment 20000108 PARAMETER Experiment Name: Zm_Root-Tips_P Parameter: Tissue Value: Root tips vs. Root mid region   Sequence Listing-Misc Features (4)
gcacgagaccattacctagaacatcctaatcgaaaaatcatccgtttctgtcagttccttttctaaaagaaaaaaatacagtcgcatctcgcctccagcagggtgagttcgcctcggcagggtgtggcataccatggagagctcgtcgccgtcagtgccgttcccgctgctgcaggcgccggtcgagagcacctaccgcgcctgcaccatcccctaccgtttcccctccgacaacccgcgcaaggccacccctgtcgagatccaatggattgacctctttctcaactctgtcccgtccttcaaacagcgggcggagaacgaccccaccgtacccgatgcgcccgcgaaagcggagaagttcgcgcagaggtacacgtcaatgcttgaagagttgaagaagaatccggagagccatggaggaccaccagattgcatacttctttgtaggcttcgtgagctagtactcagagagctgggatttagggatatcttcaagaaggtcaaggatgaggagaatgccaaggctatgtcactttttgagggagttattaagcggaatgacgaaattgaggatgacggcaaaagaattgagaacttggtccgtggaattttagctggaaacatttttgatctaggatctgcacagcttgcagaagtttttgctaaagatggcatgtcatttttggcaagttgccagaatcttgtatctcgaccatgggttattgatgaccttgatgcttttaagagtaaatggaccaagaaatcatgggaaaaggcagttatttttgttgataactctggtgctgatattatcttgggtatattaccatttgcgagggagttgctccgacgtggcacaaaggtgatacttgctgctaatgatatgccttcgatcaacgatgtcacgtatccagagcttgttgagattataaacaagctcaaggatgcagatggaaaactatcaagtgtggacgcatctggcctccttgttgccaactctggcaacgatctgcctgtaattgatttgtctagtgtatcaccagagcttgcctttatggcaaatgatgctgacctggtggtgctcgaaggcatgggaagggcaattgaaactaacctatatgcgcagatgaaatgtgactcgatcaagattggaatggttaagcatcctgaggtcgcccaatttttaggaggaagactttatgattgcgtcttcaagttcaatgaggcctgaactacgagatacatttgataacacaataccggccgcactagtggtggcttagttctccccaagatcagcttgttaggtgttgcactgaacataattttgttagtatcagcaataatttcaatcaaaataagctacgtatatgtggtggtt

SEQ ID NO: 3566 - protein, 365 aa, Zea mays subsp. mays
  peptide (1)..(365): Ceres Seq. ID no. 12364412
  misc_feature (37)..(362): Pfam Name: Protein of unknown function DUF89 Pfam Description: Protein of unknown function DUF89
  misc_feature (8)..(171): Homolog of NCBI NO: 7486028 NR Description: hypothetical protein F23E12.80 - Arabidopsis
  misc_feature (243)..(364): Homolog of NCBI NO: 25370535 NR Description: hypothetical protein At2g17340 [imported] -
  misc_feature (1)..(167): Homolog of NCBI NO: 25370535 NR Description: hypothetical protein At2g17340 [imported] -
  misc_feature (164)..(223): Homolog of NCBI NO: 15227811 NR Description: unknown protein; protein id: At2g17320.1
  misc_feature (264)..(364): Homolog of NCBI NO: 15227811 NR Description: unknown protein; protein id: At2g17320.1
  misc_feature (8)..(180): Homolog of NCBI NO: 15227811 NR Description: unknown protein; protein id: At2g17320.1
  misc_feature (1)..(364): Homolog of NCBI NO: 18398388 NR Description: expressed protein
  misc_feature (1)..(364): Homolog of NCBI NO: 21554574 NR Description: unknown [Arabidopsis thaliana]
  misc_feature (1)..(364): Homolog of NCBI NO: 18418688 NR Description: putative protein
  misc_feature (1)..(364): Homolog of NCBI NO: 21554145 NR Description: unknown [Arabidopsis thaliana]
MESSSPSVPFPLLQAPVESTYRACTIPYRFPSDNPRKATPVEIQWIDLFLNSVPSFKQRAENDPTVPDAPAKAEKFAQRYTSMLEELKKNPESHGGPPDCILLCRLRELVLRELGFRDIFKKVKDEENAKAMSLFEGVIKRNDEIEDDGKRIENLVRGILAGNIFDLGSAQLAEVFAKDGMSFLASCQNLVSRPWVIDDLDAFKSKWTKKSWEKAVIFVDNSGADIILGILPFARELLRRGTKVILAANDMPSINDVTYPELVEIINKLKDADGKLSSVDASGLLVANSGNDLPVIDLSSVSPELAFMANDADLVVLEGMGRAIETNLYAQMKCDSIKIGMVKHPEVAQFLGGRLYDCVFKFNEA

SEQ ID NO: 3567 - protein, 283 aa, Zea mays subsp. mays
  peptide (1)..(283): Ceres Seq. ID no. 12364413
  misc_feature (1)..(280): Pfam Name: Protein of unknown function DUF89 Pfam Description: Protein of unknown function DUF89
  misc_feature (1)..(89): Homolog of NCBI NO: 7486028 NR Description: hypothetical protein F23E12.80 - Arabidopsis
  misc_feature (161)..(282): Homolog of NCBI NO: 25370535 NR Description: hypothetical protein At2g17340 [imported] -
  misc_feature (1)..(85): Homolog of NCBI NO: 25370535 NR Description: hypothetical protein At2g17340 [imported] -
  misc_feature (82)..(141): Homolog of NCBI NO: 15227811 NR Description: unknown protein; protein id: At2g17320.1
  misc_feature (182)..(282): Homolog of NCBI NO: 15227811 NR Description: unknown protein; protein id: At2g17320.1
  misc_feature (1)..(98): Homolog of NCBI NO: 15227811 NR Description: unknown protein; protein id: At2g17320.1
  misc_feature (1)..(282): Homolog of NCBI NO: 18398388 NR Description: expressed protein
  misc_feature (1)..(282): Homolog of NCBI NO: 21554574 NR Description: unknown [Arabidopsis thaliana]
  misc_feature (1)..(282): Homolog of NCBI NO: 18418688 NR Description: putative protein
  misc_feature (1)..(282): Homolog of NCBI NO: 21554145 NR Description: unknown [Arabidopsis thaliana]
MLEELKKNPESHGGPPDCILLCRLRELVLRELGFRDIFKKVKDEENAKAMSLFEGVIKRNDEIEDDGKRIENLVRGILAGNIFDLGSAQLAEVFAKDGMSFLASCQNLVSRPWVIDDLDAFKSKWTKKSWEKAVIFVDNSGADIILGILPFARELLRRGTKVILAANDMPSINDVTYPELVEIINKLKDADGKLSSVDASGLLVANSGNDLPVIDLSSVSPELAFMANDADLVVLEGMGRAIETNLYAQMKCDSIKIGMVKHPEVAQFLGGRLYDCVFKFNEA

SEQ ID NO: 3568 - protein, 234 aa, Zea mays subsp. mays
  peptide (1)..(234): Ceres Seq. ID no. 12364414
  misc_feature (1)..(231): Pfam Name: Protein of unknown function DUF89 Pfam Description: Protein of unknown function DUF89
  misc_feature (1)..(40): Homolog of NCBI NO: 7486028 NR Description: hypothetical protein F23E12.80 - Arabidopsis
  misc_feature (112)..(233): Homolog of NCBI NO: 25370535 NR Description: hypothetical protein At2g17340 [imported] -
  misc_feature (1)..(36): Homolog of NCBI NO: 25370535 NR Description: hypothetical protein At2g17340 [imported] -
  misc_feature (33)..(92): Homolog of NCBI NO: 15227811 NR Description: unknown protein; protein id: At2g17320.1
  misc_feature (133)..(233): Homolog of NCBI NO: 15227811 NR Description: unknown protein; protein id: At2g17320.1
  misc_feature (1)..(49): Homolog of NCBI NO: 15227811 NR Description: unknown protein; protein id: At2g17320.1
  misc_feature (1)..(233): Homolog of NCBI NO: 18398388 NR Description: expressed protein
  misc_feature (1)..(233): Homolog of NCBI NO: 21554574 NR Description: unknown [Arabidopsis thaliana]
  misc_feature (1)..(233): Homolog of NCBI NO: 18418688 NR Description: putative protein
  misc_feature (1)..(233): Homolog of NCBI NO: 21554145 NR Description: unknown [Arabidopsis thaliana]
MSLFEGVIKRNDEIEDDGKRIENLVRGILAGNIFDLGSAQLAEVFAKDGMSFLASCQNLVSRPWVIDDLDAFKSKWTKKSWEKAVIFVDNSGADIILGILPFARELLRRGTKVILAANDMPSINDVTYPELVEIINKLKDADGKLSSVDASGLLVANSGNDLPVIDLSSVSPELAFMANDADLVVLEGMGRAIETNLYAQMKCDSIKIGMVKHPEVAQFLGGRLYDCVFKFNEA

SEQ ID NO: 3569 - DNA, 1389 bp, Zea mays subsp. mays
  misc_feature (1)..(1389): Ceres Seq. ID no. 13498794
  misc_feature: MA Experiment ID: 108535 Result: Up-regulated in Transcription
  misc_feature: MA Experiment 108535 PARAMETER Experiment Name: Zm_Meristem_P Parameter: Age (day) Value: 8
  misc_feature: MA Experiment 108535 PARAMETER Experiment Name: Zm_Meristem_P Parameter: Organism Value: Zea mays
  misc_feature: MA Experiment 108535 PARAMETER Experiment Name: Zm_Meristem_P Parameter: Plant Line Value: 35A19
  misc_feature: MA Experiment 108535 PARAMETER Experiment Name: Zm_Meristem_P Parameter: Tissue Value: Root Meristem vs. Above Root Meristem
  misc_feature: MA Experiment ID: 20000108 Result: Up-regulated in Transcription
  misc_feature: MA Experiment 20000108 PARAMETER Experiment Name: Zm_Root-Tips_P Parameter: Age (day) Value: 12
  misc_feature: MA Experiment 20000108 PARAMETER Experiment Name: Zm_Root-Tips_P Parameter: Organism Value: Zea mays
  misc_feature: MA Experiment 20000108 PARAMETER Experiment Name: Zm_Root-Tips_P Parameter: Tissue Value: Root tips vs. Root mid region    35
  misc_feature: MA Experiment 20000108 PARAMETER Experiment Name: Zm_Root-Tips_P Parameter: Tissue Value: Root tips vs. Root mid region   Sequence Listing-Misc Features (4)
  misc_feature: MA Experiment ID: 20000487 Result: Up-regulated in Transcription
  misc_feature: MA Experiment 20000487 PARAMETER Experiment Name: Zm_50mM_NH4NO3_L_to_H_P Parameter: Organism Value: Zea mays
  misc_feature: MA Experiment 20000487 PARAMETER Experiment Name: Zm_50mM_NH4NO3_L_to_H_P Parameter: Timepoint (hr) Value: 4
  misc_feature: MA Experiment 20000487 PARAMETER Experiment Name: Zm_50mM_NH4NO3_L_to_H_P Parameter: Tissue Value: Leaves
  misc_feature: MA Experiment 20000487 PARAMETER Experiment Name: Zm_50mM_NH4NO3_L_to_H_P Parameter: Treatment Value: 50mM NH4NO3 vs. 100mM Mannitol
  misc_feature: MA Experiment ID: 20000488 Result: Up-regulated in Transcription
  misc_feature: MA Experiment 20000488 PARAMETER Experiment Name: Zm_50mM_NH4NO3_L_to_H_P Parameter: Organism Value: Zea mays
  misc_feature: MA Experiment 20000488 PARAMETER Experiment Name: Zm_50mM_NH4NO3_L_to_H_P Parameter: Timepoint (hr) Value: 8
  misc_feature: MA Experiment 20000488 PARAMETER Experiment Name: Zm_50mM_NH4NO3_L_to_H_P Parameter: Tissue Value: Leaves
  misc_feature: MA Experiment 20000488 PARAMETER Experiment Name: Zm_50mM_NH4NO3_L_to_H_P Parameter: Treatment Value: 50mM NH4NO3 vs. 100mM Mannitol
  misc_feature: MA Experiment ID: 20000492 Result: Up-regulated in Transcription
  misc_feature: MA Experiment 20000492 PARAMETER Experiment Name: Zm_Hybrid_Seed_Dev_P Parameter: DAP Value: 12
  misc_feature: MA Experiment 20000492 PARAMETER Experiment Name: Zm_Hybrid_Seed_Dev_P Parameter: Organism Value: Zea mays
  misc_feature: MA Experiment 20000492 PARAMETER Experiment Name: Zm_Hybrid_Seed_Dev_P Parameter: Plant Line Value: 35A19
  misc_feature: MA Experiment 20000492 PARAMETER Experiment Name: Zm_Hybrid_Seed_Dev_P Parameter: Tissue Value: Fert Kernel vs. Unfert Floret
gcattgagcgcgattcattcccctcgtgggctcccagttcagtaaaccctacgccctgcggcacacacccatctcgccgcgccgccgcgtaaaccccacccgagcccatctcgccctcgcgcctccccgccctcgcgcaggcgcaacaatggcggccgcctcgaggggcctgctcgcgcgcctccgtgtcctctcactctccggcggcgggagcccgtggctccgcttccccgccttcccggctcttctccgcggaggccttcgtctcccattccgatgacgacgacgctgggggcgagggaggaggcgggggccggatcatcgaggcacggtccggggtgatgggccccacctcgcggcgcaccggcgtcatcggcgtcaagtgcgggatgtcggcgatgtgggacaagtggggcgccaaggtgcccatcaccgtcctctgggtcgacgacaacgttgttacccaggtcaagaccgccgagaaggagggtttcttcgccctacagcttggagcaggtcaaaagaaggaaaaacacctaacaaagcctgaagttggccactttagagcacagggagtgcctctgaaaagaaagctaagggaatttcctgtcactgaggatgcgcttcttcctgttggcacaagcatcacagttcgtcactttgttcctggacaatttgttgatgtcactggaatcacgaaggggaaaggttttgcaggtgtaatgaaaagatatggttttggtgggatgcctgcatcacatggaacatctttggcgcatcgcagtggtggctctactggtcaaagagatgctcctggaagggttttcaaaaacagaaaaatgcctggacgcatgggtggtgtgcaacgcacagtgaagaatgtatgggtctatcaaatagacccagccaggaacttactgtatctgaagggccaggttcctggtcctcaaggtagctttattttcgttaaggattctatatataagaaacctgacacggctttgctcccatttcctacatacttcacgcgtgaaggtgagcctgaagacttggagcccctgattgctgatcttggtgatgttgacccattcatggcagccgattaagacaatgcacaaagttggttaattcctttttgtgttctaagcactccttgagctcgtccattccacgagattgtcaaactctcgatggatgtgagcagttcctgaatcacaagctttatccggttactggccagcctgatcaatgttgttccatgtacattacctggcaagtataccagtgctctaatggtttttagatgattgttttgattgaccgaatataacctttttctcaataagttgtacgcggagccacaagtagtatataaaatcagaatatttc

SEQ ID NO: 3570 - protein, 254 aa, Zea mays subsp. mays
  peptide (1)..(254): Ceres Seq. ID no. 13498795
  misc_feature (14)..(210): Pfam Name: Ribosomal protein L3 Pfam Description: Ribosomal protein L3
  misc_feature (1)..(254): Homolog of NCBI NO: 34902796 NR Description: unnamed protein product [Oryza sativa (japonica group)] >gi|7106521|dbj|BAA92206.1| unnamed protein product
  misc_feature (1)..(254): Homolog of NCBI NO: 18401521 NR Description: ribosomal protein L3p family [Arabidopsis
  misc_feature (1)..(236): Homolog of NCBI NO: 23108389 NR Description: hypothetical protein [Novosphingobium
  misc_feature (1)..(233): Homolog of NCBI NO: 16125497 NR Description: ribosomal protein L3 [Caulobacter crescentus CB15]
  misc_feature (7)..(225): Homolog of NCBI NO: 23014088 NR Description: hypothetical protein [Magnetospirillum
  misc_feature (122)..(254): Homolog of NCBI NO: 21450877 NR Description: putative ribosomal protein L3 [Arabidopsis
  misc_feature (7)..(223): Homolog of NCBI NO: 22956505 NR Description: hypothetical protein [Rhodobacter sphaeroides]
  misc_feature (7)..(228): Homolog of NCBI NO: 22965161 NR Description: hypothetical protein [Rhodopseudomonas palustris]
  misc_feature (7)..(235): Homolog of NCBI NO: 27380511 NR Description: 50S ribosomal protein L3 [Bradyrhizobium >gi|27353675|dbj|BAC50665.1| 50S ribosomal protein L3
  misc_feature (2)..(223): Homolog of NCBI NO: 17987040 NR Description: LSU ribosomal protein L3P [Brucella melitensis]
MGPTSRRTGVIGVKCGMSAMWDKWGAKVPITVLWVDDNVVTQVKTAEKEGFFALQLGAGQKKEKHLTKPEVGHFRAQGVPLKRKLREFPVTEDALLPVGTSITVRHFVPGQFVDVTGITKGKGFAGVMKRYGFGGMPASHGTSLAHRSGGSTGQRDAPGRVFKNRKMPGRMGGVQRTVKNVWVYQIDPARNLLYLKGQVPGPQGSFIFVKDSIYKKPDTALLPFPTYFTREGEPEDLEPLIADLGDVDPFMAAD

SEQ ID NO: 3571 - protein, 238 aa, Zea mays subsp. mays
  peptide (1)..(238): Ceres Seq. ID no. 13498796
  misc_feature (1)..(194): Pfam Name: Ribosomal protein L3 Pfam Description: Ribosomal protein L3
  misc_feature (1)..(238): Homolog of NCBI NO: 34902796 NR Description: unnamed protein product [Oryza sativa (japonica group)] >gi|7106521|dbj|BAA92206.1| unnamed protein product
  misc_feature (1)..(238): Homolog of NCBI NO: 18401521 NR Description: ribosomal protein L3p family [Arabidopsis
  misc_feature (1)..(220): Homolog of NCBI NO: 23108389 NR Description: hypothetical protein [Novosphingobium
  misc_feature (1)..(217): Homolog of NCBI NO: 16125497 NR Description: ribosomal protein L3 [Caulobacter crescentus CB15]
  misc_feature (1)..(209): Homolog of NCBI NO: 23014088 NR Description: hypothetical protein [Magnetospirillum
  misc_feature (106)..(238): Homolog of NCBI NO: 21450877 NR Description: putative ribosomal protein L3 [Arabidopsis
  misc_feature (1)..(207): Homolog of NCBI NO: 22956505 NR Description: hypothetical protein [Rhodobacter sphaeroides]
  misc_feature (1)..(212): Homolog of NCBI NO: 22965161 NR Description: hypothetical protein [Rhodopseudomonas palustris]
  misc_feature (1)..(219): Homolog of NCBI NO: 27380511 NR Description: 50S ribosomal protein L3 [Bradyrhizobium >gi|27353675|dbj|BAC50665.1| 50S ribosomal protein L3
  misc_feature (1)..(207): Homolog of NCBI NO: 17987040 NR Description: LSU ribosomal protein L3P [Brucella melitensis]
MSAMWDKWGAKVPITVLWVDDNVVTQVKTAEKEGFFALQLGAGQKKEKHLTKPEVGHFRAQGVPLKRKLREFPVTEDALLPVGTSITVRHFVPGQFVDVTGITKGKGFAGVMKRYGFGGMPASHGTSLAHRSGGSTGQRDAPGRVFKNRKMPGRMGGVQRTVKNVWVYQIDPARNLLYLKGQVPGPQGSFIFVKDSIYKKPDTALLPFPTYFTREGEPEDLEPLIADLGDVDPFMAAD

SEQ ID NO: 3572 - protein, 235 aa, Zea mays subsp. mays
  peptide (1)..(235): Ceres Seq. ID no. 13498797
  misc_feature (1)..(191): Pfam Name: Ribosomal protein L3 Pfam Description: Ribosomal protein L3
  misc_feature (1)..(235): Homolog of NCBI NO: 34902796 NR Description: unnamed protein product [Oryza sativa (japonica group)] >gi|7106521|dbj|BAA92206.1| unnamed protein product
  misc_feature (1)..(235): Homolog of NCBI NO: 18401521 NR Description: ribosomal protein L3p family [Arabidopsis
  misc_feature (1)..(217): Homolog of NCBI NO: 23108389 NR Description: hypothetical protein [Novosphingobium
  misc_feature (1)..(214): Homolog of NCBI NO: 16125497 NR Description: ribosomal protein L3 [Caulobacter crescentus CB15]
  misc_feature (1)..(206): Homolog of NCBI NO: 23014088 NR Description: hypothetical protein [Magnetospirillum
  misc_feature (103)..(235): Homolog of NCBI NO: 21450877 NR Description: putative ribosomal protein L3 [Arabidopsis
  misc_feature (1)..(204): Homolog of NCBI NO: 22956505 NR Description: hypothetical protein [Rhodobacter sphaeroides]
  misc_feature (1)..(209): Homolog of NCBI NO: 22965161 NR Description: hypothetical protein [Rhodopseudomonas palustris]
  misc_feature (1)..(216): Homolog of NCBI NO: 27380511 NR Description: 50S ribosomal protein L3 [Bradyrhizobium >gi|27353675|dbj|BAC50665.1| 50S ribosomal protein L3
  misc_feature (1)..(204): Homolog of NCBI NO: 17987040 NR Description: LSU ribosomal protein L3P [Brucella melitensis]
MWDKWGAKVPITVLWVDDNVVTQVKTAEKEGFFALQLGAGQKKEKHLTKPEVGHFRAQGVPLKRKLREFPVTEDALLPVGTSITVRHFVPGQFVDVTGITKGKGFAGVMKRYGFGGMPASHGTSLAHRSGGSTGQRDAPGRVFKNRKMPGRMGGVQRTVKNVWVYQIDPARNLLYLKGQVPGPQGSFIFVKDSIYKKPDTALLPFPTYFTREGEPEDLEPLIADLGDVDPFMAAD

SEQ ID NO: 3573 - DNA, 1255 bp, Zea mays subsp. mays
  misc_feature (1)..(1255): Ceres Seq. ID no. 12347891
  misc_feature: MA Experiment ID: 108504 Result: Down-regulated in Transcription
  misc_feature: MA Experiment 108504 PARAMETER Experiment Name: Zm_Drought_P Parameter: Age (day) Value: 8
  misc_feature: MA Experiment 108504 PARAMETER Experiment Name: Zm_Drought_P Parameter: Organism Value: Zea mays
  misc_feature: MA Experiment 108504 PARAMETER Experiment Name: Zm_Drought_P Parameter: Plant Line Value: 35A19
  misc_feature: MA Experiment 108504 PARAMETER Experiment Name: Zm_Drought_P Parameter: Timepoint (hr) Value: 12
  misc_feature: MA Experiment 108504 PARAMETER Experiment Name: Zm_Drought_P Parameter: Tissue Value: Aerial
  misc_feature: MA Experiment 108504 PARAMETER Experiment Name: Zm_Drought_P Parameter: Treatment Value: Drought vs. No Drought
  misc_feature: MA Experiment ID: 108527 Result: Down-regulated in Transcription
  misc_feature: MA Experiment 108527 PARAMETER Experiment Name: Zm_5mM_NO_P Parameter: Age (day) Value: 8
  misc_feature: MA Experiment 108527 PARAMETER Experiment Name: Zm_5mM_NO_P Parameter: Organism Value: Zea mays
  misc_feature: MA Experiment 108527 PARAMETER Experiment Name: Zm_5mM_NO_P Parameter: Plant Line Value: 35A19
  misc_feature: MA Experiment 108527 PARAMETER Experiment Name: Zm_5mM_NO_P Parameter: Timepoint (hr) Value: 6
  misc_feature: MA Experiment 108527 PARAMETER Experiment Name: Zm_5mM_NO_P Parameter: Tissue Value: Aerial
  misc_feature: MA Experiment 108527 PARAMETER Experiment Name: Zm_5mM_NO_P Parameter: Treatment Value: 5mM NO vs. No Treatment
  misc_feature: MA Experiment ID: 108535 Result: Down-regulated in Transcription
  misc_feature: MA Experiment 108535 PARAMETER Experiment Name: Zm_Meristem_P Parameter: Age (day) Value: 8
  misc_feature: MA Experiment 108535 PARAMETER Experiment Name: Zm_Meristem_P Parameter: Organism Value: Zea mays
  misc_feature: MA Experiment 108535 PARAMETER Experiment Name: Zm_Meristem_P Parameter: Plant Line Value: 35A19
  misc_feature: MA Experiment 108535 PARAMETER Experiment Name: Zm_Meristem_P Parameter: Tissue Value: Root Meristem vs. Above Root Meristem
  misc_feature: MA Experiment ID: 20000477 Result: Down-regulated in Transcription
  misc_feature: MA Experiment 20000477 PARAMETER Experiment Name: Zm_5mM_SA_P Parameter: Age (day) Value: 10
  misc_feature: MA Experiment 20000477 PARAMETER Experiment Name: Zm_5mM_SA_P Parameter: Organism Value: Zea mays
  misc_feature: MA Experiment 20000477 PARAMETER Experiment Name: Zm_5mM_SA_P Parameter: Plant Line Value: 35A19
  misc_feature: MA Experiment 20000477 PARAMETER Experiment Name: Zm_5mM_SA_P Parameter: Timepoint (hr) Value: 48
  misc_feature: MA Experiment 20000477 PARAMETER Experiment Name: Zm_5mM_SA_P Parameter: Tissue Value: Aerial
  misc_feature: MA Experiment 20000477 PARAMETER Experiment Name: Zm_5mM_SA_P Parameter: Treatment Value: 5mM SA vs. No Treatment
  misc_feature: MA Experiment ID: 20000478 Result: Down-regulated in Transcription
  misc_feature: MA Experiment 20000478 PARAMETER Experiment Name: Zm_5mM_SA_P Parameter: Age (day) Value: 11
  misc_feature: MA Experiment 20000478 PARAMETER Experiment Name: Zm_5mM_SA_P Parameter: Organism Value: Zea mays
  misc_feature: MA Experiment 20000478 PARAMETER Experiment Name: Zm_5mM_SA_P Parameter: Plant Line Value: 35A19
  misc_feature: MA Experiment 20000478 PARAMETER Experiment Name: Zm_5mM_SA_P Parameter: Timepoint (hr) Value: 72
  misc_feature: MA Experiment 20000478 PARAMETER Experiment Name: Zm_5mM_SA_P Parameter: Tissue Value: Aerial
  misc_feature: MA Experiment 20000478 PARAMETER Experiment Name: Zm_5mM_SA_P Parameter: Treatment Value: 5mM SA vs. No Treatment
cttcccttcctccttccttcccaggagccaggaactccattgcattatttccaccccaagaacacagcacagagtcggatccgaatccacaggagaggcataagcacaactcactccccactccccactcatcagtccctccacccatcagctagccatgggcaaggactgcggcaaacacggcgacgacgacctccggcgctcgtgcaggcgcctgctagccatcctcgtggtcctcgcgctgaccgttggcgtcgtcgcgctgatcgtctacctggtgctccgccccacgcacccgcgcttctacctgcaggacgcgtcgctccggcagctggacctctccaacgccaccaccagcaccagcaccagcaccctgctctccaccgcgatccaggtgacgctggcgtcgcgcaacccgaacgagcgcgtcggggtctactacgaccgcctcgacgtgtacgcgtcgtacaagtaccagcagctcacggtggcggcgtcgctgccgcccgcgtaccagggccacggggacgtcggcgtctggtcgccggtgctggccggtcccaacgtgcccctcgcgccctacctcgccgacgcgctccgccaggactgccaggcggggtacctcgtcctccaggtcaagctcgacggccgcgtccgctggaaggtcggcagctgcgtctccagccactaccacctcttcgtcacctgcccggccttcctcgtcaccgccggcggcaacggcgcgcccggggccgccgggttcaggttccagaccaccacctactgccacgtcgaggtctaggtctaggtctagccggccccttgcctgtctgtgctgctgtgttgtccgtactccgtatacaaacagaggccgccgcctgcgaaggaaacagagatacaaaggcctgccttgcgccatatatcatgggatggctgcctgtctccctcactctctctctctctctctcagctgcactgcctgcattgctggtgtgttactgctgcagttatgcggacgtaaaggatggtaaaaatttcctactttttttcttcttcttttaagtaagattctcctttaacgtacgatcaattacagttggaggggtagcagtaacagtaatttctatgtccagccatttcggtgagactactttcaacacagagaaaaccgattgtacctttgcgcgtctctcttaattaagtcttatgactgatttggtaatcagagaattgaatagaaatgaaatttctctcc

SEQ ID NO: 3574 - protein, 353 aa, Zea mays subsp. mays
  peptide (1)..(353): Ceres Seq. ID no. 12347892
LPFLLPSQEPGTPLHYFHPKNTAQSRIRIHRRGISTTHSPLPTHQSLHPSASHGQGLRQTRRRRPPALVQAPASHPRGPRADRWRRRADRLPGAPPHAPALLPAGRVAPAAGPLQRHHQHQHQHPALHRDPGDAGVAQPERARRGLLRPPRRVRVVQVPAAHGGGVAAARVPGPRGRRRLVAGAGRSQRAPRALPRRRAPPGLPGGVPRPPGQARRPRPLEGRQLRLQPLPPLRHLPGLPRHRRRQRRARGRRVQVPDHHLLPRRGLGLGLAGPLPVCAAVLSVLRIQTEAAACEGNRDTKACLAPYIMGWLPVSLTLSLSLSAALPALLVCYCCSYADVKDGKNFLLFFFFF

SEQ ID NO: 3575 - protein, 214 aa, Zea mays subsp. mays
  peptide (1)..(214): Ceres Seq. ID no. 12347893
  misc_feature (3)..(214): Homolog of NCBI NO: 15227538 NR Description: hairpin-induced protein, putative (HIN1)
  misc_feature (1)..(198): Homolog of NCBI NO: 15231227 NR Description: hairpin-induced protein, putative (HIN1)
  misc_feature (2)..(214): Homolog of NCBI NO: 22326984 NR Description: similar to hairpin-induced protein, putative
  misc_feature (3)..(214): Homolog of NCBI NO: 28392929 NR Description: putative VAMP protein SEC22 [Arabidopsis thaliana]
  misc_feature (3)..(214): Homolog of NCBI NO: 18399308 NR Description: VAMP protein SEC22
  misc_feature (3)..(214): Homolog of NCBI NO: 32488715 NR Description: OSJNBa0088H09.16 [Oryza sativa (japonica
  misc_feature (3)..(214): Homolog of NCBI NO: 15240001 NR Description: hairpin-induced protein, putative (HIN1); protein
  misc_feature (3)..(214): Homolog of NCBI NO: 15229906 NR Description: hairpin-induced protein, putative (HIN1); protein
  misc_feature (3)..(214): Homolog of NCBI NO: 38637038 NR Description: harpin-induced protein 1 family (HIN1)-like
  misc_feature (1)..(194): Homolog of NCBI NO: 38344036 NR Description: OJ991214_12.17 [Oryza sativa (japonica
MGKDCGKHGDDDLRRSCRRLLAILVVLALTVGVVALIVYLVLRPTHPRFYLQDASLRQLDLSNATTSTSTSTLLSTAIQVTLASRNPNERVGVYYDRLDVYASYKYQQLTVAASLPPAYQGHGDVGVWSPVLAGPNVPLAPYLADALRQDCQAGYLVLQVKLDGRVRWKVGSCVSSHYHLFVTCPAFLVTAGGNGAPGAAGFRFQTTTYCHVEV

SEQ ID NO: 3576 - DNA, 779 bp, Zea mays subsp. mays
  misc_feature (1)..(779): Ceres Seq. ID no. 13492985
  misc_feature: MA Experiment ID: 108534 Result: Up-regulated in Transcription
  misc_feature: MA Experiment 108534 PARAMETER Experiment Name: Zm_4deg_Cold_P Parameter: Age (hr) Value: 8
  misc_feature: MA Experiment 108534 PARAMETER Experiment Name: Zm_4deg_Cold_P Parameter: Organism Value: Zea mays
  misc_feature: MA Experiment 108534 PARAMETER Experiment Name: Zm_4deg_Cold_P Parameter: Plant Line Value: 35A19
  misc_feature: MA Experiment 108534 PARAMETER Experiment Name: Zm_4deg_Cold_P Parameter: Temperature (deg C) Value: 4 vs. 22
  misc_feature: MA Experiment 108534 PARAMETER Experiment Name: Zm_4deg_Cold_P Parameter: Timepoint (hr) Value: 6
  misc_feature: MA Experiment 108534 PARAMETER Experiment Name: Zm_4deg_Cold_P Parameter: Tissue Value: Aerial
  misc_feature: MA Experiment ID: 20000535 Result: Down-regulated in Transcription
  misc_feature: MA Experiment 20000535 PARAMETER Experiment Name: Zm_Hybrid_Seed_Dev_P Parameter: DAP Value: 30 vs. 12
  misc_feature: MA Experiment 20000535 PARAMETER Experiment Name: Zm_Hybrid_Seed_Dev_P Parameter: Organism Value: Zea mays
  misc_feature: MA Experiment 20000535 PARAMETER Experiment Name: Zm_Hybrid_Seed_Dev_P Parameter: Plant Line Value: 35A19
  misc_feature: MA Experiment 20000535 PARAMETER Experiment Name: Zm_Hybrid_Seed_Dev_P Parameter: Tissue Value: Embryo vs. Unfert Floret
ccacctcaattattgcccacccatccccgctccctcctctcctctcctcccgtcccacccatctcctcgcaccagcgccggggaaatggcggccgcgctgtggacgctgctgctggtggtggccctgtcggcggcgctggcgctggcctcgaaccgccccgtggcggcggcggcgaccgcggcggcggaggcggcgaacgaggtgctccgcgcgcaccagctgccggggggcctgctgccggcggggatcacggcgttccggcacgacgccgccacgggagcgttcgaggcccggctggacgcgccctgcacggcgcgcttcgaggtcggcctccgctacaacgccaccgtctccggggtcatcagccccggccagatcgccgacatctccggcgtcgccgcgcaggacctcttcatgtggttccccgtccacgacatcaaggtcgacatcccctcctccggcgtcatctacttcaacgtcggcgtcgtcaagaagcacctcccgctcgccgtcttcgacgcgccgccggcctgcacgcccgacccgctcctgcaggtcatttctcatcctagcctcactctctcgatggcacgagctctaattcatcgatcttgggaccagtgacctccttgacatcattcaatcctcaatgatcttgaatgttggcacaacctttatacccagtttctttactgaaagctgcaagtagcatgcgcaggagcttttcagcatgtcatattccacggagcagagagtcgtgaatacacaagagatacgg

SEQ ID NO: 3577 - protein, 207 aa, Zea mays subsp. mays
  peptide (1)..(207): Ceres Seq. ID no. 13492986
  misc_feature (57)..(183): Pfam Name: Protein of unknown function, DUF538 Pfam Description: Protein of unknown function, DUF538
  misc_feature (67)..(179): Homolog of NCBI NO: 21536941 NR Description: unknown [Arabidopsis thaliana]
  misc_feature (67)..(179): Homolog of NCBI NO: 18417957 NR Description: expressed protein [Arabidopsis thaliana]
  misc_feature (67)..(179): Homolog of NCBI NO: 9759120 NR Description: gb|AAF02163.1~gene_id:MQK4.11~similar to unknown
  misc_feature (36)..(178): Homolog of NCBI NO: 21592465 NR Description: unknown [Arabidopsis thaliana]
  misc_feature (36)..(178): Homolog of NCBI NO: 22330911 NR Description: expressed protein [Arabidopsis thaliana]
  misc_feature (36)..(178): Homolog of NCBI NO: 6041844 NR Description: unknown protein [Arabidopsis thaliana]
  misc_feature (33)..(180): Homolog of NCBI NO: 34898576 NR Description: P0534A03.14 [Oryza sativa (japonica
  misc_feature (36)..(180): Homolog of NCBI NO: 18397959 NR Description: expressed protein [Arabidopsis thaliana]
  misc_feature (36)..(180): Homolog of NCBI NO: 6041854 NR Description: unknown protein [Arabidopsis thaliana]
  misc_feature (57)..(184): Homolog of NCBI NO: 34906900 NR Description: P0470A12.30 [Oryza sativa (japonica
HLNYCPPIPAPSSPLLPSHPSPRTSAGEMAAALWTLLLVVALSAALALASNRPVAAAATAAAEAANEVLRAHQLPGGLLPAGITAFRHDAATGAFEARLDAPCTARFEVGLRYNATVSGVISPGQIADISGVAAQDLFMWFPVHDIKVDIPSSGVIYFNVGVVKKHLPLAVFDAPPACTPDPLLQVISHPSLTLSMARALIHRSWDQ

SEQ ID NO: 3578 - protein, 199 aa, Zea mays subsp. mays
  peptide (1)..(199): Ceres Seq. ID no. 13492987
  misc_feature (62)..(189): Pfam Name: Cupin Pfam Description: Cupin
  misc_feature (44)..(186): Homolog of NCBI NO: 7949115 NR Description: Ser/Arg-related nuclear matrix protein
  misc_feature (43)..(185): Homolog of NCBI NO: 30424862 NR Description: RIKEN cDNA 5033413A03 [Mus musculus]
  misc_feature (43)..(186): Homolog of NCBI NO: 30424862 NR Description: RIKEN cDNA 5033413A03 [Mus musculus]
  misc_feature (43)..(185): Homolog of NCBI NO: 28972153 NR Description: mKIAA0324 protein [Mus musculus]
  misc_feature (43)..(186): Homolog of NCBI NO: 28972153 NR Description: mKIAA0324 protein [Mus musculus]
  misc_feature (43)..(185): Homolog of NCBI NO: 19923466 NR Description: splicing coactivator subunit SRm300
  misc_feature (43)..(185): Homolog of NCBI NO: 7512967 NR Description: hypothetical protein KIAA0324 - human (fragment)
  misc_feature (43)..(185): Homolog of NCBI NO: 6634015 NR Description: KIAA0324 protein [Homo sapiens]
  misc_feature (43)..(185): Homolog of NCBI NO: 5821151 NR Description: RNA binding protein [Homo sapiens]
  misc_feature (45)..(169): Homolog of NCBI NO: 29250446 NR Description: GLP_39_87477_88058 [Giardia lamblia ATCC 50803]
TSIIAHPSPLPPLLSSRPTHLLAPAPGKWRPRCGRCCWWWPCRRRWRWPRTAPWRRRRPRRRRRRTRCSARTSCRGACCRRGSRRSGTTPPRERSRPGWTRPARRASRSASATTPPSPGSSAPARSPTSPASPRRTSSCGSPSTTSRSTSPPPASSTSTSASSRSTSRSPSSTRRRPARPTRSCRSFLILASLSRWHEL

SEQ ID NO: 3579 - protein, 190 aa, Zea mays subsp. mays
  peptide (1)..(190): Ceres Seq. ID no. 13492988
  misc_feature (28)..(160): Pfam Name: bZIP Maf transcription factor Pfam Description: bZIP Maf transcription factor
  misc_feature (27)..(100): Homolog of NCBI NO: 38048369 NR Description: similar to Drosophila melanogaster lcs
PPQLLPTHPRSLLSSPPVPPISSHQRRGNGGRAVDAAAGGGPVGGAGAGLEPPRGGGGDRGGGGGERGAPRAPAAGGPAAGGDHGVPARRRHGSVRGPAGRALHGALRGRPPLQRHRLRGHQPRPDRRHLRRRRAGPLHVVPRPRHQGRHPLLRRHLLQRRRRQEAPPARRLRRAAGLHARPAPAGHFSS

SEQ ID NO: 3580 - protein, 179 aa, Zea mays subsp. mays
  peptide (1)..(179): Ceres Seq. ID no. 13492989
  misc_feature (29)..(155): Pfam Name: Protein of unknown function, DUF538 Pfam Description: Protein of unknown function, DUF538
  misc_feature (39)..(151): Homolog of NCBI NO: 21536941 NR Description: unknown [Arabidopsis thaliana]
  misc_feature (39)..(151): Homolog of NCBI NO: 18417957 NR Description: expressed protein [Arabidopsis thaliana]
  misc_feature (39)..(151): Homolog of NCBI NO: 9759120 NR Description: gb|AAF02163.1~gene_id:MQK4.11~similar to unknown
  misc_feature (8)..(150): Homolog of NCBI NO: 21592465 NR Description: unknown [Arabidopsis thaliana]
  misc_feature (8)..(150): Homolog of NCBI NO: 22330911 NR Description: expressed protein [Arabidopsis thaliana]
  misc_feature (8)..(150): Homolog of NCBI NO: 6041844 NR Description: unknown protein [Arabidopsis thaliana]
  misc_feature (5)..(152): Homolog of NCBI NO: 34898576 NR Description: P0534A03.14 [Oryza sativa (japonica
  misc_feature (8)..(152): Homolog of NCBI NO: 18397959 NR Description: expressed protein [Arabidopsis thaliana]
  misc_feature (8)..(152): Homolog of NCBI NO: 6041854 NR Description: unknown protein [Arabidopsis thaliana]
  misc_feature (29)..(156): Homolog of NCBI NO: 34906900 NR Description: P0470A12.30 [Oryza sativa (japonica
MAAALWTLLLVVALSAALALASNRPVAAAATAAAEAANEVLRAHQLPGGLLPAGITAFRHDAATGAFEARLDAPCTARFEVGLRYNATVSGVISPGQIADISGVAAQDLFMWFPVHDIKVDIPSSGVIYFNVGVVKKHLPLAVFDAPPACTPDPLLQVISHPSLTLSMARALIHRSWDQ

SEQ ID NO: 3581 - DNA, 2009 bp, Zea mays subsp. mays
  misc_feature (1)..(2009): Ceres Seq. ID no. 12372657
  misc_feature: MA Experiment ID: 108535 Result: Up-regulated in Transcription
  misc_feature: MA Experiment 108535 PARAMETER Experiment Name: Zm_Meristem_P Parameter: Age (day) Value: 8
  misc_feature: MA Experiment 108535 PARAMETER Experiment Name: Zm_Meristem_P Parameter: Organism Value: Zea mays
  misc_feature: MA Experiment 108535 PARAMETER Experiment Name: Zm_Meristem_P Parameter: Plant Line Value: 35A19
  misc_feature: MA Experiment 108535 PARAMETER Experiment Name: Zm_Meristem_P Parameter: Tissue Value: Root Meristem vs. Above Root Meristem
  misc_feature: MA Experiment ID: 108543 Result: Up-regulated in Transcription
  misc_feature: MA Experiment ID: 108544 Result: Down-regulated in Transcription
  misc_feature: MA Experiment ID: 20000477 Result: Down-regulated in Transcription
  misc_feature: MA Experiment 20000477 PARAMETER Experiment Name: Zm_5mM_SA_P Parameter: Age (day) Value: 10
  misc_feature: MA Experiment 20000477 PARAMETER Experiment Name: Zm_5mM_SA_P Parameter: Organism Value: Zea mays
  misc_feature: MA Experiment 20000477 PARAMETER Experiment Name: Zm_5mM_SA_P Parameter: Plant Line Value: 35A19
  misc_feature: MA Experiment 20000477 PARAMETER Experiment Name: Zm_5mM_SA_P Parameter: Timepoint (hr) Value: 48
  misc_feature: MA Experiment 20000477 PARAMETER Experiment Name: Zm_5mM_SA_P Parameter: Tissue Value: Aerial
  misc_feature: MA Experiment 20000477 PARAMETER Experiment Name: Zm_5mM_SA_P Parameter: Treatment Value: 5mM SA vs. No Treatment
  misc_feature: MA Experiment ID: 20000478 Result: Down-regulated in Transcription
  misc_feature: MA Experiment 20000478 PARAMETER Experiment Name: Zm_5mM_SA_P Parameter: Age (day) Value: 11
  misc_feature: MA Experiment 20000478 PARAMETER Experiment Name: Zm_5mM_SA_P Parameter: Organism Value: Zea mays
  misc_feature: MA Experiment 20000478 PARAMETER Experiment Name: Zm_5mM_SA_P Parameter: Plant Line Value: 35A19
  misc_feature: MA Experiment 20000478 PARAMETER Experiment Name: Zm_5mM_SA_P Parameter: Timepoint (hr) Value: 72
  misc_feature: MA Experiment 20000478 PARAMETER Experiment Name: Zm_5mM_SA_P Parameter: Tissue Value: Aerial
  misc_feature: MA Experiment 20000478 PARAMETER Experiment Name: Zm_5mM_SA_P Parameter: Treatment Value: 5mM SA vs. No Treatment
  misc_feature: MA Experiment ID: 20000479 Result: Down-regulated in Transcription
  misc_feature: MA Experiment 20000479 PARAMETER Experiment Name: Zm_Drought_P Parameter: Age (day) Value: 10
  misc_feature: MA Experiment 20000479 PARAMETER Experiment Name: Zm_Drought_P Parameter: Organism Value: Zea mays
  misc_feature: MA Experiment 20000479 PARAMETER Experiment Name: Zm_Drought_P Parameter: Plant Line Value: 35A19
  misc_feature: MA Experiment 20000479 PARAMETER Experiment Name: Zm_Drought_P Parameter: Timepoint (hr) Value: 48
  misc_feature: MA Experiment 20000479 PARAMETER Experiment Name: Zm_Drought_P Parameter: Tissue Value: Aerial
  misc_feature: MA Experiment 20000479 PARAMETER Experiment Name: Zm_Drought_P Parameter: Treatment Value: Drought vs. No Drought
  misc_feature: MA Experiment ID: 20000480 Result: Down-regulated in Transcription
  misc_feature: MA Experiment 20000480 PARAMETER Experiment Name: Zm_Drought_P Parameter: Age (day) Value: 11
  misc_feature: MA Experiment 20000480 PARAMETER Experiment Name: Zm_Drought_P Parameter: Organism Value: Zea mays
  misc_feature: MA Experiment 20000480 PARAMETER Experiment Name: Zm_Drought_P Parameter: Plant Line Value: 35A19
  misc_feature: MA Experiment 20000480 PARAMETER Experiment Name: Zm_Drought_P Parameter: Timepoint (hr) Value: 72
  misc_feature: MA Experiment 20000480 PARAMETER Experiment Name: Zm_Drought_P Parameter: Tissue Value: Aerial
  misc_feature: MA Experiment 20000480 PARAMETER Experiment Name: Zm_Drought_P Parameter: Treatment Value: Drought vs. No Drought
  misc_feature: MA Experiment ID: 20000626 Result: Down-regulated in Transcription
  misc_feature: MA Experiment 20000626 PARAMETER Experiment Name: Zm_Herbicide-Treatments_P Parameter: Timepoint (hr) Value: 12
  misc_feature: MA Experiment 20000626 PARAMETER Experiment Name: Zm_Herbicide-Treatments_P Parameter: Tissue Value: Aerial
  misc_feature: MA Experiment 20000626 PARAMETER Experiment Name: Zm_Herbicide-Treatments_P Parameter: Treatment Value: Roundup vs. No Treatment
  misc_feature: MA Experiment ID: 20000632 Result: Down-regulated in Transcription
  misc_feature: MA Experiment 20000632 PARAMETER Experiment Name: Zm_Herbicide-Treatments_P Parameter: Timepoint (hr) Value: 4
  misc_feature: MA Experiment 20000632 PARAMETER Experiment Name: Zm_Herbicide-Treatments_P Parameter: Tissue Value: Aerial
  misc_feature: MA Experiment 20000632 PARAMETER Experiment Name: Zm_Herbicide-Treatments_P Parameter: Treatment Value: Glean vs. No Treatment
gcacgagaccattacctagaacatcctaatcaaaactgttcacggccctcgccaaatccccaaaatccaagcgcgtcgccgacggcattgcgtcgccattgcctccaaatccgtgtgcgactcgcgtgatcccagatcccgctcgccgtattccccgcagtgacctctgacaagagcattttccgcgcggaaaatgccgccgtttcggccggctcttggaagggcgcttcttctgtaggaccgcggcgcgaggctgcgatggcgttcgccgccagcgagggaaatctttccccggcgctgcccctggccactctgatcggccgcgagctccgcggcgacggtaccgagcgcccgcacgtgcgctacggccactctggcttcgccaagcgcggcgaggactacttcctcgtcaagcccgactgcctccgcgtccccggagacccttcctcctctttctccgtcttcgctgtattcgacggccacaatggcgtgtcggcggcggtgttcagcaaggagaaactgctggagcacgtgatgagcgcggtgcccgagggcatcagtcgcgaggactggctacaggcgctgccgcgcgcgctcgtcgcaggattcgtcaagacagacattgacttccagcgcaagggtgagacgtcaggaacgacggcgacacttgttgtggttgatgggttcacggtcactgtcgcgtcggtgggagattctaggtgcattctggatacacagggaggcgaggtctcattgctgactgtggatcaccggctagaggagaatgcagaggagcgtgagcgcgtcacagcgagtggaggagaggtcagccggcttaatctctgtggtggacaggaggtgggtcctctccgatgctggccaggtggattgtgcctttcaaggtcaattggggatactgatgtcggcgagttcatcgtaccgattccacatgtcaagcaagtgaagctcccaaatactggtggaagactaataattgcatcagatggaatatgggacgctctgtcctcagagagtgctgctcaggcatgccggggattgcgtgcagaactggctgcaaaacttgttgttaagcaagctctgaagacaagtgggctgaaagatgacaccacatgtgtggttgtcgacatcatcccatctgatcattgttcaacaccaccagcattgtctccaaagaaaaatcagaacaagttgaagcatcttatttttggtaaaaggtctcatagttctgttggaaagctcagcaaatctgcttcattgggttcagtggaagaaatattcgaggagggatctgcaatgttggaagaaaggttgggaagtaattttccaccaaaagcaaatctgcctccatttcgctgtgcaatctgccaagtggaccaagagccattcgaaggtttaatgacggacaatgtaggtggctgctgctcaaccccatcaacaccatggggtggtccttatctttgctcaggctgtaggaaaaagaacgacgcgatggaaggtaaacgatcgaatcgttcaacgacgtgcaggtgaaggttctgataggaatcactgggactgggtcctgtgatcctgtcgtgcaagcttgcaaagtagtctccgatttcggttttctgctccttgtaaaaagagaagaataaaccgtctgtcgtttgattgaagtattgttcggtgaaaactaactgaactccagcctgatctgaaaaaaccggggtactaataacaagcctgatttctattgacatcccctatcaaactttcgtttgctctgagaggatagctgacagaactttgaggctgtagttttgtgaacccttagcatgtagagggaaatgagtagcttaacaatgttttatagaacgatggtgtggcttctcattgttgctttagaatgcattttgtgtttgtggagcaaaaaaaaaaaaaaaaaagcttcgggtggacccggtcaacttcaagctcctaagccactgcctgctggtgagcccatc

SEQ ID NO: 3582 - protein, 430 aa, Zea mays subsp. mays
  peptide (1)..(430): Ceres Seq. ID no. 12372658
  misc_feature (1)..(430): Homolog of NCBI NO: 38344839 NR Description: OSJNBa0064H22.20 [Oryza sativa (japonica
  misc_feature (14)..(422): Homolog of NCBI NO: 14029015 NR Description: Unknown protein [Oryza sativa]
  misc_feature (14)..(424): Homolog of NCBI NO: 15292869 NR Description: unknown protein [Arabidopsis thaliana]
  misc_feature (14)..(424): Homolog of NCBI NO: 18401703 NR Description: expressed protein; protein id: At1g47380.1
  misc_feature (31)..(422): Homolog of NCBI NO: 34914644 NR Description: OSJNBa0054L14.21 [Oryza sativa (japonica
  misc_feature (14)..(354): Homolog of NCBI NO: 16930415 NR Description: At1g09160/T12M4_13 [Arabidopsis thaliana]
  misc_feature (14)..(422): Homolog of NCBI NO: 15221404 NR Description: putative protein phosphatase
  misc_feature (14)..(427): Homolog of NCBI NO: 15217454 NR Description: putative protein phosphatase 2C
  misc_feature (1)..(357): Homolog of NCBI NO: 34898168 NR Description: protein phosphatase 2C-like
  misc_feature (1)..(430): Homolog of NCBI NO: 34394411 NR Description: protein phosphatase 2C-like
MAFAASEGNLSPALPLATLIGRELRGDGTERPHVRYGHSGFAKRGEDYFLVKPDCLRVPGDPSSSFSVFAVFDGHNGVSAAVFSKEKLLEHVMSAVPEGISREDWLQALPRALVAGFVKTDIDFQRKGETSGTTATLVVVDGFTVTVASVGDSRCILDTQGGEVSLLTVDHRLEENAEERERVTASGGEVSRLNLCGGQEVGPLRCWPGGLCLSRSIGDTDVGEFIVPIPHVKQVKLPNTGGRLIIASDGIWDALSSESAAQACRGLRAELAAKLVVKQALKTSGLKDDTTCVVVDIIPSDHCSTPPALSPKKNQNKLKHLIFGKRSHSSVGKLSKSASLGSVEEIFEEGSAMLEERLGSNFPPKANLPPFRCAICQVDQEPFEGLMTDNVGGCCSTPSTPWGGPYLCSGCRKKNDAMEGKRSNRSTTCR

SEQ ID NO: 3583 - protein, 338 aa, Zea mays subsp. mays
  peptide (1)..(338): Ceres Seq. ID no. 12372659
  misc_feature (1)..(338): Homolog of NCBI NO: 38344839 NR Description: OSJNBa0064H22.20 [Oryza sativa (japonica
  misc_feature (1)..(330): Homolog of NCBI NO: 14029015 NR Description: Unknown protein [Oryza sativa]
  misc_feature (1)..(332): Homolog of NCBI NO: 15292869 NR Description: unknown protein [Arabidopsis thaliana]
  misc_feature (1)..(332): Homolog of NCBI NO: 18401703 NR Description: expressed protein; protein id: At1g47380.1
  misc_feature (1)..(330): Homolog of NCBI NO: 34914644 NR Description: OSJNBa0054L14.21 [Oryza sativa (japonica
  misc_feature (1)..(262): Homolog of NCBI NO: 16930415 NR Description: At1g09160/T12M4_13 [Arabidopsis thaliana]
  misc_feature (1)..(330): Homolog of NCBI NO: 15221404 NR Description: putative protein phosphatase
  misc_feature (1)..(335): Homolog of NCBI NO: 15217454 NR Description: putative protein phosphatase 2C
  misc_feature (1)..(265): Homolog of NCBI NO: 34898168 NR Description: protein phosphatase 2C-like
  misc_feature (1)..(338): Homolog of NCBI NO: 34394411 NR Description: protein phosphatase 2C-like
MSAVPEGISREDWLQALPRALVAGFVKTDIDFQRKGETSGTTATLVVVDGFTVTVASVGDSRCILDTQGGEVSLLTVDHRLEENAEERERVTASGGEVSRLNLCGGQEVGPLRCWPGGLCLSRSIGDTDVGEFIVPIPHVKQVKLPNTGGRLIIASDGIWDALSSESAAQACRGLRAELAAKLVVKQALKTSGLKDDTTCVVVDIIPSDHCSTPPALSPKKNQNKLKHLIFGKRSHSSVGKLSKSASLGSVEEIFEEGSAMLEERLGSNFPPKANLPPFRCAICQVDQEPFEGLMTDNVGGCCSTPSTPWGGPYLCSGCRKKNDAMEGKRSNRSTTCR

SEQ ID NO: 3584 - DNA, 1135 bp, Zea mays subsp. mays
  misc_feature (1)..(1135): Ceres Seq. ID no. 12410133
  misc_feature: MA Experiment ID: 20000535 Result: Down-regulated in Transcription
  misc_feature: MA Experiment 20000535 PARAMETER Experiment Name: Zm_Hybrid_Seed_Dev_P Parameter: DAP Value: 30 vs. 12
  misc_feature: MA Experiment 20000535 PARAMETER Experiment Name: Zm_Hybrid_Seed_Dev_P Parameter: Organism Value: Zea mays
  misc_feature: MA Experiment 20000535 PARAMETER Experiment Name: Zm_Hybrid_Seed_Dev_P Parameter: Plant Line Value: 35A19
  misc_feature: MA Experiment 20000535 PARAMETER Experiment Name: Zm_Hybrid_Seed_Dev_P Parameter: Tissue Value: Embryo vs. Unfert Floret
gaagaatagccttgtctagcaagaagaagatagagggatgatgtgattatacgcaaaatactaaaacctagggtggtagtacaagcagtagttatgagcaggcctcttctctttctttcctgttccgttctttttctttttccctgcggaattccccttcttccctagtgcctcgattcgatatttcgattggattggattaccaagggacagagggagggaatcccacacacacctctggccctcgcgaggccaagggaagggaagcactcagcacccagcagcagaaggaccgccgtaaatggcgctgccggtggcgaagctggggaccctggcgctgcggacgctgtccaagcccatcgccagccgcctcaagagccaggccgctgtccaccccaagttccgcaacttcatcatcgccatcgcccaggcaaaccaccagatcaccacaaagatacagaggcgcatttatgagcatgccacagatgtggcgatcaggcctttggatgagcagaaagctgttcaagctgctacagatctcatcggggaagcctttatcttctcggtcgctgttgctgctctaatttttgaggttcagagaaacgcaaggtccgaggctaggaaggaggaagctcgtagacaggaacttgaggaattgaaacgaagggaagagagtatagctaaagaattggaagatcttaaattgaagcttagtgaaattgagcagcttgctaaagggcgaggcctgacaggaatcttgaacttgaaacgggtccatggcacagaggtcggcaaggcagcagcacctctgcgtgagtaagcaatccggctttggcgcaggaaagtatgattccttgtcgcccccattatttggtaagacttgtgttgtcgtgctcaacctattctttggtgctcatattggatccacatttgtagtggttgatccatggacaccctgagacagtggtaataatacagcgtaacaaagaaatcaaattaaagcgcaatatgtatgtgctacttggtggcggtgaccacaaaatcagatgttaagatggattagggcttgtttggttgtatacttaaggtgtaaaaaatgccacgtttcagattaaagctggttgtttggactgtc

SEQ ID NO: 3585 - protein, 172 aa, Zea mays subsp. mays
  peptide (1)..(172): Ceres Seq. ID no. 12410134
  misc_feature (3)..(133): Homolog of NCBI NO: 23482917 NR Description: Arabidopsis thaliana At1g28510/F3M18_5
  misc_feature (2)..(137): Homolog of NCBI NO: 13376717 NR Description: OPA3 protein; Optic atrophy 3 (Iraqi-Jewish
  misc_feature (4)..(136): Homolog of NCBI NO: 24649440 NR Description: CG13601-PA [Drosophila melanogaster]
  misc_feature (2)..(144): Homolog of NCBI NO: 27676608 NR Description: similar to OPA3 protein
  misc_feature (2)..(144): Homolog of NCBI NO: 21758920 NR Description: unnamed protein product [Homo sapiens]
  misc_feature (2)..(144): Homolog of NCBI NO: 39849948 NR Description: Unknown (protein for MGC:75494) [Homo sapiens]
  misc_feature (7)..(118): Homolog of NCBI NO: 19112998 NR Description: hypothetical coiled-coil protein
  misc_feature (1)..(145): Homolog of NCBI NO: 15230967 NR Description: putative protein; protein id: At3g58150.1
  misc_feature (1)..(165): Homolog of NCBI NO: 18396819 NR Description: expressed protein
  misc_feature (1)..(169): Homolog of NCBI NO: 34904528 NR Description: B1066G12.9 [Oryza sativa (japonica
MALPVAKLGTLALRTLSKPIASRLKSQAAVHPKFRNFIIAIAQANHQITTKIQRRIYEHATDVAIRPLDEQKAVQAATDLIGEAFIFSVAVAALIFEVQRNARSEARKEEARRQELEELKRREESIAKELEDLKLKLSEIEQLAKGRGLTGILNLKRVHGTEVGKAAAPLRE

SEQ ID NO: 3586 - DNA, 1885 bp, Zea mays subsp. mays
  misc_feature (1)..(1885): Ceres Seq. ID no. 12365283
  misc_feature: MA Experiment ID: 108522 Result: Down-regulated in Transcription
  misc_feature: MA Experiment 108522 PARAMETER Experiment Name: Zm_42deg_Heat_P Parameter: Age (day) Value: 8
  misc_feature: MA Experiment 108522 PARAMETER Experiment Name: Zm_42deg_Heat_P Parameter: Organism Value: Zea mays
  misc_feature: MA Experiment 108522 PARAMETER Experiment Name: Zm_42deg_Heat_P Parameter: Plant Line Value: 35A19
  misc_feature: MA Experiment 108522 PARAMETER Experiment Name: Zm_42deg_Heat_P Parameter: Temperature (deg C) Value: 42 vs. 22
  misc_feature: MA Experiment 108522 PARAMETER Experiment Name: Zm_42deg_Heat_P Parameter: Timepoint (hr) Value: 1
  misc_feature: MA Experiment 108522 PARAMETER Experiment Name: Zm_42deg_Heat_P Parameter: Tissue Value: Aerial
  misc_feature: MA Experiment ID: 108535 Result: Up-regulated in Transcription
  misc_feature: MA Experiment 108535 PARAMETER Experiment Name: Zm_Meristem_P Parameter: Age (day) Value: 8
  misc_feature: MA Experiment 108535 PARAMETER Experiment Name: Zm_Meristem_P Parameter: Organism Value: Zea mays
  misc_feature: MA Experiment 108535 PARAMETER Experiment Name: Zm_Meristem_P Parameter: Plant Line Value: 35A19
  misc_feature: MA Experiment 108535 PARAMETER Experiment Name: Zm_Meristem_P Parameter: Tissue Value: Root Meristem vs. Above Root Meristem
  misc_feature: MA Experiment ID: 108544 Result: Down-regulated in Transcription
  misc_feature: MA Experiment ID: 20000478 Result: Down-regulated in Transcription
  misc_feature: MA Experiment 20000478 PARAMETER Experiment Name: Zm_5mM_SA_P Parameter: Age (day) Value: 11
  misc_feature: MA Experiment 20000478 PARAMETER Experiment Name: Zm_5mM_SA_P Parameter: Organism Value: Zea mays
  misc_feature: MA Experiment 20000478 PARAMETER Experiment Name: Zm_5mM_SA_P Parameter: Plant Line Value: 35A19
  misc_feature: MA Experiment 20000478 PARAMETER Experiment Name: Zm_5mM_SA_P Parameter: Timepoint (hr) Value: 72
  misc_feature: MA Experiment 20000478 PARAMETER Experiment Name: Zm_5mM_SA_P Parameter: Tissue Value: Aerial
  misc_feature: MA Experiment 20000478 PARAMETER Experiment Name: Zm_5mM_SA_P Parameter: Treatment Value: 5mM SA vs. No Treatment
  misc_feature: MA Experiment ID: 20000492 Result: Up-regulated in Transcription
  misc_feature: MA Experiment 20000492 PARAMETER Experiment Name: Zm_Hybrid_Seed_Dev_P Parameter: DAP Value: 12
  misc_feature: MA Experiment 20000492 PARAMETER Experiment Name: Zm_Hybrid_Seed_Dev_P Parameter: Organism Value: Zea mays
  misc_feature: MA Experiment 20000492 PARAMETER Experiment Name: Zm_Hybrid_Seed_Dev_P Parameter: Plant Line Value: 35A19
  misc_feature: MA Experiment 20000492 PARAMETER Experiment Name: Zm_Hybrid_Seed_Dev_P Parameter: Tissue Value: Fert Kernel vs. Unfert Floret
attccctactcaaacgcagccgccgagcgcctctcgcctctcgccctacaggaggcaccctacagaacccaaccaaaaagcgccggcggcaaacagaacccaacccaaagcgccggcggcaagcgaagagaaagcgccggcactaatccgacgatggacgcgtcggccggcggcggcggcaactccctgccgaccactggcgcggacgggtcgaagcgccgcgtcttctacttctacgacgcggaggtgggcaactactactacgggcagggccacccgatgaagccgcaccgcatccgcatgacccacgcgctgctcggccgctacggcctcctcgaccagatgcaagtgttccgccctcaccctgcccgcgaccgcgacctctgccgcttccacgccgacgattacgtctccttcctccggtccgtcacccccgaaacgcagcaggaccagatccgcgcgctcaagcgcttcaacgtcggcgaggactgccccgtcttcgacggtctctacagtttctgtcagacgtacgcggggggctctgttggcggcgccgtcaagctcaaccatggccatgatatcgccatcaactgggccggcggactccaccacgccaagaagtgcgaggcctccgggttttgctatgttaatgacattgtcctcgccatcctcgagctcctcaagtaccaccagcgcgttctgtacgtggacattgatatccaccacggggacggcgtggaggaggctttttataccacagaccgggtgatgacagtctcattccacaagtttggagattatttccctgggacaggggacattcgtgatgttgggcactcaaagggtaaatattactccctgaatgttcccctggacgatggtattgatgatgagagctaccagtcgttgttcaagccaataatgggcaaggtgatggaggtcttcaaccctggtgcagtcgtgctccagtgtggtgcggattcattgtcgggtgacaggttgggctgtttcaacctctctattaagggtcacgcagaatgtgtaagatttatgaggtccttcaacgtcccgctgttgctgcttggtggtggtgggtataccataagaaacgttgcacggtgttggtgctacgagacaggagttgcccttggtcatgagctcactgacaagatgccacctaatgagtactatgagtattttggtccagattacactctacatgtcgctccaagtaacatggagaataaaaacacacggcatcaattggatgacataaaatcaaaacttctagataatctttcaaaactccgacatgctcctagtgttcagtttcaagagcgatctcctgaggctgagttacctgagcaagatgaagacaaagagaatcctgatgaaagacatgatgctgattctgatgtggagatgaatgatgccaaacctttgcaggactctggaaggatgtcaatagtgtagctgcagaacattctagaggcactggacctgtggctgatggagttggttcctcgaaacaaacctttccgaatgccactagtcgaatggccatagatgaaccaaacgctcttgagagttgagcaagagggttcaaacaaattgcaggaccaaccatcgatgcacctcaagtagctaatgtcatctgtagcctgtcgattcttttgcgcaaattcattaactgtaggcaagccatgcgtggactgaagcagggagcagaagtaagtgctcgaccaagaagttgtgcatctgaaatctatattttttgcgcgtcatatttgtattaccgacagttgcaaacgatggtttaatcatgaaaaatttgtctttccacccttggcttctgcagtggaaggggttgatatcgtagtatgcg

SEQ ID NO: 3587 - protein, 490 aa, Zea mays subsp. mays
  peptide (1)..(490): Ceres Seq. ID no. 12365284
  misc_feature (70)..(484): Homolog of NCBI NO: 30583783 NR Description: Homo sapiens histone deacetylase 1 [synthetic
  misc_feature (70)..(484): Homolog of NCBI NO: 13128860 NR Description: histone deacetylase 1
  misc_feature (70)..(484): Homolog of NCBI NO: 2347180 NR Description: putative histone deacetylase [Mus musculus]
  misc_feature (70)..(484): Homolog of NCBI NO: 6680193 NR Description: histone deacetylase 1 [Mus musculus]
  misc_feature (59)..(477): Homolog of NCBI NO: 9022439 NR Description: histone deacetylase [Mesembryanthemum
  misc_feature (59)..(481): Homolog of NCBI NO: 2318131 NR Description: histone deacetylase [Arabidopsis thaliana]
  misc_feature (59)..(481): Homolog of NCBI NO: 15233694 NR Description: Histone deacetylase
  misc_feature (52)..(489): Homolog of NCBI NO: 12698880 NR Description: histone deacetylase HD1 [Oryza sativa]
  misc_feature (52)..(490): Homolog of NCBI NO: 3023947 NR Description: Probable histone deacetylase (RPD3 homolog)
  misc_feature (52)..(490): Homolog of NCBI NO: 14550104 NR Description: histone deacetylase HDA101 [Zea mays]
IPYSNAAAERLSPLALQEAPYRTQPKSAGGKQNPTQSAGGKRRESAGTNPTMDASAGGGGNSLPTTGADGSKRRVFYFYDAEVGNYYYGQGHPMKPHRIRMTHALLGRYGLLDQMQVFRPHPARDRDLCRFHADDYVSFLRSVTPETQQDQIRALKRFNVGEDCPVFDGLYSFCQTYAGGSVGGAVKLNHGHDIAINWAGGLHHAKKCEASGFCYVNDIVLAILELLKYHQRVLYVDIDIHHGDGVEEAFYTTDRVMTVSFHKFGDYFPGTGDIRDVGHSKGKYYSLNVPLDDGIDDESYQSLFKPIMGKVMEVFNPGAVVLQCGADSLSGDRLGCFNLSIKGHAECVRFMRSFNVPLLLLGGGGYTIRNVARCWCYETGVALGHELTDKMPPNEYYEYFGPDYTLHVAPSNMENKNTRHQLDDIKSKLLDNLSKLRHAPSVQFQERSPEAELPEQDEDKENPDERHDADSDVEMNDAKPLQDSGRMSIV

SEQ ID NO: 3588 - protein, 439 aa, Zea mays subsp. mays
  peptide (1)..(439): Ceres Seq. ID no. 12365285
  misc_feature (19)..(433): Homolog of NCBI NO: 30583783 NR Description: Homo sapiens histone deacetylase 1 [synthetic
  misc_feature (19)..(433): Homolog of NCBI NO: 13128860 NR Description: histone deacetylase 1
  misc_feature (19)..(433): Homolog of NCBI NO: 2347180 NR Description: putative histone deacetylase [Mus musculus]
  misc_feature (19)..(433): Homolog of NCBI NO: 6680193 NR Description: histone deacetylase 1 [Mus musculus]
  misc_feature (8)..(426): Homolog of NCBI NO: 9022439 NR Description: histone deacetylase [Mesembryanthemum
  misc_feature (8)..(430): Homolog of NCBI NO: 2318131 NR Description: histone deacetylase [Arabidopsis thaliana]
  misc_feature (8)..(430): Homolog of NCBI NO: 15233694 NR Description: Histone deacetylase
  misc_feature (1)..(438): Homolog of NCBI NO: 12698880 NR Description: histone deacetylase HD1 [Oryza sativa]
  misc_feature (1)..(439): Homolog of NCBI NO: 3023947 NR Description: Probable histone deacetylase (RPD3 homolog)
  misc_feature (1)..(439): Homolog of NCBI NO: 14550104 NR Description: histone deacetylase HDA101 [Zea mays]
MDASAGGGGNSLPTTGADGSKRRVFYFYDAEVGNYYYGQGHPMKPHRIRMTHALLGRYGLLDQMQVFRPHPARDRDLCRFHADDYVSFLRSVTPETQQDQIRALKRFNVGEDCPVFDGLYSFCQTYAGGSVGGAVKLNHGHDIAINWAGGLHHAKKCEASGFCYVNDIVLAILELLKYHQRVLYVDIDIHHGDGVEEAFYTTDRVMTVSFHKFGDYFPGTGDIRDVGHSKGKYYSLNVPLDDGIDDESYQSLFKPIMGKVMEVFNPGAVVLQCGADSLSGDRLGCFNLSIKGHAECVRFMRSFNVPLLLLGGGGYTIRNVARCWCYETGVALGHELTDKMPPNEYYEYFGPDYTLHVAPSNMENKNTRHQLDDIKSKLLDNLSKLRHAPSVQFQERSPEAELPEQDEDKENPDERHDADSDVEMNDAKPLQDSGRMSIV

SEQ ID NO: 3589 - protein, 397 aa, Zea mays subsp. mays
  peptide (1)..(397): Ceres Seq. ID no. 12365286
  misc_feature (1)..(391): Homolog of NCBI NO: 30583783 NR Description: Homo sapiens histone deacetylase 1 [synthetic
  misc_feature (1)..(391): Homolog of NCBI NO: 13128860 NR Description: histone deacetylase 1
  misc_feature (1)..(391): Homolog of NCBI NO: 2347180 NR Description: putative histone deacetylase [Mus musculus]
  misc_feature (1)..(391): Homolog of NCBI NO: 6680193 NR Description: histone deacetylase 1 [Mus musculus]
  misc_feature (1)..(384): Homolog of NCBI NO: 9022439 NR Description: histone deacetylase [Mesembryanthemum
  misc_feature (1)..(388): Homolog of NCBI NO: 2318131 NR Description: histone deacetylase [Arabidopsis thaliana]
  misc_feature (1)..(388): Homolog of NCBI NO: 15233694 NR Description: Histone deacetylase
  misc_feature (1)..(396): Homolog of NCBI NO: 12698880 NR Description: histone deacetylase HD1 [Oryza sativa]
  misc_feature (1)..(397): Homolog of NCBI NO: 3023947 NR Description: Probable histone deacetylase (RPD3 homolog)
  misc_feature (1)..(397): Homolog of NCBI NO: 14550104 NR Description: histone deacetylase HDA101 [Zea mays]
MKPHRIRMTHALLGRYGLLDQMQVFRPHPARDRDLCRFHADDYVSFLRSVTPETQQDQIRALKRFNVGEDCPVFDGLYSFCQTYAGGSVGGAVKLNHGHDIAINWAGGLHHAKKCEASGFCYVNDIVLAILELLKYHQRVLYVDIDIHHGDGVEEAFYTTDRVMTVSFHKFGDYFPGTGDIRDVGHSKGKYYSLNVPLDDGIDDESYQSLFKPIMGKVMEVFNPGAVVLQCGADSLSGDRLGCFNLSIKGHAECVRFMRSFNVPLLLLGGGGYTIRNVARCWCYETGVALGHELTDKMPPNEYYEYFGPDYTLHVAPSNMENKNTRHQLDDIKSKLLDNLSKLRHAPSVQFQERSPEAELPEQDEDKENPDERHDADSDVEMNDAKPLQDSGRMSIV

SEQ ID NO: 3590 - DNA, 1428 bp, Zea mays subsp. mays
  misc_feature (1)..(1428): Ceres Seq. ID no. 15180566
  misc_feature: MA Experiment ID: 108523 Result: Up-regulated in Transcription
  misc_feature: MA Experiment 108523 PARAMETER Experiment Name: Zm_42deg_Heat_P Parameter: Age (day) Value: 8
  misc_feature: MA Experiment 108523 PARAMETER Experiment Name: Zm_42deg_Heat_P Parameter: Organism Value: Zea mays
  misc_feature: MA Experiment 108523 PARAMETER Experiment Name: Zm_42deg_Heat_P Parameter: Plant Line Value: 35A19
  misc_feature: MA Experiment 108523 PARAMETER Experiment Name: Zm_42deg_Heat_P Parameter: Temperature (deg C) Value: 42 vs. 22
  misc_feature: MA Experiment 108523 PARAMETER Experiment Name: Zm_42deg_Heat_P Parameter: Timepoint (hr) Value: 6
  misc_feature: MA Experiment 108523 PARAMETER Experiment Name: Zm_42deg_Heat_P Parameter: Tissue Value: Aerial
  misc_feature: MA Experiment ID: 108527 Result: Down-regulated in Transcription
  misc_feature: MA Experiment 108527 PARAMETER Experiment Name: Zm_5mM_NO_P Parameter: Age (day) Value: 8
  misc_feature: MA Experiment 108527 PARAMETER Experiment Name: Zm_5mM_NO_P Parameter: Organism Value: Zea mays
  misc_feature: MA Experiment 108527 PARAMETER Experiment Name: Zm_5mM_NO_P Parameter: Plant Line Value: 35A19
  misc_feature: MA Experiment 108527 PARAMETER Experiment Name: Zm_5mM_NO_P Parameter: Timepoint (hr) Value: 6
  misc_feature: MA Experiment 108527 PARAMETER Experiment Name: Zm_5mM_NO_P Parameter: Tissue Value: Aerial
  misc_feature: MA Experiment 108527 PARAMETER Experiment Name: Zm_5mM_NO_P Parameter: Treatment Value: 5mM NO vs. No Treatment
  misc_feature: MA Experiment ID: 108535 Result: Up-regulated in Transcription
  misc_feature: MA Experiment 108535 PARAMETER Experiment Name: Zm_Meristem_P Parameter: Age (day) Value: 8
  misc_feature: MA Experiment 108535 PARAMETER Experiment Name: Zm_Meristem_P Parameter: Organism Value: Zea mays
  misc_feature: MA Experiment 108535 PARAMETER Experiment Name: Zm_Meristem_P Parameter: Plant Line Value: 35A19
  misc_feature: MA Experiment 108535 PARAMETER Experiment Name: Zm_Meristem_P Parameter: Tissue Value: Root Meristem vs. Above Root Meristem
  misc_feature: MA Experiment ID: 108543 Result: Up-regulated in Transcription
  misc_feature: MA Experiment ID: 108556 Result: Down-regulated in Transcription
  misc_feature: MA Experiment 108556 PARAMETER Experiment Name: Zm_Drought_P Parameter: Age (day) Value: 9
  misc_feature: MA Experiment 108556 PARAMETER Experiment Name: Zm_Drought_P Parameter: Organism Value: Zea mays
  misc_feature: MA Experiment 108556 PARAMETER Experiment Name: Zm_Drought_P Parameter: Plant Line Value: 35A19
  misc_feature: MA Experiment 108556 PARAMETER Experiment Name: Zm_Drought_P Parameter: Timepoint (hr) Value: 24
  misc_feature: MA Experiment 108556 PARAMETER Experiment Name: Zm_Drought_P Parameter: Tissue Value: Aerial
  misc_feature: MA Experiment 108556 PARAMETER Experiment Name: Zm_Drought_P Parameter: Treatment Value: Drought vs. No Drought
  misc_feature: MA Experiment ID: 20000108 Result: Up-regulated in Transcription
  misc_feature: MA Experiment 20000108 PARAMETER Experiment Name: Zm_Root-Tips_P Parameter: Age (day) Value: 12
  misc_feature: MA Experiment 20000108 PARAMETER Experiment Name: Zm_Root-Tips_P Parameter: Organism Value: Zea mays
  misc_feature: MA Experiment 20000108 PARAMETER Experiment Name: Zm_Root-Tips_P Parameter: Tissue Value: Root tips vs. Root mid region    35
  misc_feature: MA Experiment 20000108 PARAMETER Experiment Name: Zm_Root-Tips_P Parameter: Tissue Value: Root tips vs. Root mid region   Sequence Listing-Misc Features (4)
  misc_feature: MA Experiment ID: 20000479 Result: Down-regulated in Transcription
  misc_feature: MA Experiment 20000479 PARAMETER Experiment Name: Zm_Drought_P Parameter: Age (day) Value: 10
  misc_feature: MA Experiment 20000479 PARAMETER Experiment Name: Zm_Drought_P Parameter: Organism Value: Zea mays
  misc_feature: MA Experiment 20000479 PARAMETER Experiment Name: Zm_Drought_P Parameter: Plant Line Value: 35A19
  misc_feature: MA Experiment 20000479 PARAMETER Experiment Name: Zm_Drought_P Parameter: Timepoint (hr) Value: 48
  misc_feature: MA Experiment 20000479 PARAMETER Experiment Name: Zm_Drought_P Parameter: Tissue Value: Aerial
  misc_feature: MA Experiment 20000479 PARAMETER Experiment Name: Zm_Drought_P Parameter: Treatment Value: Drought vs. No Drought
  misc_feature: MA Experiment ID: 20000480 Result: Down-regulated in Transcription
  misc_feature: MA Experiment 20000480 PARAMETER Experiment Name: Zm_Drought_P Parameter: Age (day) Value: 11
  misc_feature: MA Experiment 20000480 PARAMETER Experiment Name: Zm_Drought_P Parameter: Organism Value: Zea mays
  misc_feature: MA Experiment 20000480 PARAMETER Experiment Name: Zm_Drought_P Parameter: Plant Line Value: 35A19
  misc_feature: MA Experiment 20000480 PARAMETER Experiment Name: Zm_Drought_P Parameter: Timepoint (hr) Value: 72
  misc_feature: MA Experiment 20000480 PARAMETER Experiment Name: Zm_Drought_P Parameter: Tissue Value: Aerial
  misc_feature: MA Experiment 20000480 PARAMETER Experiment Name: Zm_Drought_P Parameter: Treatment Value: Drought vs. No Drought
  misc_feature: MA Experiment ID: 20000492 Result: Up-regulated in Transcription
  misc_feature: MA Experiment 20000492 PARAMETER Experiment Name: Zm_Hybrid_Seed_Dev_P Parameter: DAP Value: 12
  misc_feature: MA Experiment 20000492 PARAMETER Experiment Name: Zm_Hybrid_Seed_Dev_P Parameter: Organism Value: Zea mays
  misc_feature: MA Experiment 20000492 PARAMETER Experiment Name: Zm_Hybrid_Seed_Dev_P Parameter: Plant Line Value: 35A19
  misc_feature: MA Experiment 20000492 PARAMETER Experiment Name: Zm_Hybrid_Seed_Dev_P Parameter: Tissue Value: Fert Kernel vs. Unfert Floret
  misc_feature: MA Experiment ID: 20000534 Result: Down-regulated in Transcription
  misc_feature: MA Experiment 20000534 PARAMETER Experiment Name: Zm_Hybrid_Pollen_P Parameter: Age (day) Value: 8
  misc_feature: MA Experiment 20000534 PARAMETER Experiment Name: Zm_Hybrid_Pollen_P Parameter: Organism Value: Zea mays
  misc_feature: MA Experiment 20000534 PARAMETER Experiment Name: Zm_Hybrid_Pollen_P Parameter: Plant Line Value: 35A19
  misc_feature: MA Experiment 20000534 PARAMETER Experiment Name: Zm_Hybrid_Pollen_P Parameter: Tissue Value: Pollen vs. Aerial
  misc_feature: MA Experiment ID: 20000535 Result: Up-regulated in Transcription
  misc_feature: MA Experiment 20000535 PARAMETER Experiment Name: Zm_Hybrid_Seed_Dev_P Parameter: DAP Value: 30 vs. 12
  misc_feature: MA Experiment 20000535 PARAMETER Experiment Name: Zm_Hybrid_Seed_Dev_P Parameter: Organism Value: Zea mays
  misc_feature: MA Experiment 20000535 PARAMETER Experiment Name: Zm_Hybrid_Seed_Dev_P Parameter: Plant Line Value: 35A19
  misc_feature: MA Experiment 20000535 PARAMETER Experiment Name: Zm_Hybrid_Seed_Dev_P Parameter: Tissue Value: Embryo vs. Unfert Floret
  misc_feature: MA Experiment ID: 20000626 Result: Down-regulated in Transcription
  misc_feature: MA Experiment 20000626 PARAMETER Experiment Name: Zm_Herbicide-Treatments_P Parameter: Timepoint (hr) Value: 12
  misc_feature: MA Experiment 20000626 PARAMETER Experiment Name: Zm_Herbicide-Treatments_P Parameter: Tissue Value: Aerial
  misc_feature: MA Experiment 20000626 PARAMETER Experiment Name: Zm_Herbicide-Treatments_P Parameter: Treatment Value: Roundup vs. No Treatment
atcctaccaggcaccactcgcatcgtgtgctcagtcagatccccgtcccgcatttcctaaggccaggttagttggcattgaagacgatgactgcttctgcagctgctggtgtgcagatggtggctgcacgcccttgcatttcggcctcgccaggaattcttaccgcacgggtagcagtttctaggactgattgcatgctcagtaccactgctacattccccaaaatcagctgctcctggcctctaaggtttaagcgcaatgatgttgttgtaagagcaatatcggaagagtgtggcccgcaggggcttcccattgatctcagaggtaaaagggcattcattgctggagttgctgatgataatggctatggatgggcaattgcgaaggcacttgctgcggctggtgctgaaattcttgtgggtacatgggtgccggcacttaacatatttgagacaagtctgaggcgtggaaagtttgatgaatcacggaagctgccagatggatctcttatggatattgttaaagtctatccacttgatgctgtctacgattcccctgatgatgttcctgaagatgtcaaatcgaacaaaagatatgcaggggcatcaaactggacagtaaaggaagttgttgaatcagtgaggaatgattttggcagcattgacatactagtgcattctcttgctaatggcccagaggtaacgaagcctttgttggaaacctcaagaagaggctatcttgcggcaatttctgcatccagttactcctatgtttcattgcttcagcacttccttcctataatgaatcccggtggtgctagcatctctctaacatacattgcatctgaaagggcgattcctgggtatggtggtgggatgagttctgctaaagcagctcttgagagtgatacacgggtgcttgcattcgaagctgggcgaaaaggcaaaatcagagttaacaccatatcagcaggccctcttgggagccgagctgctaaggcaattggatttattgagaagatgatagagtactcatatgttaatgcaccattgcagaaggagctgttggctgatgaggtggggaacacagctgcattcctggtttcttcattggcttctgccatcaccggctcgactgtttatgttgacaatgggctcaatacaatggggcttgcaattgacagccctaccataacgtcatagatgtggttgtggtagatagacgacctttcctgctgcattgcggtatcatccttgaataaagatcatagttagttattagtatgagaggtaagggcaggaaagggggaaaattatgaactggtcttttgcgctttctttgctggagaggaacattagagcgatttccagaatgatgggatgctattatgtgatttcatatgattcagaagcagtacaataactccct

SEQ ID NO: 3591 - protein, 371 aa, Zea mays subsp. mays
  peptide (1)..(371): Ceres Seq. ID no. 15180567
  misc_feature (1)..(371): Homolog of NCBI NO: 7489537 NR Description: probable enoyl-
  misc_feature (1)..(371): Homolog of NCBI NO: 38637198 NR Description: putative enoyl-ACP reductase
  misc_feature (1)..(367): Homolog of NCBI NO: 7488486 NR Description: probable enoyl-
  misc_feature (1)..(367): Homolog of NCBI NO: 7489119 NR Description: enoyl-
  misc_feature (4)..(367): Homolog of NCBI NO: 14422259 NR Description: enoyl-[acyl-carrier protein] reductase [Brassica
  misc_feature (1)..(367): Homolog of NCBI NO: 14422257 NR Description: enoyl-[acyl-carrier protein] reductase [Brassica
  misc_feature (1)..(367): Homolog of NCBI NO: 99805 NR Description: enoyl-
  misc_feature (1)..(367): Homolog of NCBI NO: 14422261 NR Description: enoyl-[acyl carrier-protein] reductase [Brassica
  misc_feature (1)..(367): Homolog of NCBI NO: 461461 NR Description: Enoyl-
  misc_feature (1)..(367): Homolog of NCBI NO: 14422255 NR Description: enoyl-[acyl-carrier protein] reductase [Brassica
MTASAAAGVQMVAARPCISASPGILTARVAVSRTDCMLSTTATFPKISCSWPLRFKRNDVVVRAISEECGPQGLPIDLRGKRAFIAGVADDNGYGWAIAKALAAAGAEILVGTWVPALNIFETSLRRGKFDESRKLPDGSLMDIVKVYPLDAVYDSPDDVPEDVKSNKRYAGASNWTVKEVVESVRNDFGSIDILVHSLANGPEVTKPLLETSRRGYLAAISASSYSYVSLLQHFLPIMNPGGASISLTYIASERAIPGYGGGMSSAKAALESDTRVLAFEAGRKGKIRVNTISAGPLGSRAAKAIGFIEKMIEYSYVNAPLQKELLADEVGNTAAFLVSSLASAITGSTVYVDNGLNTMGLAIDSPTITS

SEQ ID NO: 3592 - protein, 361 aa, Zea mays subsp. mays
  peptide (1)..(361): Ceres Seq. ID no. 15180568
  misc_feature (1)..(357): Homolog of NCBI NO: 7488486 NR Description: probable enoyl-
  misc_feature (1)..(357): Homolog of NCBI NO: 7489119 NR Description: enoyl-
  misc_feature (1)..(357): Homolog of NCBI NO: 14422259 NR Description: enoyl-[acyl-carrier protein] reductase [Brassica
  misc_feature (1)..(357): Homolog of NCBI NO: 14422257 NR Description: enoyl-[acyl-carrier protein] reductase [Brassica
  misc_feature (1)..(357): Homolog of NCBI NO: 99805 NR Description: enoyl-
  misc_feature (1)..(357): Homolog of NCBI NO: 14422261 NR Description: enoyl-[acyl carrier-protein] reductase [Brassica
  misc_feature (1)..(357): Homolog of NCBI NO: 461461 NR Description: Enoyl-
  misc_feature (1)..(357): Homolog of NCBI NO: 14422255 NR Description: enoyl-[acyl-carrier protein] reductase [Brassica
  misc_feature (1)..(361): Homolog of NCBI NO: 7489537 NR Description: probable enoyl-
  misc_feature (1)..(361): Homolog of NCBI NO: 38637198 NR Description: putative enoyl-ACP reductase
MVAARPCISASPGILTARVAVSRTDCMLSTTATFPKISCSWPLRFKRNDVVVRAISEECGPQGLPIDLRGKRAFIAGVADDNGYGWAIAKALAAAGAEILVGTWVPALNIFETSLRRGKFDESRKLPDGSLMDIVKVYPLDAVYDSPDDVPEDVKSNKRYAGASNWTVKEVVESVRNDFGSIDILVHSLANGPEVTKPLLETSRRGYLAAISASSYSYVSLLQHFLPIMNPGGASISLTYIASERAIPGYGGGMSSAKAALESDTRVLAFEAGRKGKIRVNTISAGPLGSRAAKAIGFIEKMIEYSYVNAPLQKELLADEVGNTAAFLVSSLASAITGSTVYVDNGLNTMGLAIDSPTITS

SEQ ID NO: 3593 - protein, 335 aa, Zea mays subsp. mays
  peptide (1)..(335): Ceres Seq. ID no. 15180569
  misc_feature (1)..(331): Homolog of NCBI NO: 7488486 NR Description: probable enoyl-
  misc_feature (1)..(331): Homolog of NCBI NO: 7489119 NR Description: enoyl-
  misc_feature (1)..(331): Homolog of NCBI NO: 14422259 NR Description: enoyl-[acyl-carrier protein] reductase [Brassica
  misc_feature (1)..(331): Homolog of NCBI NO: 14422257 NR Description: enoyl-[acyl-carrier protein] reductase [Brassica
  misc_feature (1)..(331): Homolog of NCBI NO: 99805 NR Description: enoyl-
  misc_feature (1)..(331): Homolog of NCBI NO: 14422261 NR Description: enoyl-[acyl carrier-protein] reductase [Brassica
  misc_feature (1)..(331): Homolog of NCBI NO: 461461 NR Description: Enoyl-
  misc_feature (1)..(331): Homolog of NCBI NO: 14422255 NR Description: enoyl-[acyl-carrier protein] reductase [Brassica
  misc_feature (1)..(335): Homolog of NCBI NO: 7489537 NR Description: probable enoyl-
  misc_feature (1)..(335): Homolog of NCBI NO: 38637198 NR Description: putative enoyl-ACP reductase
MLSTTATFPKISCSWPLRFKRNDVVVRAISEECGPQGLPIDLRGKRAFIAGVADDNGYGWAIAKALAAAGAEILVGTWVPALNIFETSLRRGKFDESRKLPDGSLMDIVKVYPLDAVYDSPDDVPEDVKSNKRYAGASNWTVKEVVESVRNDFGSIDILVHSLANGPEVTKPLLETSRRGYLAAISASSYSYVSLLQHFLPIMNPGGASISLTYIASERAIPGYGGGMSSAKAALESDTRVLAFEAGRKGKIRVNTISAGPLGSRAAKAIGFIEKMIEYSYVNAPLQKELLADEVGNTAAFLVSSLASAITGSTVYVDNGLNTMGLAIDSPTITS

SEQ ID NO: 3594 - DNA, 1233 bp, Zea mays subsp. mays
  misc_feature (1)..(1233): Ceres Seq. ID no. 12410129
  misc_feature: MA Experiment ID: 20000480 Result: Up-regulated in Transcription
  misc_feature: MA Experiment 20000480 PARAMETER Experiment Name: Zm_Drought_P Parameter: Age (day) Value: 11
  misc_feature: MA Experiment 20000480 PARAMETER Experiment Name: Zm_Drought_P Parameter: Organism Value: Zea mays
  misc_feature: MA Experiment 20000480 PARAMETER Experiment Name: Zm_Drought_P Parameter: Plant Line Value: 35A19
  misc_feature: MA Experiment 20000480 PARAMETER Experiment Name: Zm_Drought_P Parameter: Timepoint (hr) Value: 72
  misc_feature: MA Experiment 20000480 PARAMETER Experiment Name: Zm_Drought_P Parameter: Tissue Value: Aerial
  misc_feature: MA Experiment 20000480 PARAMETER Experiment Name: Zm_Drought_P Parameter: Treatment Value: Drought vs. No Drought
  misc_feature: MA Experiment ID: 20000533 Result: Up-regulated in Transcription
  misc_feature: MA Experiment 20000533 PARAMETER Experiment Name: Zm_0.001percent_MeJA_P Parameter: Age (day) Value: 11
  misc_feature: MA Experiment 20000533 PARAMETER Experiment Name: Zm_0.001percent_MeJA_P Parameter: Organism Value: Zea mays
  misc_feature: MA Experiment 20000533 PARAMETER Experiment Name: Zm_0.001percent_MeJA_P Parameter: Plant Line Value: 35A19
  misc_feature: MA Experiment 20000533 PARAMETER Experiment Name: Zm_0.001percent_MeJA_P Parameter: Timepoint (hr) Value: 72
  misc_feature: MA Experiment 20000533 PARAMETER Experiment Name: Zm_0.001percent_MeJA_P Parameter: Tissue Value: Aerial
  misc_feature: MA Experiment 20000533 PARAMETER Experiment Name: Zm_0.001percent_MeJA_P Parameter: Treatment Value: 0.001percent MeJA vs. No Treatment
  misc_feature: MA Experiment ID: 20000534 Result: Down-regulated in Transcription
  misc_feature: MA Experiment 20000534 PARAMETER Experiment Name: Zm_Hybrid_Pollen_P Parameter: Age (day) Value: 8
  misc_feature: MA Experiment 20000534 PARAMETER Experiment Name: Zm_Hybrid_Pollen_P Parameter: Organism Value: Zea mays
  misc_feature: MA Experiment 20000534 PARAMETER Experiment Name: Zm_Hybrid_Pollen_P Parameter: Plant Line Value: 35A19
  misc_feature: MA Experiment 20000534 PARAMETER Experiment Name: Zm_Hybrid_Pollen_P Parameter: Tissue Value: Pollen vs. Aerial
  misc_feature: MA Experiment ID: 20001612 Result: Up-regulated in Transcription
  misc_feature: MA Experiment 20001612 PARAMETER Experiment Name: Zm_50ppm_KNO3_L-to-H_P Parameter: Age (day) Value: 19
  misc_feature: MA Experiment 20001612 PARAMETER Experiment Name: Zm_50ppm_KNO3_L-to-H_P Parameter: Organism Value: Zea mays
  misc_feature: MA Experiment 20001612 PARAMETER Experiment Name: Zm_50ppm_KNO3_L-to-H_P Parameter: Plant Line Value: 35A19
  misc_feature: MA Experiment 20001612 PARAMETER Experiment Name: Zm_50ppm_KNO3_L-to-H_P Parameter: Timepoint (hr) Value: 8
  misc_feature: MA Experiment 20001612 PARAMETER Experiment Name: Zm_50ppm_KNO3_L-to-H_P Parameter: Tissue Value: Roots
  misc_feature: MA Experiment 20001612 PARAMETER Experiment Name: Zm_50ppm_KNO3_L-to-H_P Parameter: Treatment Value: 50ppm KNO3 vs. 50ppm KCl
  misc_feature: MA Experiment ID: 20001613 Result: Up-regulated in Transcription
  misc_feature: MA Experiment 20001613 PARAMETER Experiment Name: Zm_50ppm_KNO3_L-to-H_P Parameter: Age (day) Value: 20
  misc_feature: MA Experiment 20001613 PARAMETER Experiment Name: Zm_50ppm_KNO3_L-to-H_P Parameter: Organism Value: Zea mays
  misc_feature: MA Experiment 20001613 PARAMETER Experiment Name: Zm_50ppm_KNO3_L-to-H_P Parameter: Plant Line Value: 35A19
  misc_feature: MA Experiment 20001613 PARAMETER Experiment Name: Zm_50ppm_KNO3_L-to-H_P Parameter: Timepoint (hr) Value: 24
  misc_feature: MA Experiment 20001613 PARAMETER Experiment Name: Zm_50ppm_KNO3_L-to-H_P Parameter: Tissue Value: Roots
  misc_feature: MA Experiment 20001613 PARAMETER Experiment Name: Zm_50ppm_KNO3_L-to-H_P Parameter: Treatment Value: 50ppm KNO3 vs. 50ppm KCl
atgtataacgcgacccccctccccagtccccccagcggcaaggcggcaaccgttctcccgcgtcccgcactcccgccccttttccttttgctccttccttcctcgggaagcctagggcttaggctttaagcgccgcgatgtacggcggcggcggcggcggcgggcactacgacggaggcagcggtggcgccgggaacgctaacgcgctcttcggcggcgggggcttcatgccctcacagtccacggtggtcccggagaacagcggcctctctaagggtcggagcgcgcagacgctgctcccgctcaccgtgaaacagaccatggacgcggcgcaaaccagcggtgacaggtctaatttcgccatcaacggcgttgaggtgtctacgattaggcttgttggacgcatgctaggtaaggttgagcgtgtcacagatgttgtattcactcttgatgatggtactggcaagatagatgtgaatcgctgggaaaatgaggcttccgatgctaaggagatggctgatgctaataacgagaactatgtcatagtcattggcggtttgaaaggttttcaaggaaagcgccatgtagttgcctatgctgtgcggcgtgtgacaaacttcaatgaaataacctgtcactttctgcactgcattcaggtgcatatggagctcacagggttaaagatctattcttcagctgcaacatatggaggagtagcccatgccccatcacagccaaatccggttgatggaaactacatatccaacttggtcttgagtgtttttcatgacccatctgtcatggaccaggagcatggactgcacatcaaagatgtcatagatcgtctcaaactaccagatgatgtagtcagtgcggccatccaaggtcatgttgatgtgggcaacatttacaacacaattgatgacttccactacaaatctgtccggaatggatgaccacgttgcaagtccagcgttcaggctccgtgtaggtatggagccgtttcaaggaagaagaaatgtaaaccctcttcaggatcgcctatattttgcagataggcttcatggtcaacagcttagcatatcggtttaggtgtgtattgctctcatatgtaatgatacataagatgtgagtagactaggtctacctgcaggacatcagtccgttcctacggaaatttgttatgaacgttttacattctaagacctatataaccgtgaagcacgcaaatcg

SEQ ID NO: 3595 - protein, 272 aa, Zea mays subsp. mays
  peptide (1)..(272): Ceres Seq. ID no. 12410130
  misc_feature (84)..(158): Pfam Name: OB-fold nucleic acid binding domain Pfam Description: OB-fold nucleic acid binding domain
  misc_feature (16)..(176): Homolog of NCBI NO: 40747525 NR Description: hypothetical protein AN0582.2 [Aspergillus
  misc_feature (6)..(263): Homolog of NCBI NO: 21627816 NR Description: possible replication factor-a protein
  misc_feature (22)..(253): Homolog of NCBI NO: 18400560 NR Description: putative replication protein A1
  misc_feature (16)..(254): Homolog of NCBI NO: 18396383 NR Description: putative replication factor A
  misc_feature (16)..(254): Homolog of NCBI NO: 6728969 NR Description: putative replication factor A [Arabidopsis
  misc_feature (22)..(269): Homolog of NCBI NO: 25347925 NR Description: probable replication protein A1 [imported] -
  misc_feature (212)..(271): Homolog of NCBI NO: 13516746 NR Description: replication protein A 30kDa
  misc_feature (30)..(198): Homolog of NCBI NO: 13516746 NR Description: replication protein A 30kDa
  misc_feature (212)..(271): Homolog of NCBI NO: 9801268 NR Description: replication protein A2 [Oryza sativa]
  misc_feature (30)..(198): Homolog of NCBI NO: 9801268 NR Description: replication protein A2 [Oryza sativa]
MYGGGGGGGHYDGGSGGAGNANALFGGGGFMPSQSTVVPENSGLSKGRSAQTLLPLTVKQTMDAAQTSGDRSNFAINGVEVSTIRLVGRMLGKVERVTDVVFTLDDGTGKIDVNRWENEASDAKEMADANNENYVIVIGGLKGFQGKRHVVAYAVRRVTNFNEITCHFLHCIQVHMELTGLKIYSSAATYGGVAHAPSQPNPVDGNYISNLVLSVFHDPSVMDQEHGLHIKDVIDRLKLPDDVVSAAIQGHVDVGNIYNTIDDFHYKSVRNG

SEQ ID NO: 3596 - protein, 242 aa, Zea mays subsp. mays
  peptide (1)..(242): Ceres Seq. ID no. 12410131
  misc_feature (54)..(128): Pfam Name: OB-fold nucleic acid binding domain Pfam Description: OB-fold nucleic acid binding domain
  misc_feature (1)..(146): Homolog of NCBI NO: 40747525 NR Description: hypothetical protein AN0582.2 [Aspergillus
  misc_feature (1)..(233): Homolog of NCBI NO: 21627816 NR Description: possible replication factor-a protein
  misc_feature (1)..(223): Homolog of NCBI NO: 18400560 NR Description: putative replication protein A1
  misc_feature (1)..(224): Homolog of NCBI NO: 18396383 NR Description: putative replication factor A
  misc_feature (1)..(224): Homolog of NCBI NO: 6728969 NR Description: putative replication factor A [Arabidopsis
  misc_feature (1)..(239): Homolog of NCBI NO: 25347925 NR Description: probable replication protein A1 [imported] -
  misc_feature (182)..(241): Homolog of NCBI NO: 13516746 NR Description: replication protein A 30kDa
  misc_feature (1)..(168): Homolog of NCBI NO: 13516746 NR Description: replication protein A 30kDa
  misc_feature (182)..(241): Homolog of NCBI NO: 9801268 NR Description: replication protein A2 [Oryza sativa]
  misc_feature (1)..(168): Homolog of NCBI NO: 9801268 NR Description: replication protein A2 [Oryza sativa]
MPSQSTVVPENSGLSKGRSAQTLLPLTVKQTMDAAQTSGDRSNFAINGVEVSTIRLVGRMLGKVERVTDVVFTLDDGTGKIDVNRWENEASDAKEMADANNENYVIVIGGLKGFQGKRHVVAYAVRRVTNFNEITCHFLHCIQVHMELTGLKIYSSAATYGGVAHAPSQPNPVDGNYISNLVLSVFHDPSVMDQEHGLHIKDVIDRLKLPDDVVSAAIQGHVDVGNIYNTIDDFHYKSVRNG

SEQ ID NO: 3597 - protein, 211 aa, Zea mays subsp. mays
  peptide (1)..(211): Ceres Seq. ID no. 12410132
  misc_feature (23)..(97): Pfam Name: OB-fold nucleic acid binding domain Pfam Description: OB-fold nucleic acid binding domain
  misc_feature (1)..(115): Homolog of NCBI NO: 40747525 NR Description: hypothetical protein AN0582.2 [Aspergillus
  misc_feature (1)..(202): Homolog of NCBI NO: 21627816 NR Description: possible replication factor-a protein
  misc_feature (1)..(192): Homolog of NCBI NO: 18400560 NR Description: putative replication protein A1
  misc_feature (1)..(193): Homolog of NCBI NO: 18396383 NR Description: putative replication factor A
  misc_feature (1)..(193): Homolog of NCBI NO: 6728969 NR Description: putative replication factor A [Arabidopsis
  misc_feature (1)..(208): Homolog of NCBI NO: 25347925 NR Description: probable replication protein A1 [imported] -
  misc_feature (151)..(210): Homolog of NCBI NO: 13516746 NR Description: replication protein A 30kDa
  misc_feature (1)..(137): Homolog of NCBI NO: 13516746 NR Description: replication protein A 30kDa
  misc_feature (151)..(210): Homolog of NCBI NO: 9801268 NR Description: replication protein A2 [Oryza sativa]
  misc_feature (1)..(137): Homolog of NCBI NO: 9801268 NR Description: replication protein A2 [Oryza sativa]
MDAAQTSGDRSNFAINGVEVSTIRLVGRMLGKVERVTDVVFTLDDGTGKIDVNRWENEASDAKEMADANNENYVIVIGGLKGFQGKRHVVAYAVRRVTNFNEITCHFLHCIQVHMELTGLKIYSSAATYGGVAHAPSQPNPVDGNYISNLVLSVFHDPSVMDQEHGLHIKDVIDRLKLPDDVVSAAIQGHVDVGNIYNTIDDFHYKSVRNG

SEQ ID NO: 3598 - DNA, 1375 bp, Zea mays subsp. mays
  misc_feature (1)..(1375): Ceres Seq. ID no. 12352226
  misc_feature: MA Experiment ID: 108504 Result: Down-regulated in Transcription
  misc_feature: MA Experiment 108504 PARAMETER Experiment Name: Zm_Drought_P Parameter: Age (day) Value: 8
  misc_feature: MA Experiment 108504 PARAMETER Experiment Name: Zm_Drought_P Parameter: Organism Value: Zea mays
  misc_feature: MA Experiment 108504 PARAMETER Experiment Name: Zm_Drought_P Parameter: Plant Line Value: 35A19
  misc_feature: MA Experiment 108504 PARAMETER Experiment Name: Zm_Drought_P Parameter: Timepoint (hr) Value: 12
  misc_feature: MA Experiment 108504 PARAMETER Experiment Name: Zm_Drought_P Parameter: Tissue Value: Aerial
  misc_feature: MA Experiment 108504 PARAMETER Experiment Name: Zm_Drought_P Parameter: Treatment Value: Drought vs. No Drought
  misc_feature: MA Experiment ID: 108529 Result: Up-regulated in Transcription
  misc_feature: MA Experiment 108529 PARAMETER Experiment Name: Zm_Imbibed_Seeds_P Parameter: Age (day) Value: 5 vs. 2
  misc_feature: MA Experiment 108529 PARAMETER Experiment Name: Zm_Imbibed_Seeds_P Parameter: Organism Value: Zea mays
  misc_feature: MA Experiment 108529 PARAMETER Experiment Name: Zm_Imbibed_Seeds_P Parameter: Plant Line Value: 35A19
  misc_feature: MA Experiment 108529 PARAMETER Experiment Name: Zm_Imbibed_Seeds_P Parameter: Tissue Value: Roots vs. Embryo
  misc_feature: MA Experiment ID: 108536 Result: Down-regulated in Transcription
  misc_feature: MA Experiment 108536 PARAMETER Experiment Name: Zm_Meristem_P Parameter: Age (day) Value: 8
  misc_feature: MA Experiment 108536 PARAMETER Experiment Name: Zm_Meristem_P Parameter: Organism Value: Zea mays
  misc_feature: MA Experiment 108536 PARAMETER Experiment Name: Zm_Meristem_P Parameter: Plant Line Value: 35A19
  misc_feature: MA Experiment 108536 PARAMETER Experiment Name: Zm_Meristem_P Parameter: Tissue Value: Shoot Meristem vs. Above Shoot Meristem
  misc_feature: MA Experiment ID: 108544 Result: Up-regulated in Transcription
  misc_feature: MA Experiment ID: 108547 Result: Up-regulated in Transcription
  misc_feature: MA Experiment 108547 PARAMETER Experiment Name: Zm_Imbibed_Seeds_P Parameter: Age (day) Value: 4 vs. 2
  misc_feature: MA Experiment 108547 PARAMETER Experiment Name: Zm_Imbibed_Seeds_P Parameter: Organism Value: Zea mays
  misc_feature: MA Experiment 108547 PARAMETER Experiment Name: Zm_Imbibed_Seeds_P Parameter: Plant Line Value: 35A19
  misc_feature: MA Experiment 108547 PARAMETER Experiment Name: Zm_Imbibed_Seeds_P Parameter: Tissue Value: Aerial vs. Embryo
  misc_feature: MA Experiment ID: 108559 Result: Down-regulated in Transcription
  misc_feature: MA Experiment 108559 PARAMETER Experiment Name: Zm_5mM_NO_P Parameter: Age (day) Value: 8
  misc_feature: MA Experiment 108559 PARAMETER Experiment Name: Zm_5mM_NO_P Parameter: Organism Value: Zea mays
  misc_feature: MA Experiment 108559 PARAMETER Experiment Name: Zm_5mM_NO_P Parameter: Plant Line Value: 35A19
  misc_feature: MA Experiment 108559 PARAMETER Experiment Name: Zm_5mM_NO_P Parameter: Timepoint (hr) Value: 12
  misc_feature: MA Experiment 108559 PARAMETER Experiment Name: Zm_5mM_NO_P Parameter: Tissue Value: Aerial
  misc_feature: MA Experiment 108559 PARAMETER Experiment Name: Zm_5mM_NO_P Parameter: Treatment Value: 5mM NO vs. No Treatment
  misc_feature: MA Experiment ID: 108687 Result: Down-regulated in Transcription
  misc_feature: MA Experiment 108687 PARAMETER Experiment Name: Zm_Embryos-Flowers__P Parameter: Tissue Value: Embryo vs. Aerial+
  misc_feature: MA Experiment ID: 108689 Result: Down-regulated in Transcription
  misc_feature: MA Experiment 108689 PARAMETER Experiment Name: Zm_Drought_Roots_P Parameter: Age (day) Value: 9
  misc_feature: MA Experiment 108689 PARAMETER Experiment Name: Zm_Drought_Roots_P Parameter: Organism Value: Zea mays
  misc_feature: MA Experiment 108689 PARAMETER Experiment Name: Zm_Drought_Roots_P Parameter: Plant Line Value: 35A19
  misc_feature: MA Experiment 108689 PARAMETER Experiment Name: Zm_Drought_Roots_P Parameter: Timepoint (hr) Value: 24
  misc_feature: MA Experiment 108689 PARAMETER Experiment Name: Zm_Drought_Roots_P Parameter: Tissue Value: Roots
  misc_feature: MA Experiment 108689 PARAMETER Experiment Name: Zm_Drought_Roots_P Parameter: Treatment Value: Drought vs. No Drought
  misc_feature: MA Experiment ID: 20000479 Result: Down-regulated in Transcription
  misc_feature: MA Experiment 20000479 PARAMETER Experiment Name: Zm_Drought_P Parameter: Age (day) Value: 10
  misc_feature: MA Experiment 20000479 PARAMETER Experiment Name: Zm_Drought_P Parameter: Organism Value: Zea mays
  misc_feature: MA Experiment 20000479 PARAMETER Experiment Name: Zm_Drought_P Parameter: Plant Line Value: 35A19
  misc_feature: MA Experiment 20000479 PARAMETER Experiment Name: Zm_Drought_P Parameter: Timepoint (hr) Value: 48
  misc_feature: MA Experiment 20000479 PARAMETER Experiment Name: Zm_Drought_P Parameter: Tissue Value: Aerial
  misc_feature: MA Experiment 20000479 PARAMETER Experiment Name: Zm_Drought_P Parameter: Treatment Value: Drought vs. No Drought
  misc_feature: MA Experiment ID: 20000480 Result: Down-regulated in Transcription
  misc_feature: MA Experiment 20000480 PARAMETER Experiment Name: Zm_Drought_P Parameter: Age (day) Value: 11
  misc_feature: MA Experiment 20000480 PARAMETER Experiment Name: Zm_Drought_P Parameter: Organism Value: Zea mays
  misc_feature: MA Experiment 20000480 PARAMETER Experiment Name: Zm_Drought_P Parameter: Plant Line Value: 35A19
  misc_feature: MA Experiment 20000480 PARAMETER Experiment Name: Zm_Drought_P Parameter: Timepoint (hr) Value: 72
  misc_feature: MA Experiment 20000480 PARAMETER Experiment Name: Zm_Drought_P Parameter: Tissue Value: Aerial
  misc_feature: MA Experiment 20000480 PARAMETER Experiment Name: Zm_Drought_P Parameter: Treatment Value: Drought vs. No Drought
  misc_feature: MA Experiment ID: 20000535 Result: Down-regulated in Transcription
  misc_feature: MA Experiment 20000535 PARAMETER Experiment Name: Zm_Hybrid_Seed_Dev_P Parameter: DAP Value: 30 vs. 12
  misc_feature: MA Experiment 20000535 PARAMETER Experiment Name: Zm_Hybrid_Seed_Dev_P Parameter: Organism Value: Zea mays
  misc_feature: MA Experiment 20000535 PARAMETER Experiment Name: Zm_Hybrid_Seed_Dev_P Parameter: Plant Line Value: 35A19
  misc_feature: MA Experiment 20000535 PARAMETER Experiment Name: Zm_Hybrid_Seed_Dev_P Parameter: Tissue Value: Embryo vs. Unfert Floret
gatctggccacccgagcacggccaaaaaggcgctcgcccagcgcttcaccagatagagcaacacagctcagctcagctcagcctcggaccagcagccggcgtgcggagctgcggtgcggcgtcgtgcgtgcgccagaacaggatgctgcccgccgggtgcggcctcctctcgtgcctccgcctcgacaagcagggcgacgcgggccgaaccgacccccgcgtcgcggacgagcccgccgcgtcgctcggcaagggcagcgggtcgtcggccaggcggttcgcgtgggccgagatcgagtccgtcacggcgggcttctcctcccgcgtcatcggccagggcggcttcagcaccgtctacctggcctgcctctcctcctcccgcctcggcgccgtcaaggtgcagcgcagcagcgagcgcctccaccgcgccttccgccaggagctccacgtgctcctctcgctccgccacccgcacatcgtccgcctgctcggctactgcgacgaacgagaggaaggcgtgttggtctttgagtacgcaccgaacggcgacctccacgagaggctccacggcagcggcaaggcgccgctcccgtgggcgcgccgcatggcggtggcgttccaggtggccatggcgctggagcacctccacgagagccgcgacccggcggtgatccacggcgacgtgaaggcctccaacgtgctgctggacgccagcctcgacgccaagctctgcgacctgggcttcgcgcacgtgggcttctcggccgcgctccagccgccggaggccagcggggccagggccagggcgtcgtcggcgccgcgcgccgtcgtcatgggctccccgggctacgtggacccgcacttcctccgctccggcgtcgccacccaagaagggcgacgtgtacagcttcggcgtgctgctgctcgagctcctcacggggagggaggccatatgcgccgacacggggcgccggctcgccgccgcggtgggtcctacgctcggcgaaggaagagtagcggaggcagtggaccggaggctcggagacgagtacgacacgcacgaggcggccaccgtggcggcgcttgcgctgcggtgcatcggcgacggccccgggacgcggccctccatggtggaggtggttcgcgagctccaggagaagacgaccgcgctgatctcggccgctggatgcaaacctgccggcaagatgggttcctgagctgtattgtcggccgaagaagaccgtaaataccattagctttgtttagagagagtagaaggtgaaggtaatgtttttttatttattttacttatataagtttcttgatgtagtggattagtagtagttgaatcggattacatagaaaaatttccgtg

SEQ ID NO: 3599 - protein, 414 aa, Zea mays subsp. mays
  peptide (1)..(414): Ceres Seq. ID no. 12352227
  misc_feature (109)..(297): Pfam Name: Protein kinase domain Pfam Description: Protein kinase domain
  misc_feature (91)..(297): Homolog of NCBI NO: 15227018 NR Description: putative receptor-like protein kinase; protein
  misc_feature (88)..(291): Homolog of NCBI NO: 15227007 NR Description: putative receptor-like protein kinase; protein
  misc_feature (69)..(297): Homolog of NCBI NO: 18402188 NR Description: unknown protein; protein id: At3g19300.1
  misc_feature (56)..(297): Homolog of NCBI NO: 15235071 NR Description: putative protein kinase
  misc_feature (56)..(297): Homolog of NCBI NO: 25403176 NR Description: probable protein kinase [imported] - Arabidopsis
  misc_feature (56)..(297): Homolog of NCBI NO: 30692836 NR Description: protein kinase family [Arabidopsis thaliana]
  misc_feature (202)..(297): Homolog of NCBI NO: 29367339 NR Description: putative receptor protein kinase
  misc_feature (74)..(297): Homolog of NCBI NO: 27476081 NR Description: Hypothetical protein [Oryza sativa (japonica
  misc_feature (83)..(297): Homolog of NCBI NO: 37536060 NR Description: putative receptor protein kinase
  misc_feature (52)..(297): Homolog of NCBI NO: 38344983 NR Description: OSJNBa0011L07.13 [Oryza sativa (japonica
IWPPEHGQKGARPALHQIEQHSSAQLSLGPAAGVRSCGAASCVRQNRMLPAGCGLLSCLRLDKQGDAGRTDPRVADEPAASLGKGSGSSARRFAWAEIESVTAGFSSRVIGQGGFSTVYLACLSSSRLGAVKVQRSSERLHRAFRQELHVLLSLRHPHIVRLLGYCDEREEGVLVFEYAPNGDLHERLHGSGKAPLPWARRMAVAFQVAMALEHLHESRDPAVIHGDVKASNVLLDASLDAKLCDLGFAHVGFSAALQPPEASGARARASSAPRAVVMGSPGYVDPHFLRSGVATQEGRRVQLRRAAARAPHGEGGHMRRHGAPARRRGGSYARRRKSSGGSGPEARRRVRHARGGHRGGACAAVHRRRPRDAALHGGGGSRAPGEDDRADLGRWMQTCRQDGFLSCIVGRRRP

SEQ ID NO: 3600 - protein, 367 aa, Zea mays subsp. mays
  peptide (1)..(367): Ceres Seq. ID no. 12352228
  misc_feature (62)..(250): Pfam Name: Protein kinase domain Pfam Description: Protein kinase domain
  misc_feature (44)..(250): Homolog of NCBI NO: 15227018 NR Description: putative receptor-like protein kinase; protein
  misc_feature (41)..(244): Homolog of NCBI NO: 15227007 NR Description: putative receptor-like protein kinase; protein
  misc_feature (22)..(250): Homolog of NCBI NO: 18402188 NR Description: unknown protein; protein id: At3g19300.1
  misc_feature (9)..(250): Homolog of NCBI NO: 15235071 NR Description: putative protein kinase
  misc_feature (9)..(250): Homolog of NCBI NO: 25403176 NR Description: probable protein kinase [imported] - Arabidopsis
  misc_feature (9)..(250): Homolog of NCBI NO: 30692836 NR Description: protein kinase family [Arabidopsis thaliana]
  misc_feature (155)..(250): Homolog of NCBI NO: 29367339 NR Description: putative receptor protein kinase
  misc_feature (27)..(250): Homolog of NCBI NO: 27476081 NR Description: Hypothetical protein [Oryza sativa (japonica
  misc_feature (36)..(250): Homolog of NCBI NO: 37536060 NR Description: putative receptor protein kinase
  misc_feature (5)..(250): Homolog of NCBI NO: 38344983 NR Description: OSJNBa0011L07.13 [Oryza sativa (japonica
MLPAGCGLLSCLRLDKQGDAGRTDPRVADEPAASLGKGSGSSARRFAWAEIESVTAGFSSRVIGQGGFSTVYLACLSSSRLGAVKVQRSSERLHRAFRQELHVLLSLRHPHIVRLLGYCDEREEGVLVFEYAPNGDLHERLHGSGKAPLPWARRMAVAFQVAMALEHLHESRDPAVIHGDVKASNVLLDASLDAKLCDLGFAHVGFSAALQPPEASGARARASSAPRAVVMGSPGYVDPHFLRSGVATQEGRRVQLRRAAARAPHGEGGHMRRHGAPARRRGGSYARRRKSSGGSGPEARRRVRHARGGHRGGACAAVHRRRPRDAALHGGGGSRAPGEDDRADLGRWMQTCRQDGFLSCIVGRRRP

SEQ ID NO: 3601 - protein, 213 aa, Zea mays subsp. mays
  peptide (1)..(213): Ceres Seq. ID no. 12352229
  misc_feature (1)..(96): Pfam Name: Protein kinase domain Pfam Description: Protein kinase domain
  misc_feature (1)..(96): Homolog of NCBI NO: 15227018 NR Description: putative receptor-like protein kinase; protein
  misc_feature (1)..(90): Homolog of NCBI NO: 15227007 NR Description: putative receptor-like protein kinase; protein
  misc_feature (1)..(96): Homolog of NCBI NO: 18402188 NR Description: unknown protein; protein id: At3g19300.1
  misc_feature (1)..(96): Homolog of NCBI NO: 15235071 NR Description: putative protein kinase
  misc_feature (1)..(96): Homolog of NCBI NO: 25403176 NR Description: probable protein kinase [imported] - Arabidopsis
  misc_feature (1)..(96): Homolog of NCBI NO: 30692836 NR Description: protein kinase family [Arabidopsis thaliana]
  misc_feature (1)..(96): Homolog of NCBI NO: 29367339 NR Description: putative receptor protein kinase
  misc_feature (1)..(96): Homolog of NCBI NO: 27476081 NR Description: Hypothetical protein [Oryza sativa (japonica
  misc_feature (1)..(96): Homolog of NCBI NO: 37536060 NR Description: putative receptor protein kinase
  misc_feature (1)..(96): Homolog of NCBI NO: 38344983 NR Description: OSJNBa0011L07.13 [Oryza sativa (japonica
MAVAFQVAMALEHLHESRDPAVIHGDVKASNVLLDASLDAKLCDLGFAHVGFSAALQPPEASGARARASSAPRAVVMGSPGYVDPHFLRSGVATQEGRRVQLRRAAARAPHGEGGHMRRHGAPARRRGGSYARRRKSSGGSGPEARRRVRHARGGHRGGACAAVHRRRPRDAALHGGGGSRAPGEDDRADLGRWMQTCRQDGFLSCIVGRRRP

SEQ ID NO: 3602 - DNA, 1282 bp, Zea mays subsp. mays
  misc_feature (1)..(1282): Ceres Seq. ID no. 12374443
  misc_feature: MA Experiment ID: 108543 Result: Up-regulated in Transcription
  misc_feature: MA Experiment ID: 108544 Result: Up-regulated in Transcription
  misc_feature: MA Experiment ID: 108556 Result: Down-regulated in Transcription
  misc_feature: MA Experiment 108556 PARAMETER Experiment Name: Zm_Drought_P Parameter: Age (day) Value: 9
  misc_feature: MA Experiment 108556 PARAMETER Experiment Name: Zm_Drought_P Parameter: Organism Value: Zea mays
  misc_feature: MA Experiment 108556 PARAMETER Experiment Name: Zm_Drought_P Parameter: Plant Line Value: 35A19
  misc_feature: MA Experiment 108556 PARAMETER Experiment Name: Zm_Drought_P Parameter: Timepoint (hr) Value: 24
  misc_feature: MA Experiment 108556 PARAMETER Experiment Name: Zm_Drought_P Parameter: Tissue Value: Aerial
  misc_feature: MA Experiment 108556 PARAMETER Experiment Name: Zm_Drought_P Parameter: Treatment Value: Drought vs. No Drought
  misc_feature: MA Experiment ID: 20000535 Result: Down-regulated in Transcription
  misc_feature: MA Experiment 20000535 PARAMETER Experiment Name: Zm_Hybrid_Seed_Dev_P Parameter: DAP Value: 30 vs. 12
  misc_feature: MA Experiment 20000535 PARAMETER Experiment Name: Zm_Hybrid_Seed_Dev_P Parameter: Organism Value: Zea mays
  misc_feature: MA Experiment 20000535 PARAMETER Experiment Name: Zm_Hybrid_Seed_Dev_P Parameter: Plant Line Value: 35A19
  misc_feature: MA Experiment 20000535 PARAMETER Experiment Name: Zm_Hybrid_Seed_Dev_P Parameter: Tissue Value: Embryo vs. Unfert Floret
tacctaccccctgcgcttgcacaaaatccttcttgatccgcacaggaaggtggaaggtcccggcagaagaacttggcgggcgaaaggcgaaaccgacgtgctcccgggcgggcggcgacagcggcatggagcgagagcggcaggcagtggcgaggaacaggaaggtggtgctgcgcgggtacatcgaccgcgcgcccagggaggaagacatggagctcgtcgacggcggcgccgtggagctgcgcgtccccgagggcggcggcggccccgcggtgctggtgaagaacctctacctatcctgcgacccttacatgcgcggcaggatgcgggacttccgcaactcctacatcccgcccttcaaacctggatcacctattgaagggtttggcgtggggagggtggtcgactccactcatccaggattcagtgccggtgacgttgtttccgggatgactggatgggaggactacagtctgatcaccaatcctgaacagctcaggaagatccagcaaagcgacataccactctcctatcatctgggccttcttggcatgcctggctttacagcttatgttggattctatgagatctgttcaccaaagaaaggggagtttgtttttgtttctgcggcatcgggagcagttgggcaaattgttggtcaacttgcgaagctccatggttgctatgttgttggaagcgctgggacagatcagaaggttgagctcttaaaggaaaaattcggatttgatgcgactttcaattataaggaagagcctgacttgactgctgccctgaaaaggcacttccctgaaggcatagacatctacttcgagaacgtaggcgggccgatgctcgatgctgtactactcaacatgcgagtacatggccgcattgcggtgtgtggcatggtttcccagcacggggtgactgcccctgccgggatccacaacctgttctccttgataagcaagaggatagcgatgaaggggttcatccagagcgattacgtgcacctgttcccgcagttcgtcgatgacatcaccaggcattacagagacgggaagatcgtgtatgtggaagacatgagcgttgggctggagagtgggccggcttccttcgtcggtctgttcagcggtaaaaatgttggcaagcaggtcgtctgtgtgtcgcgggattgaaaggcctggattttgttccctactggccagtacccttaaataaaatcaggaaaacattattttcaactccgagaaggaccccactagccagtaccacggtcgtg

SEQ ID NO: 3603 - protein, 391 aa, Zea mays subsp. mays
  peptide (1)..(391): Ceres Seq. ID no. 12374444
  misc_feature (138)..(388): Pfam Name: Zinc-binding dehydrogenase Pfam Description: Zinc-binding dehydrogenase
  misc_feature (125)..(391): Homolog of NCBI NO: 25404554 NR Description: hypothetical protein F5I14.9 [imported] -
  misc_feature (48)..(391): Homolog of NCBI NO: 15218717 NR Description: allyl alcohol dehydrogenase, putative
  misc_feature (42)..(391): Homolog of NCBI NO: 15222685 NR Description: allyl alcohol dehydrogenase, putative
  misc_feature (42)..(391): Homolog of NCBI NO: 15228456 NR Description: putative NADP-dependent oxidoreductase; protein
  misc_feature (52)..(391): Homolog of NCBI NO: 6692816 NR Description: allyl alcohol dehydrogenase [Nicotiana tabacum]
  misc_feature (48)..(122): Homolog of NCBI NO: 25404554 NR Description: hypothetical protein F5I14.9 [imported] -
  misc_feature (50)..(391): Homolog of NCBI NO: 38345384 NR Description: OSJNBa0067K08.13 [Oryza sativa (japonica
  misc_feature (42)..(391): Homolog of NCBI NO: 21593645 NR Description: allyl alcohol dehydrogenase, putative
  misc_feature (50)..(391): Homolog of NCBI NO: 15237888 NR Description: quinone oxidoreductase -like protein; protein id:
  misc_feature (42)..(391): Homolog of NCBI NO: 34907532 NR Description: putative allyl alcohol dehydrogenase
PTPCACTKSFLIRTGRWKVPAEELGGRKAKPTCSRAGGDSGMERERQAVARNRKVVLRGYIDRAPREEDMELVDGGAVELRVPEGGGGPAVLVKNLYLSCDPYMRGRMRDFRNSYIPPFKPGSPIEGFGVGRVVDSTHPGFSAGDVVSGMTGWEDYSLITNPEQLRKIQQSDIPLSYHLGLLGMPGFTAYVGFYEICSPKKGEFVFVSAASGAVGQIVGQLAKLHGCYVVGSAGTDQKVELLKEKFGFDATFNYKEEPDLTAALKRHFPEGIDIYFENVGGPMLDAVLLNMRVHGRIAVCGMVSQHGVTAPAGIHNLFSLISKRIAMKGFIQSDYVHLFPQFVDDITRHYRDGKIVYVEDMSVGLESGPASFVGLFSGKNVGKQVVCVSRD

SEQ ID NO: 3604 - protein, 350 aa, Zea mays subsp. mays
  peptide (1)..(350): Ceres Seq. ID no. 12374445
  misc_feature (97)..(347): Pfam Name: Zinc-binding dehydrogenase Pfam Description: Zinc-binding dehydrogenase
  misc_feature (9)..(350): Homolog of NCBI NO: 15237888 NR Description: quinone oxidoreductase -like protein; protein id:
  misc_feature (1)..(350): Homolog of NCBI NO: 15222685 NR Description: allyl alcohol dehydrogenase, putative
  misc_feature (1)..(350): Homolog of NCBI NO: 21593645 NR Description: allyl alcohol dehydrogenase, putative
  misc_feature (1)..(350): Homolog of NCBI NO: 15228456 NR Description: putative NADP-dependent oxidoreductase; protein
  misc_feature (9)..(350): Homolog of NCBI NO: 38345384 NR Description: OSJNBa0067K08.13 [Oryza sativa (japonica
  misc_feature (11)..(350): Homolog of NCBI NO: 6692816 NR Description: allyl alcohol dehydrogenase [Nicotiana tabacum]
  misc_feature (7)..(81): Homolog of NCBI NO: 25404554 NR Description: hypothetical protein F5I14.9 [imported] -
  misc_feature (84)..(350): Homolog of NCBI NO: 25404554 NR Description: hypothetical protein F5I14.9 [imported] -
  misc_feature (7)..(350): Homolog of NCBI NO: 15218717 NR Description: allyl alcohol dehydrogenase, putative
  misc_feature (1)..(350): Homolog of NCBI NO: 34907532 NR Description: putative allyl alcohol dehydrogenase
MERERQAVARNRKVVLRGYIDRAPREEDMELVDGGAVELRVPEGGGGPAVLVKNLYLSCDPYMRGRMRDFRNSYIPPFKPGSPIEGFGVGRVVDSTHPGFSAGDVVSGMTGWEDYSLITNPEQLRKIQQSDIPLSYHLGLLGMPGFTAYVGFYEICSPKKGEFVFVSAASGAVGQIVGQLAKLHGCYVVGSAGTDQKVELLKEKFGFDATFNYKEEPDLTAALKRHFPEGIDIYFENVGGPMLDAVLLNMRVHGRIAVCGMVSQHGVTAPAGIHNLFSLISKRIAMKGFIQSDYVHLFPQFVDDITRHYRDGKIVYVEDMSVGLESGPASFVGLFSGKNVGKQVVCVSRD

SEQ ID NO: 3605 - protein, 322 aa, Zea mays subsp. mays
  peptide (1)..(322): Ceres Seq. ID no. 12374446
  misc_feature (69)..(319): Pfam Name: Zinc-binding dehydrogenase Pfam Description: Zinc-binding dehydrogenase
  misc_feature (1)..(322): Homolog of NCBI NO: 15237888 NR Description: quinone oxidoreductase -like protein; protein id:
  misc_feature (1)..(322): Homolog of NCBI NO: 15222685 NR Description: allyl alcohol dehydrogenase, putative
  misc_feature (1)..(322): Homolog of NCBI NO: 21593645 NR Description: allyl alcohol dehydrogenase, putative
  misc_feature (1)..(322): Homolog of NCBI NO: 15228456 NR Description: putative NADP-dependent oxidoreductase; protein
  misc_feature (1)..(322): Homolog of NCBI NO: 38345384 NR Description: OSJNBa0067K08.13 [Oryza sativa (japonica
  misc_feature (1)..(322): Homolog of NCBI NO: 6692816 NR Description: allyl alcohol dehydrogenase [Nicotiana tabacum]
  misc_feature (1)..(53): Homolog of NCBI NO: 25404554 NR Description: hypothetical protein F5I14.9 [imported] -
  misc_feature (56)..(322): Homolog of NCBI NO: 25404554 NR Description: hypothetical protein F5I14.9 [imported] -
  misc_feature (1)..(322): Homolog of NCBI NO: 15218717 NR Description: allyl alcohol dehydrogenase, putative
  misc_feature (1)..(322): Homolog of NCBI NO: 34907532 NR Description: putative allyl alcohol dehydrogenase
MELVDGGAVELRVPEGGGGPAVLVKNLYLSCDPYMRGRMRDFRNSYIPPFKPGSPIEGFGVGRVVDSTHPGFSAGDVVSGMTGWEDYSLITNPEQLRKIQQSDIPLSYHLGLLGMPGFTAYVGFYEICSPKKGEFVFVSAASGAVGQIVGQLAKLHGCYVVGSAGTDQKVELLKEKFGFDATFNYKEEPDLTAALKRHFPEGIDIYFENVGGPMLDAVLLNMRVHGRIAVCGMVSQHGVTAPAGIHNLFSLISKRIAMKGFIQSDYVHLFPQFVDDITRHYRDGKIVYVEDMSVGLESGPASFVGLFSGKNVGKQVVCVSRD

SEQ ID NO: 3606 - DNA, 1074 bp, Zea mays subsp. mays
  misc_feature (1)..(1074): Ceres Seq. ID no. 12386832
  misc_feature: MA Experiment ID: 108504 Result: Up-regulated in Transcription
  misc_feature: MA Experiment 108504 PARAMETER Experiment Name: Zm_Drought_P Parameter: Age (day) Value: 8
  misc_feature: MA Experiment 108504 PARAMETER Experiment Name: Zm_Drought_P Parameter: Organism Value: Zea mays
  misc_feature: MA Experiment 108504 PARAMETER Experiment Name: Zm_Drought_P Parameter: Plant Line Value: 35A19
  misc_feature: MA Experiment 108504 PARAMETER Experiment Name: Zm_Drought_P Parameter: Timepoint (hr) Value: 12
  misc_feature: MA Experiment 108504 PARAMETER Experiment Name: Zm_Drought_P Parameter: Tissue Value: Aerial
  misc_feature: MA Experiment 108504 PARAMETER Experiment Name: Zm_Drought_P Parameter: Treatment Value: Drought vs. No Drought
  misc_feature: MA Experiment ID: 108513 Result: Up-regulated in Transcription
  misc_feature: MA Experiment 108513 PARAMETER Experiment Name: Zm_100uM_ABA_P Parameter: Age (day) Value: 8
  misc_feature: MA Experiment 108513 PARAMETER Experiment Name: Zm_100uM_ABA_P Parameter: Organism Value: Zea mays
  misc_feature: MA Experiment 108513 PARAMETER Experiment Name: Zm_100uM_ABA_P Parameter: Plant Line Value: 35A19
  misc_feature: MA Experiment 108513 PARAMETER Experiment Name: Zm_100uM_ABA_P Parameter: Timepoint (hr) Value: 6
  misc_feature: MA Experiment 108513 PARAMETER Experiment Name: Zm_100uM_ABA_P Parameter: Tissue Value: Aerial
  misc_feature: MA Experiment 108513 PARAMETER Experiment Name: Zm_100uM_ABA_P Parameter: Treatment Value: 100uM ABA vs. No Treatment
  misc_feature: MA Experiment ID: 108523 Result: Down-regulated in Transcription
  misc_feature: MA Experiment 108523 PARAMETER Experiment Name: Zm_42deg_Heat_P Parameter: Age (day) Value: 8
  misc_feature: MA Experiment 108523 PARAMETER Experiment Name: Zm_42deg_Heat_P Parameter: Organism Value: Zea mays
  misc_feature: MA Experiment 108523 PARAMETER Experiment Name: Zm_42deg_Heat_P Parameter: Plant Line Value: 35A19
  misc_feature: MA Experiment 108523 PARAMETER Experiment Name: Zm_42deg_Heat_P Parameter: Temperature (deg C) Value: 42 vs. 22
  misc_feature: MA Experiment 108523 PARAMETER Experiment Name: Zm_42deg_Heat_P Parameter: Timepoint (hr) Value: 6
  misc_feature: MA Experiment 108523 PARAMETER Experiment Name: Zm_42deg_Heat_P Parameter: Tissue Value: Aerial
  misc_feature: MA Experiment ID: 108527 Result: Down-regulated in Transcription
  misc_feature: MA Experiment 108527 PARAMETER Experiment Name: Zm_5mM_NO_P Parameter: Age (day) Value: 8
  misc_feature: MA Experiment 108527 PARAMETER Experiment Name: Zm_5mM_NO_P Parameter: Organism Value: Zea mays
  misc_feature: MA Experiment 108527 PARAMETER Experiment Name: Zm_5mM_NO_P Parameter: Plant Line Value: 35A19
  misc_feature: MA Experiment 108527 PARAMETER Experiment Name: Zm_5mM_NO_P Parameter: Timepoint (hr) Value: 6
  misc_feature: MA Experiment 108527 PARAMETER Experiment Name: Zm_5mM_NO_P Parameter: Tissue Value: Aerial
  misc_feature: MA Experiment 108527 PARAMETER Experiment Name: Zm_5mM_NO_P Parameter: Treatment Value: 5mM NO vs. No Treatment
  misc_feature: MA Experiment ID: 108530 Result: Up-regulated in Transcription
  misc_feature: MA Experiment 108530 PARAMETER Experiment Name: Zm_Imbibed_Seeds_P Parameter: Age (day) Value: 6 vs. 2
  misc_feature: MA Experiment 108530 PARAMETER Experiment Name: Zm_Imbibed_Seeds_P Parameter: Organism Value: Zea mays
  misc_feature: MA Experiment 108530 PARAMETER Experiment Name: Zm_Imbibed_Seeds_P Parameter: Plant Line Value: 35A19
  misc_feature: MA Experiment 108530 PARAMETER Experiment Name: Zm_Imbibed_Seeds_P Parameter: Tissue Value: Aerial vs. Embryo
  misc_feature: MA Experiment ID: 108540 Result: Up-regulated in Transcription
  misc_feature: MA Experiment 108540 PARAMETER Experiment Name: Zm_20percent_PEG_P Parameter: Age (day) Value: 8
  misc_feature: MA Experiment 108540 PARAMETER Experiment Name: Zm_20percent_PEG_P Parameter: Organism Value: Zea mays
  misc_feature: MA Experiment 108540 PARAMETER Experiment Name: Zm_20percent_PEG_P Parameter: Plant Line Value: 35A19
  misc_feature: MA Experiment 108540 PARAMETER Experiment Name: Zm_20percent_PEG_P Parameter: Timepoint (hr) Value: 6
  misc_feature: MA Experiment 108540 PARAMETER Experiment Name: Zm_20percent_PEG_P Parameter: Tissue Value: Aerial
  misc_feature: MA Experiment 108540 PARAMETER Experiment Name: Zm_20percent_PEG_P Parameter: Treatment Value: 20percent PEG vs. No Treatment
  misc_feature: MA Experiment ID: 108556 Result: Up-regulated in Transcription
  misc_feature: MA Experiment 108556 PARAMETER Experiment Name: Zm_Drought_P Parameter: Age (day) Value: 9
  misc_feature: MA Experiment 108556 PARAMETER Experiment Name: Zm_Drought_P Parameter: Organism Value: Zea mays
  misc_feature: MA Experiment 108556 PARAMETER Experiment Name: Zm_Drought_P Parameter: Plant Line Value: 35A19
  misc_feature: MA Experiment 108556 PARAMETER Experiment Name: Zm_Drought_P Parameter: Timepoint (hr) Value: 24
  misc_feature: MA Experiment 108556 PARAMETER Experiment Name: Zm_Drought_P Parameter: Tissue Value: Aerial
  misc_feature: MA Experiment 108556 PARAMETER Experiment Name: Zm_Drought_P Parameter: Treatment Value: Drought vs. No Drought
  misc_feature: MA Experiment ID: 108559 Result: Down-regulated in Transcription
  misc_feature: MA Experiment 108559 PARAMETER Experiment Name: Zm_5mM_NO_P Parameter: Age (day) Value: 8
  misc_feature: MA Experiment 108559 PARAMETER Experiment Name: Zm_5mM_NO_P Parameter: Organism Value: Zea mays
  misc_feature: MA Experiment 108559 PARAMETER Experiment Name: Zm_5mM_NO_P Parameter: Plant Line Value: 35A19
  misc_feature: MA Experiment 108559 PARAMETER Experiment Name: Zm_5mM_NO_P Parameter: Timepoint (hr) Value: 12
  misc_feature: MA Experiment 108559 PARAMETER Experiment Name: Zm_5mM_NO_P Parameter: Tissue Value: Aerial
  misc_feature: MA Experiment 108559 PARAMETER Experiment Name: Zm_5mM_NO_P Parameter: Treatment Value: 5mM NO vs. No Treatment
  misc_feature: MA Experiment ID: 108689 Result: Up-regulated in Transcription
  misc_feature: MA Experiment 108689 PARAMETER Experiment Name: Zm_Drought_Roots_P Parameter: Age (day) Value: 9
  misc_feature: MA Experiment 108689 PARAMETER Experiment Name: Zm_Drought_Roots_P Parameter: Organism Value: Zea mays
  misc_feature: MA Experiment 108689 PARAMETER Experiment Name: Zm_Drought_Roots_P Parameter: Plant Line Value: 35A19
  misc_feature: MA Experiment 108689 PARAMETER Experiment Name: Zm_Drought_Roots_P Parameter: Timepoint (hr) Value: 24
  misc_feature: MA Experiment 108689 PARAMETER Experiment Name: Zm_Drought_Roots_P Parameter: Tissue Value: Roots
  misc_feature: MA Experiment 108689 PARAMETER Experiment Name: Zm_Drought_Roots_P Parameter: Treatment Value: Drought vs. No Drought
  misc_feature: MA Experiment ID: 20000478 Result: Up-regulated in Transcription
  misc_feature: MA Experiment 20000478 PARAMETER Experiment Name: Zm_5mM_SA_P Parameter: Age (day) Value: 11
  misc_feature: MA Experiment 20000478 PARAMETER Experiment Name: Zm_5mM_SA_P Parameter: Organism Value: Zea mays
  misc_feature: MA Experiment 20000478 PARAMETER Experiment Name: Zm_5mM_SA_P Parameter: Plant Line Value: 35A19
  misc_feature: MA Experiment 20000478 PARAMETER Experiment Name: Zm_5mM_SA_P Parameter: Timepoint (hr) Value: 72
  misc_feature: MA Experiment 20000478 PARAMETER Experiment Name: Zm_5mM_SA_P Parameter: Tissue Value: Aerial
  misc_feature: MA Experiment 20000478 PARAMETER Experiment Name: Zm_5mM_SA_P Parameter: Treatment Value: 5mM SA vs. No Treatment
  misc_feature: MA Experiment ID: 20000480 Result: Up-regulated in Transcription
  misc_feature: MA Experiment 20000480 PARAMETER Experiment Name: Zm_Drought_P Parameter: Age (day) Value: 11
  misc_feature: MA Experiment 20000480 PARAMETER Experiment Name: Zm_Drought_P Parameter: Organism Value: Zea mays
  misc_feature: MA Experiment 20000480 PARAMETER Experiment Name: Zm_Drought_P Parameter: Plant Line Value: 35A19
  misc_feature: MA Experiment 20000480 PARAMETER Experiment Name: Zm_Drought_P Parameter: Timepoint (hr) Value: 72
  misc_feature: MA Experiment 20000480 PARAMETER Experiment Name: Zm_Drought_P Parameter: Tissue Value: Aerial
  misc_feature: MA Experiment 20000480 PARAMETER Experiment Name: Zm_Drought_P Parameter: Treatment Value: Drought vs. No Drought
  misc_feature: MA Experiment ID: 20000487 Result: Down-regulated in Transcription
  misc_feature: MA Experiment 20000487 PARAMETER Experiment Name: Zm_50mM_NH4NO3_L_to_H_P Parameter: Organism Value: Zea mays
  misc_feature: MA Experiment 20000487 PARAMETER Experiment Name: Zm_50mM_NH4NO3_L_to_H_P Parameter: Timepoint (hr) Value: 4
  misc_feature: MA Experiment 20000487 PARAMETER Experiment Name: Zm_50mM_NH4NO3_L_to_H_P Parameter: Tissue Value: Leaves
  misc_feature: MA Experiment 20000487 PARAMETER Experiment Name: Zm_50mM_NH4NO3_L_to_H_P Parameter: Treatment Value: 50mM NH4NO3 vs. 100mM Mannitol
  misc_feature: MA Experiment ID: 20000488 Result: Down-regulated in Transcription
  misc_feature: MA Experiment 20000488 PARAMETER Experiment Name: Zm_50mM_NH4NO3_L_to_H_P Parameter: Organism Value: Zea mays
  misc_feature: MA Experiment 20000488 PARAMETER Experiment Name: Zm_50mM_NH4NO3_L_to_H_P Parameter: Timepoint (hr) Value: 8
  misc_feature: MA Experiment 20000488 PARAMETER Experiment Name: Zm_50mM_NH4NO3_L_to_H_P Parameter: Tissue Value: Leaves
  misc_feature: MA Experiment 20000488 PARAMETER Experiment Name: Zm_50mM_NH4NO3_L_to_H_P Parameter: Treatment Value: 50mM NH4NO3 vs. 100mM Mannitol
  misc_feature: MA Experiment ID: 20000626 Result: Up-regulated in Transcription
  misc_feature: MA Experiment 20000626 PARAMETER Experiment Name: Zm_Herbicide-Treatments_P Parameter: Timepoint (hr) Value: 12
  misc_feature: MA Experiment 20000626 PARAMETER Experiment Name: Zm_Herbicide-Treatments_P Parameter: Tissue Value: Aerial
  misc_feature: MA Experiment 20000626 PARAMETER Experiment Name: Zm_Herbicide-Treatments_P Parameter: Treatment Value: Roundup vs. No Treatment
  misc_feature: MA Experiment ID: 20000629 Result: Up-regulated in Transcription
  misc_feature: MA Experiment 20000629 PARAMETER Experiment Name: Zm_Herbicide-Treatments_P Parameter: Timepoint (hr) Value: 12
  misc_feature: MA Experiment 20000629 PARAMETER Experiment Name: Zm_Herbicide-Treatments_P Parameter: Tissue Value: Aerial
  misc_feature: MA Experiment 20000629 PARAMETER Experiment Name: Zm_Herbicide-Treatments_P Parameter: Treatment Value: Trimec vs. No Treatment
atattaatggagctgctttgcacgggcggcagacagccgtagacagagcagtgacggtcgtcgtacacagatcacgatgctgctcccacactcttcatcagcctctgcaactgctaccactcgtgggctagcactagcagcagcagcagcagcaccgccgcgtccgaccgctcgcccccggcgcgcgcgcctcctgcctccacgcgcgcgggccgagacgcatgcgacgggcgttggcgccgaccgcgcggccgaggcgcttctccaaagcgggctgcgccgtgagtcgctgccgcggcacgtcgcggtggtgatggacgggaactcgcggtgggcgcgcgagcgggggctgacgcccgcggacggccacaaggccggcggccgcaacctggagcgggtcgttgcgctgtcgcgcgcctggggcatccgcgcgctcaccgccttcgtctgctcccgcgagaacttgagccgccccaaggccgaggtcgactacatgatgggcttgtccgagtggctgataggcgacaacatcgacaagctctcgaggcaggggatccggctgcaggtgatcggcgacgccgcgaagatgccagcctctntgcggagcgcagcggcgcaggccgacgaggccacgaggcacaactcgcagctgcacgtgatgctggccatctgctacagcgggcgatgggacatggtccaggcgtgccgggagctggcccgggaggcgcaggcgaaccggctcagtccggacgacatcgacgagtcggtcatcgccggcaagctcgcgacgagcgccgccggcgagttctcctgtcccgacctggtcatcagaaccagcggcgagatgaggctcagcaacttcttgctgtggcagtcggcgtactcggagttgttcttcaccggcaagatgtggcctgactttggggaggctgagtacctggaagcgttgcgctccttccagggcagagaccgccgcttcggccaatcaaaattactctaacagtctaactcgatggagccacgaagtggagcgccagtatatgtgaagagttatggattgttcggttagctttc

SEQ ID NO: 3607 - protein, 307 aa, Zea mays subsp. mays
  peptide (1)..(307): Ceres Seq. ID no. 12386833
  misc_feature (79)..(302): Pfam Name: Putative undecaprenyl diphosphate synthase Pfam Description: Putative undecaprenyl diphosphate synthase
  misc_feature (63)..(303): Homolog of NCBI NO: 23128548 NR Description: hypothetical protein [Nostoc punctiforme]
  misc_feature (63)..(303): Homolog of NCBI NO: 37519677 NR Description: undecaprenyl pyrophosphate synthetase
  misc_feature (67)..(302): Homolog of NCBI NO: 18424144 NR Description: dehydrodolichyl diphosphate synthase (DEDOL-PP
  misc_feature (67)..(303): Homolog of NCBI NO: 17230487 NR Description: undecaprenyl pyrophosphate synthetase [Nostoc sp.
  misc_feature (63)..(305): Homolog of NCBI NO: 23125792 NR Description: hypothetical protein [Nostoc punctiforme]
  misc_feature (56)..(302): Homolog of NCBI NO: 18400264 NR Description: dehydrodolichyl diphosphate synthase (DEDOL-PP
  misc_feature (56)..(302): Homolog of NCBI NO: 7447521 NR Description: hypothetical protein At2g23410 [imported] -
  misc_feature (70)..(307): Homolog of NCBI NO: 17230924 NR Description: undecaprenyl pyrophosphate synthetase [Nostoc sp.
  misc_feature (60)..(305): Homolog of NCBI NO: 15237748 NR Description: dehydrodolichyl diphosphate synthase (DEDOL-PP
  misc_feature (24)..(306): Homolog of NCBI NO: 34908428 NR Description: putative undecaprenyl pyrophosphate synthetase
  misc_feature (175)..(175): Xaa is any aa, unknown or other
MLLPHSSSASATATTRGLALAAAAAAPPRPTARPRRARLLPPRARAETHATGVGADRAAEALLQSGLRRESLPRHVAVVMDGNSRWARERGLTPADGHKAGGRNLERVVALSRAWGIRALTAFVCSRENLSRPKAEVDYMMGLSEWLIGDNIDKLSRQGIRLQVIGDAAKMPASXRSAAAQADEATRHNSQLHVMLAICYSGRWDMVQACRELAREAQANRLSPDDIDESVIAGKLATSAAGEFSCPDLVIRTSGEMRLSNFLLWQSAYSELFFTGKMWPDFGEAEYLEALRSFQGRDRRFGQSKLL

SEQ ID NO: 3608 - protein, 228 aa, Zea mays subsp. mays
  peptide (1)..(228): Ceres Seq. ID no. 12386834
  misc_feature (1)..(223): Pfam Name: Putative undecaprenyl diphosphate synthase Pfam Description: Putative undecaprenyl diphosphate synthase
  misc_feature (1)..(224): Homolog of NCBI NO: 23128548 NR Description: hypothetical protein [Nostoc punctiforme]
  misc_feature (1)..(224): Homolog of NCBI NO: 37519677 NR Description: undecaprenyl pyrophosphate synthetase
  misc_feature (1)..(223): Homolog of NCBI NO: 18424144 NR Description: dehydrodolichyl diphosphate synthase (DEDOL-PP
  misc_feature (1)..(224): Homolog of NCBI NO: 17230487 NR Description: undecaprenyl pyrophosphate synthetase [Nostoc sp.
  misc_feature (1)..(226): Homolog of NCBI NO: 23125792 NR Description: hypothetical protein [Nostoc punctiforme]
  misc_feature (1)..(223): Homolog of NCBI NO: 18400264 NR Description: dehydrodolichyl diphosphate synthase (DEDOL-PP
  misc_feature (1)..(223): Homolog of NCBI NO: 7447521 NR Description: hypothetical protein At2g23410 [imported] -
  misc_feature (1)..(228): Homolog of NCBI NO: 17230924 NR Description: undecaprenyl pyrophosphate synthetase [Nostoc sp.
  misc_feature (1)..(226): Homolog of NCBI NO: 15237748 NR Description: dehydrodolichyl diphosphate synthase (DEDOL-PP
  misc_feature (1)..(227): Homolog of NCBI NO: 34908428 NR Description: putative undecaprenyl pyrophosphate synthetase
  misc_feature (96)..(96): Xaa is any aa, unknown or other
MDGNSRWARERGLTPADGHKAGGRNLERVVALSRAWGIRALTAFVCSRENLSRPKAEVDYMMGLSEWLIGDNIDKLSRQGIRLQVIGDAAKMPASXRSAAAQADEATRHNSQLHVMLAICYSGRWDMVQACRELAREAQANRLSPDDIDESVIAGKLATSAAGEFSCPDLVIRTSGEMRLSNFLLWQSAYSELFFTGKMWPDFGEAEYLEALRSFQGRDRRFGQSKLL

SEQ ID NO: 3609 - protein, 168 aa, Zea mays subsp. mays
  peptide (1)..(168): Ceres Seq. ID no. 12386835
  misc_feature (1)..(163): Pfam Name: Putative undecaprenyl diphosphate synthase Pfam Description: Putative undecaprenyl diphosphate synthase
  misc_feature (1)..(164): Homolog of NCBI NO: 23128548 NR Description: hypothetical protein [Nostoc punctiforme]
  misc_feature (1)..(164): Homolog of NCBI NO: 37519677 NR Description: undecaprenyl pyrophosphate synthetase
  misc_feature (1)..(163): Homolog of NCBI NO: 18424144 NR Description: dehydrodolichyl diphosphate synthase (DEDOL-PP
  misc_feature (1)..(164): Homolog of NCBI NO: 17230487 NR Description: undecaprenyl pyrophosphate synthetase [Nostoc sp.
  misc_feature (1)..(166): Homolog of NCBI NO: 23125792 NR Description: hypothetical protein [Nostoc punctiforme]
  misc_feature (1)..(163): Homolog of NCBI NO: 18400264 NR Description: dehydrodolichyl diphosphate synthase (DEDOL-PP
  misc_feature (1)..(163): Homolog of NCBI NO: 7447521 NR Description: hypothetical protein At2g23410 [imported] -
  misc_feature (1)..(168): Homolog of NCBI NO: 17230924 NR Description: undecaprenyl pyrophosphate synthetase [Nostoc sp.
  misc_feature (1)..(166): Homolog of NCBI NO: 15237748 NR Description: dehydrodolichyl diphosphate synthase (DEDOL-PP
  misc_feature (1)..(167): Homolog of NCBI NO: 34908428 NR Description: putative undecaprenyl pyrophosphate synthetase
  misc_feature (36)..(36): Xaa is any aa, unknown or other
MMGLSEWLIGDNIDKLSRQGIRLQVIGDAAKMPASXRSAAAQADEATRHNSQLHVMLAICYSGRWDMVQACRELAREAQANRLSPDDIDESVIAGKLATSAAGEFSCPDLVIRTSGEMRLSNFLLWQSAYSELFFTGKMWPDFGEAEYLEALRSFQGRDRRFGQSKLL

SEQ ID NO: 3610 - DNA, 488 bp, Zea mays subsp. mays
  misc_feature (1)..(488): Ceres Seq. ID no. 12345933
  misc_feature: MA Experiment ID: 108535 Result: Up-regulated in Transcription
  misc_feature: MA Experiment 108535 PARAMETER Experiment Name: Zm_Meristem_P Parameter: Age (day) Value: 8
  misc_feature: MA Experiment 108535 PARAMETER Experiment Name: Zm_Meristem_P Parameter: Organism Value: Zea mays
  misc_feature: MA Experiment 108535 PARAMETER Experiment Name: Zm_Meristem_P Parameter: Plant Line Value: 35A19
  misc_feature: MA Experiment 108535 PARAMETER Experiment Name: Zm_Meristem_P Parameter: Tissue Value: Root Meristem vs. Above Root Meristem
  misc_feature: MA Experiment ID: 108543 Result: Up-regulated in Transcription
  misc_feature: MA Experiment ID: 108544 Result: Down-regulated in Transcription
  misc_feature: MA Experiment ID: 108556 Result: Down-regulated in Transcription
  misc_feature: MA Experiment 108556 PARAMETER Experiment Name: Zm_Drought_P Parameter: Age (day) Value: 9
  misc_feature: MA Experiment 108556 PARAMETER Experiment Name: Zm_Drought_P Parameter: Organism Value: Zea mays
  misc_feature: MA Experiment 108556 PARAMETER Experiment Name: Zm_Drought_P Parameter: Plant Line Value: 35A19
  misc_feature: MA Experiment 108556 PARAMETER Experiment Name: Zm_Drought_P Parameter: Timepoint (hr) Value: 24
  misc_feature: MA Experiment 108556 PARAMETER Experiment Name: Zm_Drought_P Parameter: Tissue Value: Aerial
  misc_feature: MA Experiment 108556 PARAMETER Experiment Name: Zm_Drought_P Parameter: Treatment Value: Drought vs. No Drought
  misc_feature: MA Experiment ID: 108689 Result: Down-regulated in Transcription
  misc_feature: MA Experiment 108689 PARAMETER Experiment Name: Zm_Drought_Roots_P Parameter: Age (day) Value: 9
  misc_feature: MA Experiment 108689 PARAMETER Experiment Name: Zm_Drought_Roots_P Parameter: Organism Value: Zea mays
  misc_feature: MA Experiment 108689 PARAMETER Experiment Name: Zm_Drought_Roots_P Parameter: Plant Line Value: 35A19
  misc_feature: MA Experiment 108689 PARAMETER Experiment Name: Zm_Drought_Roots_P Parameter: Timepoint (hr) Value: 24
  misc_feature: MA Experiment 108689 PARAMETER Experiment Name: Zm_Drought_Roots_P Parameter: Tissue Value: Roots
  misc_feature: MA Experiment 108689 PARAMETER Experiment Name: Zm_Drought_Roots_P Parameter: Treatment Value: Drought vs. No Drought
  misc_feature: MA Experiment ID: 20000477 Result: Down-regulated in Transcription
  misc_feature: MA Experiment 20000477 PARAMETER Experiment Name: Zm_5mM_SA_P Parameter: Age (day) Value: 10
  misc_feature: MA Experiment 20000477 PARAMETER Experiment Name: Zm_5mM_SA_P Parameter: Organism Value: Zea mays
  misc_feature: MA Experiment 20000477 PARAMETER Experiment Name: Zm_5mM_SA_P Parameter: Plant Line Value: 35A19
  misc_feature: MA Experiment 20000477 PARAMETER Experiment Name: Zm_5mM_SA_P Parameter: Timepoint (hr) Value: 48
  misc_feature: MA Experiment 20000477 PARAMETER Experiment Name: Zm_5mM_SA_P Parameter: Tissue Value: Aerial
  misc_feature: MA Experiment 20000477 PARAMETER Experiment Name: Zm_5mM_SA_P Parameter: Treatment Value: 5mM SA vs. No Treatment
  misc_feature: MA Experiment ID: 20000478 Result: Down-regulated in Transcription
  misc_feature: MA Experiment 20000478 PARAMETER Experiment Name: Zm_5mM_SA_P Parameter: Age (day) Value: 11
  misc_feature: MA Experiment 20000478 PARAMETER Experiment Name: Zm_5mM_SA_P Parameter: Organism Value: Zea mays
  misc_feature: MA Experiment 20000478 PARAMETER Experiment Name: Zm_5mM_SA_P Parameter: Plant Line Value: 35A19
  misc_feature: MA Experiment 20000478 PARAMETER Experiment Name: Zm_5mM_SA_P Parameter: Timepoint (hr) Value: 72
  misc_feature: MA Experiment 20000478 PARAMETER Experiment Name: Zm_5mM_SA_P Parameter: Tissue Value: Aerial
  misc_feature: MA Experiment 20000478 PARAMETER Experiment Name: Zm_5mM_SA_P Parameter: Treatment Value: 5mM SA vs. No Treatment
  misc_feature: MA Experiment ID: 20000479 Result: Down-regulated in Transcription
  misc_feature: MA Experiment 20000479 PARAMETER Experiment Name: Zm_Drought_P Parameter: Age (day) Value: 10
  misc_feature: MA Experiment 20000479 PARAMETER Experiment Name: Zm_Drought_P Parameter: Organism Value: Zea mays
  misc_feature: MA Experiment 20000479 PARAMETER Experiment Name: Zm_Drought_P Parameter: Plant Line Value: 35A19
  misc_feature: MA Experiment 20000479 PARAMETER Experiment Name: Zm_Drought_P Parameter: Timepoint (hr) Value: 48
  misc_feature: MA Experiment 20000479 PARAMETER Experiment Name: Zm_Drought_P Parameter: Tissue Value: Aerial
  misc_feature: MA Experiment 20000479 PARAMETER Experiment Name: Zm_Drought_P Parameter: Treatment Value: Drought vs. No Drought
  misc_feature: MA Experiment ID: 20000480 Result: Down-regulated in Transcription
  misc_feature: MA Experiment 20000480 PARAMETER Experiment Name: Zm_Drought_P Parameter: Age (day) Value: 11
  misc_feature: MA Experiment 20000480 PARAMETER Experiment Name: Zm_Drought_P Parameter: Organism Value: Zea mays
  misc_feature: MA Experiment 20000480 PARAMETER Experiment Name: Zm_Drought_P Parameter: Plant Line Value: 35A19
  misc_feature: MA Experiment 20000480 PARAMETER Experiment Name: Zm_Drought_P Parameter: Timepoint (hr) Value: 72
  misc_feature: MA Experiment 20000480 PARAMETER Experiment Name: Zm_Drought_P Parameter: Tissue Value: Aerial
  misc_feature: MA Experiment 20000480 PARAMETER Experiment Name: Zm_Drought_P Parameter: Treatment Value: Drought vs. No Drought
  misc_feature: MA Experiment ID: 20000534 Result: Down-regulated in Transcription
  misc_feature: MA Experiment 20000534 PARAMETER Experiment Name: Zm_Hybrid_Pollen_P Parameter: Age (day) Value: 8
  misc_feature: MA Experiment 20000534 PARAMETER Experiment Name: Zm_Hybrid_Pollen_P Parameter: Organism Value: Zea mays
  misc_feature: MA Experiment 20000534 PARAMETER Experiment Name: Zm_Hybrid_Pollen_P Parameter: Plant Line Value: 35A19
  misc_feature: MA Experiment 20000534 PARAMETER Experiment Name: Zm_Hybrid_Pollen_P Parameter: Tissue Value: Pollen vs. Aerial
gagacctagaaccctcttccccctcgatggccgtagggagcggcggcggctcgcggcgcgcgcgtccgaacgtgctagtgacggggacgccggggacggggaagacgacaacgtgctcgctccttgccgacgccgcaggcctccgccacgtcaacatcggcgacctcgtccgcgagaagagcctccacgacggctgggacgccgacctcgagtgccatgtcatcaacgaggacctggtgtgcgacgagcttgaggacatgatggaagaaggtggcatactagtagattaccacggatgtgatttctttccagaacgttggtttgacctcgtagtttatttttgcttaatcttttgtttggtcagttgtttgttagggctgttgatttgtatagattcagactacatctcttctggcttgtggatttcgatagacttgttgtacattgacatatgctggtctcaaatgaggatgataggttcttggtcc

SEQ ID NO: 3611 - protein, 162 aa, Zea mays subsp. mays
  peptide (1)..(162): Ceres Seq. ID no. 12345934
  misc_feature (22)..(110): Homolog of NCBI NO: 6457370 NR Description: unknown protein [Oryctolagus sp.]
  misc_feature (22)..(110): Homolog of NCBI NO: 34853506 NR Description: similar to RIKEN cDNA 4921516M08 [Rattus
  misc_feature (22)..(110): Homolog of NCBI NO: 28076975 NR Description: RIKEN cDNA 4921516M08 [Mus musculus]
  misc_feature (22)..(110): Homolog of NCBI NO: 33303797 NR Description: TAF9 RNA polymerase II, TATA box binding protein
  misc_feature (22)..(110): Homolog of NCBI NO: 7706212 NR Description: adrenal gland protein AD-004
  misc_feature (9)..(111): Homolog of NCBI NO: 15239296 NR Description: putative protein; protein id: At5g60340.1
  misc_feature (9)..(111): Homolog of NCBI NO: 10177726 NR Description: gene_id:K9B18.5~ref|NP_057367.1~similar to
  misc_feature (79)..(111): Homolog of NCBI NO: 34902744 NR Description: hypothetical protein~similar to Arabidopsis
  misc_feature (14)..(78): Homolog of NCBI NO: 34902744 NR Description: hypothetical protein~similar to Arabidopsis
  misc_feature (14)..(111): Homolog of NCBI NO: 34395293 NR Description: putative adrenal gland protein AD-004
DLEPSSPSMAVGSGGGSRRARPNVLVTGTPGTGKTTTCSLLADAAGLRHVNIGDLVREKSLHDGWDADLECHVINEDLVCDELEDMMEEGGILVDYHGCDFFPERWFDLVVYFCLIFCLVSCLLGLLICIDSDYISSGLWISIDLLYIDICWSQMRMIGSWS

SEQ ID NO: 3612 - protein, 154 aa, Zea mays subsp. mays
  peptide (1)..(154): Ceres Seq. ID no. 12345935
  misc_feature (14)..(102): Homolog of NCBI NO: 34853506 NR Description: similar to RIKEN cDNA 4921516M08 [Rattus
  misc_feature (14)..(102): Homolog of NCBI NO: 28076975 NR Description: RIKEN cDNA 4921516M08 [Mus musculus]
  misc_feature (14)..(102): Homolog of NCBI NO: 33303797 NR Description: TAF9 RNA polymerase II, TATA box binding protein
  misc_feature (14)..(102): Homolog of NCBI NO: 7706212 NR Description: adrenal gland protein AD-004
  misc_feature (1)..(103): Homolog of NCBI NO: 15239296 NR Description: putative protein; protein id: At5g60340.1
  misc_feature (1)..(103): Homolog of NCBI NO: 10177726 NR Description: gene_id:K9B18.5~ref|NP_057367.1~similar to
  misc_feature (71)..(103): Homolog of NCBI NO: 34902744 NR Description: hypothetical protein~similar to Arabidopsis
  misc_feature (6)..(70): Homolog of NCBI NO: 34902744 NR Description: hypothetical protein~similar to Arabidopsis
  misc_feature (6)..(103): Homolog of NCBI NO: 34395293 NR Description: putative adrenal gland protein AD-004
  misc_feature (14)..(102): Homolog of NCBI NO: 6457370 NR Description: unknown protein [Oryctolagus sp.]
MAVGSGGGSRRARPNVLVTGTPGTGKTTTCSLLADAAGLRHVNIGDLVREKSLHDGWDADLECHVINEDLVCDELEDMMEEGGILVDYHGCDFFPERWFDLVVYFCLIFCLVSCLLGLLICIDSDYISSGLWISIDLLYIDICWSQMRMIGSWS

SEQ ID NO: 3613 - protein, 83 aa, Zea mays subsp. mays
  peptide (1)..(83): Ceres Seq. ID no. 12345936
RPRTLFPLDGRRERRRLAARASERASDGDAGDGEDDNVLAPCRRRRPPPRQHRRPRPREEPPRRLGRRPRVPCHQRGPGVRRA

SEQ ID NO: 3614 - DNA, 1345 bp, Zea mays subsp. mays
  misc_feature (1)..(1345): Ceres Seq. ID no. 13502498
  misc_feature: MA Experiment ID: 108523 Result: Down-regulated in Transcription
  misc_feature: MA Experiment 108523 PARAMETER Experiment Name: Zm_42deg_Heat_P Parameter: Age (day) Value: 8
  misc_feature: MA Experiment 108523 PARAMETER Experiment Name: Zm_42deg_Heat_P Parameter: Organism Value: Zea mays
  misc_feature: MA Experiment 108523 PARAMETER Experiment Name: Zm_42deg_Heat_P Parameter: Plant Line Value: 35A19
  misc_feature: MA Experiment 108523 PARAMETER Experiment Name: Zm_42deg_Heat_P Parameter: Temperature (deg C) Value: 42 vs. 22
  misc_feature: MA Experiment 108523 PARAMETER Experiment Name: Zm_42deg_Heat_P Parameter: Timepoint (hr) Value: 6
  misc_feature: MA Experiment 108523 PARAMETER Experiment Name: Zm_42deg_Heat_P Parameter: Tissue Value: Aerial
  misc_feature: MA Experiment ID: 108528 Result: Up-regulated in Transcription
  misc_feature: MA Experiment 108528 PARAMETER Experiment Name: Zm_Imbibed_Seeds_P Parameter: Age (day) Value: 5 vs. 2
  misc_feature: MA Experiment 108528 PARAMETER Experiment Name: Zm_Imbibed_Seeds_P Parameter: Organism Value: Zea mays
  misc_feature: MA Experiment 108528 PARAMETER Experiment Name: Zm_Imbibed_Seeds_P Parameter: Plant Line Value: 35A19
  misc_feature: MA Experiment 108528 PARAMETER Experiment Name: Zm_Imbibed_Seeds_P Parameter: Tissue Value: Aerial vs. Embryo
  misc_feature: MA Experiment ID: 108530 Result: Up-regulated in Transcription
  misc_feature: MA Experiment 108530 PARAMETER Experiment Name: Zm_Imbibed_Seeds_P Parameter: Age (day) Value: 6 vs. 2
  misc_feature: MA Experiment 108530 PARAMETER Experiment Name: Zm_Imbibed_Seeds_P Parameter: Organism Value: Zea mays
  misc_feature: MA Experiment 108530 PARAMETER Experiment Name: Zm_Imbibed_Seeds_P Parameter: Plant Line Value: 35A19
  misc_feature: MA Experiment 108530 PARAMETER Experiment Name: Zm_Imbibed_Seeds_P Parameter: Tissue Value: Aerial vs. Embryo
  misc_feature: MA Experiment ID: 108543 Result: Up-regulated in Transcription
  misc_feature: MA Experiment ID: 108545 Result: Up-regulated in Transcription
  misc_feature: MA Experiment 108545 PARAMETER Experiment Name: Zm_Imbibed_Seeds_P Parameter: Age (day) Value: 3 vs. 2
  misc_feature: MA Experiment 108545 PARAMETER Experiment Name: Zm_Imbibed_Seeds_P Parameter: Organism Value: Zea mays
  misc_feature: MA Experiment 108545 PARAMETER Experiment Name: Zm_Imbibed_Seeds_P Parameter: Plant Line Value: 35A19
  misc_feature: MA Experiment 108545 PARAMETER Experiment Name: Zm_Imbibed_Seeds_P Parameter: Tissue Value: Aerial vs. Embryo
  misc_feature: MA Experiment ID: 108556 Result: Down-regulated in Transcription
  misc_feature: MA Experiment 108556 PARAMETER Experiment Name: Zm_Drought_P Parameter: Age (day) Value: 9
  misc_feature: MA Experiment 108556 PARAMETER Experiment Name: Zm_Drought_P Parameter: Organism Value: Zea mays
  misc_feature: MA Experiment 108556 PARAMETER Experiment Name: Zm_Drought_P Parameter: Plant Line Value: 35A19
  misc_feature: MA Experiment 108556 PARAMETER Experiment Name: Zm_Drought_P Parameter: Timepoint (hr) Value: 24
  misc_feature: MA Experiment 108556 PARAMETER Experiment Name: Zm_Drought_P Parameter: Tissue Value: Aerial
  misc_feature: MA Experiment 108556 PARAMETER Experiment Name: Zm_Drought_P Parameter: Treatment Value: Drought vs. No Drought
  misc_feature: MA Experiment ID: 108687 Result: Down-regulated in Transcription
  misc_feature: MA Experiment 108687 PARAMETER Experiment Name: Zm_Embryos-Flowers__P Parameter: Tissue Value: Embryo vs. Aerial+
  misc_feature: MA Experiment ID: 20000478 Result: Down-regulated in Transcription
  misc_feature: MA Experiment 20000478 PARAMETER Experiment Name: Zm_5mM_SA_P Parameter: Age (day) Value: 11
  misc_feature: MA Experiment 20000478 PARAMETER Experiment Name: Zm_5mM_SA_P Parameter: Organism Value: Zea mays
  misc_feature: MA Experiment 20000478 PARAMETER Experiment Name: Zm_5mM_SA_P Parameter: Plant Line Value: 35A19
  misc_feature: MA Experiment 20000478 PARAMETER Experiment Name: Zm_5mM_SA_P Parameter: Timepoint (hr) Value: 72
  misc_feature: MA Experiment 20000478 PARAMETER Experiment Name: Zm_5mM_SA_P Parameter: Tissue Value: Aerial
  misc_feature: MA Experiment 20000478 PARAMETER Experiment Name: Zm_5mM_SA_P Parameter: Treatment Value: 5mM SA vs. No Treatment
  misc_feature: MA Experiment ID: 20000479 Result: Down-regulated in Transcription
  misc_feature: MA Experiment 20000479 PARAMETER Experiment Name: Zm_Drought_P Parameter: Age (day) Value: 10
  misc_feature: MA Experiment 20000479 PARAMETER Experiment Name: Zm_Drought_P Parameter: Organism Value: Zea mays
  misc_feature: MA Experiment 20000479 PARAMETER Experiment Name: Zm_Drought_P Parameter: Plant Line Value: 35A19
  misc_feature: MA Experiment 20000479 PARAMETER Experiment Name: Zm_Drought_P Parameter: Timepoint (hr) Value: 48
  misc_feature: MA Experiment 20000479 PARAMETER Experiment Name: Zm_Drought_P Parameter: Tissue Value: Aerial
  misc_feature: MA Experiment 20000479 PARAMETER Experiment Name: Zm_Drought_P Parameter: Treatment Value: Drought vs. No Drought
  misc_feature: MA Experiment ID: 20000487 Result: Down-regulated in Transcription
  misc_feature: MA Experiment 20000487 PARAMETER Experiment Name: Zm_50mM_NH4NO3_L_to_H_P Parameter: Organism Value: Zea mays
  misc_feature: MA Experiment 20000487 PARAMETER Experiment Name: Zm_50mM_NH4NO3_L_to_H_P Parameter: Timepoint (hr) Value: 4
  misc_feature: MA Experiment 20000487 PARAMETER Experiment Name: Zm_50mM_NH4NO3_L_to_H_P Parameter: Tissue Value: Leaves
  misc_feature: MA Experiment 20000487 PARAMETER Experiment Name: Zm_50mM_NH4NO3_L_to_H_P Parameter: Treatment Value: 50mM NH4NO3 vs. 100mM Mannitol
  misc_feature: MA Experiment ID: 20000533 Result: Down-regulated in Transcription
  misc_feature: MA Experiment 20000533 PARAMETER Experiment Name: Zm_0.001percent_MeJA_P Parameter: Age (day) Value: 11
  misc_feature: MA Experiment 20000533 PARAMETER Experiment Name: Zm_0.001percent_MeJA_P Parameter: Organism Value: Zea mays
  misc_feature: MA Experiment 20000533 PARAMETER Experiment Name: Zm_0.001percent_MeJA_P Parameter: Plant Line Value: 35A19
  misc_feature: MA Experiment 20000533 PARAMETER Experiment Name: Zm_0.001percent_MeJA_P Parameter: Timepoint (hr) Value: 72
  misc_feature: MA Experiment 20000533 PARAMETER Experiment Name: Zm_0.001percent_MeJA_P Parameter: Tissue Value: Aerial
  misc_feature: MA Experiment 20000533 PARAMETER Experiment Name: Zm_0.001percent_MeJA_P Parameter: Treatment Value: 0.001percent MeJA vs. No Treatment
  misc_feature: MA Experiment ID: 20000632 Result: Down-regulated in Transcription
  misc_feature: MA Experiment 20000632 PARAMETER Experiment Name: Zm_Herbicide-Treatments_P Parameter: Timepoint (hr) Value: 4
  misc_feature: MA Experiment 20000632 PARAMETER Experiment Name: Zm_Herbicide-Treatments_P Parameter: Tissue Value: Aerial
  misc_feature: MA Experiment 20000632 PARAMETER Experiment Name: Zm_Herbicide-Treatments_P Parameter: Treatment Value: Glean vs. No Treatment
  misc_feature: MA Experiment ID: 20000633 Result: Down-regulated in Transcription
  misc_feature: MA Experiment 20000633 PARAMETER Experiment Name: Zm_Herbicide-Treatments_P Parameter: Timepoint (hr) Value: 4
  misc_feature: MA Experiment 20000633 PARAMETER Experiment Name: Zm_Herbicide-Treatments_P Parameter: Tissue Value: Aerial
  misc_feature: MA Experiment 20000633 PARAMETER Experiment Name: Zm_Herbicide-Treatments_P Parameter: Treatment Value: Trimec vs. No Treatment
ataccgcaaccagctattgagctactgcctctgaccaagtcccaagctgcgctgcgcctgctatgtcgtcgtcctcgcccgtatcggcggtctcatcagccactgcgccgcacgtcgtggacgactgcctcggcatcgtgcagcttcttagcgatggcaccgtgacgcgctccgcggactactccgacatccctctcctgggcgaggtgccgtccaacctgcccgtccagtggaaggacgtcgtctacgaccccgcgcacgcgctccgcctccgcatgtacaggcccaccgacaccgacggcggcaggacgaccaacaacaagctgccggtgctagtctacttccacggcggcggcttctgcatctgcagcttcgagatgccccacttccacgccggcgggctccgcctcgccgccgagctcccggcgctcgtgctctccgccgactaccgcctggggcccgagcaccgcctccccgcggcgcaccgcgacgccgaggccgtcctgtcctggctccgcgcccaggccgaggccgacccgtggcttgtcgagtcggctgacatgggcagggtgttcgtctgcggcgactcggccggcggcaacatcgcgcaccacatcgccgtccagtacggcacgggccacctcgccctcggccccgtcgtccggcttggcggctacatcatgctgtggccctacttcgccgccgaggagaggacggcgtccgagacggccggtcttgacgtcgaccaccagttcgttagcacggcgctgttggatcagatgtggcgcctggcgctgccggtcggcgcgaccagggaccacccagcagcgaacccgttcggaccggacagcgtcccgctggaggacgtcgccttccagccgctgctcgtcgtggacccagaccaggacgtgctgcacgaccgcacacaggactatgccgctaggttgacggccatggggaaactggtcgagctcgtcgtgttcagaggccagggccacgggttcttcgtcttcgacccgtgtggtgaagctttccgaccagctgatccacgtcattcggcgcttcgtactgttgcataagcatccatgtaatcttgttgatcttagtactaccatgtagttgcattagtgagtcatgtactcatgtgttcgtcagtcggacaagtttgtttcgtagaatcgcggacgagctggagagtgcacagcccgtgcagtgaccgcgtctagggatgtgtttccgccacggtgtgcatgtcatgcacgtcgcacgttcgtccttagaagtcggatcgtgcagctgtattccgtggcggggaaacgtggaactaccccagtgtatttggttc

SEQ ID NO: 3615 - protein, 338 aa, Zea mays subsp. mays
  peptide (1)..(338): Ceres Seq. ID no. 13502499
  misc_feature (73)..(133): Pfam Name: Carboxylesterase Pfam Description: Carboxylesterase
  misc_feature (69)..(316): Homolog of NCBI NO: 6092014 NR Description: hsr203J homolog [Pisum sativum]
  misc_feature (7)..(319): Homolog of NCBI NO: 34393975 NR Description: putative PrMC3 [Oryza sativa (japonica
  misc_feature (15)..(319): Homolog of NCBI NO: 34393904 NR Description: putative cell death associated protein
  misc_feature (18)..(332): Homolog of NCBI NO: 5487873 NR Description: PrMC3 [Pinus radiata]
  misc_feature (16)..(323): Homolog of NCBI NO: 15240090 NR Description: expressed protein [Arabidopsis thaliana]
  misc_feature (16)..(323): Homolog of NCBI NO: 34899928 NR Description: OJ1714_H10.48 [Oryza sativa (japonica
  misc_feature (1)..(319): Homolog of NCBI NO: 34895916 NR Description: P0030H07.24 [Oryza sativa (japonica
  misc_feature (12)..(322): Homolog of NCBI NO: 34895938 NR Description: P0030H07.40 [Oryza sativa (japonica
  misc_feature (11)..(323): Homolog of NCBI NO: 27819508 NR Description: putative esterase [Oryza sativa (japonica
  misc_feature (1)..(323): Homolog of NCBI NO: 34899930 NR Description: OJ1714_H10.49 [Oryza sativa (japonica
MSSSSPVSAVSSATAPHVVDDCLGIVQLLSDGTVTRSADYSDIPLLGEVPSNLPVQWKDVVYDPAHALRLRMYRPTDTDGGRTTNNKLPVLVYFHGGGFCICSFEMPHFHAGGLRLAAELPALVLSADYRLGPEHRLPAAHRDAEAVLSWLRAQAEADPWLVESADMGRVFVCGDSAGGNIAHHIAVQYGTGHLALGPVVRLGGYIMLWPYFAAEERTASETAGLDVDHQFVSTALLDQMWRLALPVGATRDHPAANPFGPDSVPLEDVAFQPLLVVDPDQDVLHDRTQDYAARLTAMGKLVELVVFRGQGHGFFVFDPCGEAFRPADPRHSALRTVA

SEQ ID NO: 3616 - protein, 267 aa, Zea mays subsp. mays
  peptide (1)..(267): Ceres Seq. ID no. 13502500
  misc_feature (2)..(62): Pfam Name: Carboxylesterase Pfam Description: Carboxylesterase
  misc_feature (1)..(245): Homolog of NCBI NO: 6092014 NR Description: hsr203J homolog [Pisum sativum]
  misc_feature (1)..(248): Homolog of NCBI NO: 34393975 NR Description: putative PrMC3 [Oryza sativa (japonica
  misc_feature (1)..(248): Homolog of NCBI NO: 34393904 NR Description: putative cell death associated protein
  misc_feature (1)..(261): Homolog of NCBI NO: 5487873 NR Description: PrMC3 [Pinus radiata]
  misc_feature (1)..(252): Homolog of NCBI NO: 15240090 NR Description: expressed protein [Arabidopsis thaliana]
  misc_feature (1)..(252): Homolog of NCBI NO: 34899928 NR Description: OJ1714_H10.48 [Oryza sativa (japonica
  misc_feature (1)..(248): Homolog of NCBI NO: 34895916 NR Description: P0030H07.24 [Oryza sativa (japonica
  misc_feature (1)..(251): Homolog of NCBI NO: 34895938 NR Description: P0030H07.40 [Oryza sativa (japonica
  misc_feature (1)..(252): Homolog of NCBI NO: 27819508 NR Description: putative esterase [Oryza sativa (japonica
  misc_feature (1)..(252): Homolog of NCBI NO: 34899930 NR Description: OJ1714_H10.49 [Oryza sativa (japonica
MYRPTDTDGGRTTNNKLPVLVYFHGGGFCICSFEMPHFHAGGLRLAAELPALVLSADYRLGPEHRLPAAHRDAEAVLSWLRAQAEADPWLVESADMGRVFVCGDSAGGNIAHHIAVQYGTGHLALGPVVRLGGYIMLWPYFAAEERTASETAGLDVDHQFVSTALLDQMWRLALPVGATRDHPAANPFGPDSVPLEDVAFQPLLVVDPDQDVLHDRTQDYAARLTAMGKLVELVVFRGQGHGFFVFDPCGEAFRPADPRHSALRTVA

SEQ ID NO: 3617 - protein, 233 aa, Zea mays subsp. mays
  peptide (1)..(233): Ceres Seq. ID no. 13502501
  misc_feature (1)..(211): Homolog of NCBI NO: 6092014 NR Description: hsr203J homolog [Pisum sativum]
  misc_feature (1)..(214): Homolog of NCBI NO: 34393975 NR Description: putative PrMC3 [Oryza sativa (japonica
  misc_feature (1)..(214): Homolog of NCBI NO: 34393904 NR Description: putative cell death associated protein
  misc_feature (1)..(227): Homolog of NCBI NO: 5487873 NR Description: PrMC3 [Pinus radiata]
  misc_feature (1)..(218): Homolog of NCBI NO: 15240090 NR Description: expressed protein [Arabidopsis thaliana]
  misc_feature (1)..(218): Homolog of NCBI NO: 34899928 NR Description: OJ1714_H10.48 [Oryza sativa (japonica
  misc_feature (1)..(214): Homolog of NCBI NO: 34895916 NR Description: P0030H07.24 [Oryza sativa (japonica
  misc_feature (1)..(217): Homolog of NCBI NO: 34895938 NR Description: P0030H07.40 [Oryza sativa (japonica
  misc_feature (1)..(218): Homolog of NCBI NO: 27819508 NR Description: putative esterase [Oryza sativa (japonica
  misc_feature (1)..(218): Homolog of NCBI NO: 34899930 NR Description: OJ1714_H10.49 [Oryza sativa (japonica
MPHFHAGGLRLAAELPALVLSADYRLGPEHRLPAAHRDAEAVLSWLRAQAEADPWLVESADMGRVFVCGDSAGGNIAHHIAVQYGTGHLALGPVVRLGGYIMLWPYFAAEERTASETAGLDVDHQFVSTALLDQMWRLALPVGATRDHPAANPFGPDSVPLEDVAFQPLLVVDPDQDVLHDRTQDYAARLTAMGKLVELVVFRGQGHGFFVFDPCGEAFRPADPRHSALRTVA

SEQ ID NO: 3618 - DNA, 1250 bp, Zea mays subsp. mays
  misc_feature (1)..(1250): Ceres Seq. ID no. 12414165
  misc_feature: MA Experiment ID: 108527 Result: Down-regulated in Transcription
  misc_feature: MA Experiment 108527 PARAMETER Experiment Name: Zm_5mM_NO_P Parameter: Age (day) Value: 8
  misc_feature: MA Experiment 108527 PARAMETER Experiment Name: Zm_5mM_NO_P Parameter: Organism Value: Zea mays
  misc_feature: MA Experiment 108527 PARAMETER Experiment Name: Zm_5mM_NO_P Parameter: Plant Line Value: 35A19
  misc_feature: MA Experiment 108527 PARAMETER Experiment Name: Zm_5mM_NO_P Parameter: Timepoint (hr) Value: 6
  misc_feature: MA Experiment 108527 PARAMETER Experiment Name: Zm_5mM_NO_P Parameter: Tissue Value: Aerial
  misc_feature: MA Experiment 108527 PARAMETER Experiment Name: Zm_5mM_NO_P Parameter: Treatment Value: 5mM NO vs. No Treatment
  misc_feature: MA Experiment ID: 108529 Result: Up-regulated in Transcription
  misc_feature: MA Experiment 108529 PARAMETER Experiment Name: Zm_Imbibed_Seeds_P Parameter: Age (day) Value: 5 vs. 2
  misc_feature: MA Experiment 108529 PARAMETER Experiment Name: Zm_Imbibed_Seeds_P Parameter: Organism Value: Zea mays
  misc_feature: MA Experiment 108529 PARAMETER Experiment Name: Zm_Imbibed_Seeds_P Parameter: Plant Line Value: 35A19
  misc_feature: MA Experiment 108529 PARAMETER Experiment Name: Zm_Imbibed_Seeds_P Parameter: Tissue Value: Roots vs. Embryo
  misc_feature: MA Experiment ID: 108534 Result: Down-regulated in Transcription
  misc_feature: MA Experiment 108534 PARAMETER Experiment Name: Zm_4deg_Cold_P Parameter: Age (hr) Value: 8
  misc_feature: MA Experiment 108534 PARAMETER Experiment Name: Zm_4deg_Cold_P Parameter: Organism Value: Zea mays
  misc_feature: MA Experiment 108534 PARAMETER Experiment Name: Zm_4deg_Cold_P Parameter: Plant Line Value: 35A19
  misc_feature: MA Experiment 108534 PARAMETER Experiment Name: Zm_4deg_Cold_P Parameter: Temperature (deg C) Value: 4 vs. 22
  misc_feature: MA Experiment 108534 PARAMETER Experiment Name: Zm_4deg_Cold_P Parameter: Timepoint (hr) Value: 6
  misc_feature: MA Experiment 108534 PARAMETER Experiment Name: Zm_4deg_Cold_P Parameter: Tissue Value: Aerial
  misc_feature: MA Experiment ID: 108535 Result: Down-regulated in Transcription
  misc_feature: MA Experiment 108535 PARAMETER Experiment Name: Zm_Meristem_P Parameter: Age (day) Value: 8
  misc_feature: MA Experiment 108535 PARAMETER Experiment Name: Zm_Meristem_P Parameter: Organism Value: Zea mays
  misc_feature: MA Experiment 108535 PARAMETER Experiment Name: Zm_Meristem_P Parameter: Plant Line Value: 35A19
  misc_feature: MA Experiment 108535 PARAMETER Experiment Name: Zm_Meristem_P Parameter: Tissue Value: Root Meristem vs. Above Root Meristem
  misc_feature: MA Experiment ID: 108543 Result: Up-regulated in Transcription
  misc_feature: MA Experiment ID: 108544 Result: Up-regulated in Transcription
  misc_feature: MA Experiment ID: 108546 Result: Up-regulated in Transcription
  misc_feature: MA Experiment 108546 PARAMETER Experiment Name: Zm_Imbibed_Seeds_P Parameter: Age (day) Value: 3 vs. 2
  misc_feature: MA Experiment 108546 PARAMETER Experiment Name: Zm_Imbibed_Seeds_P Parameter: Organism Value: Zea mays
  misc_feature: MA Experiment 108546 PARAMETER Experiment Name: Zm_Imbibed_Seeds_P Parameter: Plant Line Value: 35A19
  misc_feature: MA Experiment 108546 PARAMETER Experiment Name: Zm_Imbibed_Seeds_P Parameter: Tissue Value: Roots vs. Embryo
  misc_feature: MA Experiment ID: 108556 Result: Down-regulated in Transcription
  misc_feature: MA Experiment 108556 PARAMETER Experiment Name: Zm_Drought_P Parameter: Age (day) Value: 9
  misc_feature: MA Experiment 108556 PARAMETER Experiment Name: Zm_Drought_P Parameter: Organism Value: Zea mays
  misc_feature: MA Experiment 108556 PARAMETER Experiment Name: Zm_Drought_P Parameter: Plant Line Value: 35A19
  misc_feature: MA Experiment 108556 PARAMETER Experiment Name: Zm_Drought_P Parameter: Timepoint (hr) Value: 24
  misc_feature: MA Experiment 108556 PARAMETER Experiment Name: Zm_Drought_P Parameter: Tissue Value: Aerial
  misc_feature: MA Experiment 108556 PARAMETER Experiment Name: Zm_Drought_P Parameter: Treatment Value: Drought vs. No Drought
  misc_feature: MA Experiment ID: 108559 Result: Down-regulated in Transcription
  misc_feature: MA Experiment 108559 PARAMETER Experiment Name: Zm_5mM_NO_P Parameter: Age (day) Value: 8
  misc_feature: MA Experiment 108559 PARAMETER Experiment Name: Zm_5mM_NO_P Parameter: Organism Value: Zea mays
  misc_feature: MA Experiment 108559 PARAMETER Experiment Name: Zm_5mM_NO_P Parameter: Plant Line Value: 35A19
  misc_feature: MA Experiment 108559 PARAMETER Experiment Name: Zm_5mM_NO_P Parameter: Timepoint (hr) Value: 12
  misc_feature: MA Experiment 108559 PARAMETER Experiment Name: Zm_5mM_NO_P Parameter: Tissue Value: Aerial
  misc_feature: MA Experiment 108559 PARAMETER Experiment Name: Zm_5mM_NO_P Parameter: Treatment Value: 5mM NO vs. No Treatment
  misc_feature: MA Experiment ID: 108689 Result: Down-regulated in Transcription
  misc_feature: MA Experiment 108689 PARAMETER Experiment Name: Zm_Drought_Roots_P Parameter: Age (day) Value: 9
  misc_feature: MA Experiment 108689 PARAMETER Experiment Name: Zm_Drought_Roots_P Parameter: Organism Value: Zea mays
  misc_feature: MA Experiment 108689 PARAMETER Experiment Name: Zm_Drought_Roots_P Parameter: Plant Line Value: 35A19
  misc_feature: MA Experiment 108689 PARAMETER Experiment Name: Zm_Drought_Roots_P Parameter: Timepoint (hr) Value: 24
  misc_feature: MA Experiment 108689 PARAMETER Experiment Name: Zm_Drought_Roots_P Parameter: Tissue Value: Roots
  misc_feature: MA Experiment 108689 PARAMETER Experiment Name: Zm_Drought_Roots_P Parameter: Treatment Value: Drought vs. No Drought
  misc_feature: MA Experiment ID: 20000477 Result: Down-regulated in Transcription
  misc_feature: MA Experiment 20000477 PARAMETER Experiment Name: Zm_5mM_SA_P Parameter: Age (day) Value: 10
  misc_feature: MA Experiment 20000477 PARAMETER Experiment Name: Zm_5mM_SA_P Parameter: Organism Value: Zea mays
  misc_feature: MA Experiment 20000477 PARAMETER Experiment Name: Zm_5mM_SA_P Parameter: Plant Line Value: 35A19
  misc_feature: MA Experiment 20000477 PARAMETER Experiment Name: Zm_5mM_SA_P Parameter: Timepoint (hr) Value: 48
  misc_feature: MA Experiment 20000477 PARAMETER Experiment Name: Zm_5mM_SA_P Parameter: Tissue Value: Aerial
  misc_feature: MA Experiment 20000477 PARAMETER Experiment Name: Zm_5mM_SA_P Parameter: Treatment Value: 5mM SA vs. No Treatment
  misc_feature: MA Experiment ID: 20000479 Result: Down-regulated in Transcription
  misc_feature: MA Experiment 20000479 PARAMETER Experiment Name: Zm_Drought_P Parameter: Age (day) Value: 10
  misc_feature: MA Experiment 20000479 PARAMETER Experiment Name: Zm_Drought_P Parameter: Organism Value: Zea mays
  misc_feature: MA Experiment 20000479 PARAMETER Experiment Name: Zm_Drought_P Parameter: Plant Line Value: 35A19
  misc_feature: MA Experiment 20000479 PARAMETER Experiment Name: Zm_Drought_P Parameter: Timepoint (hr) Value: 48
  misc_feature: MA Experiment 20000479 PARAMETER Experiment Name: Zm_Drought_P Parameter: Tissue Value: Aerial
  misc_feature: MA Experiment 20000479 PARAMETER Experiment Name: Zm_Drought_P Parameter: Treatment Value: Drought vs. No Drought
  misc_feature: MA Experiment ID: 20000480 Result: Down-regulated in Transcription
  misc_feature: MA Experiment 20000480 PARAMETER Experiment Name: Zm_Drought_P Parameter: Age (day) Value: 11
  misc_feature: MA Experiment 20000480 PARAMETER Experiment Name: Zm_Drought_P Parameter: Organism Value: Zea mays
  misc_feature: MA Experiment 20000480 PARAMETER Experiment Name: Zm_Drought_P Parameter: Plant Line Value: 35A19
  misc_feature: MA Experiment 20000480 PARAMETER Experiment Name: Zm_Drought_P Parameter: Timepoint (hr) Value: 72
  misc_feature: MA Experiment 20000480 PARAMETER Experiment Name: Zm_Drought_P Parameter: Tissue Value: Aerial
  misc_feature: MA Experiment 20000480 PARAMETER Experiment Name: Zm_Drought_P Parameter: Treatment Value: Drought vs. No Drought
  misc_feature: MA Experiment ID: 20001606 Result: Down-regulated in Transcription
  misc_feature: MA Experiment 20001606 PARAMETER Experiment Name: Zm_50ppm_KNO3_L-to-H_P Parameter: Age (day) Value: 19
  misc_feature: MA Experiment 20001606 PARAMETER Experiment Name: Zm_50ppm_KNO3_L-to-H_P Parameter: Organism Value: Zea mays
  misc_feature: MA Experiment 20001606 PARAMETER Experiment Name: Zm_50ppm_KNO3_L-to-H_P Parameter: Plant Line Value: 35A19
  misc_feature: MA Experiment 20001606 PARAMETER Experiment Name: Zm_50ppm_KNO3_L-to-H_P Parameter: Timepoint (hr) Value: 8
  misc_feature: MA Experiment 20001606 PARAMETER Experiment Name: Zm_50ppm_KNO3_L-to-H_P Parameter: Tissue Value: Shoots
  misc_feature: MA Experiment 20001606 PARAMETER Experiment Name: Zm_50ppm_KNO3_L-to-H_P Parameter: Treatment Value: 50ppm KNO3 vs. 50ppm KCl
  misc_feature: MA Experiment ID: 20001608 Result: Down-regulated in Transcription
  misc_feature: MA Experiment 20001608 PARAMETER Experiment Name: Zm_50ppm_KNO3_L-to-H_P Parameter: Age (day) Value: 21
  misc_feature: MA Experiment 20001608 PARAMETER Experiment Name: Zm_50ppm_KNO3_L-to-H_P Parameter: Organism Value: Zea mays
  misc_feature: MA Experiment 20001608 PARAMETER Experiment Name: Zm_50ppm_KNO3_L-to-H_P Parameter: Plant Line Value: 35A19
  misc_feature: MA Experiment 20001608 PARAMETER Experiment Name: Zm_50ppm_KNO3_L-to-H_P Parameter: Timepoint (hr) Value: 48
  misc_feature: MA Experiment 20001608 PARAMETER Experiment Name: Zm_50ppm_KNO3_L-to-H_P Parameter: Tissue Value: Shoots
  misc_feature: MA Experiment 20001608 PARAMETER Experiment Name: Zm_50ppm_KNO3_L-to-H_P Parameter: Treatment Value: 50ppm KNO3 vs. 50ppm KCl
tccactccactccagccaggcgccagcactcacccacccatggcgtccgaagccgcgccgcgggtcgtcgtggacgagtgccggggcgtgctgtccgtgtacagcgacggcacggtggtgcggcgcgcgcagccggggttcgcgacgccggtgcgggacgacggcacggtcgactggaaggacgtgacgttcgacgaggccccgcgggctggcgctccgcctctacctcccccgggaccgcggggccgcggccgggcggcgcctgccggtcttcttctactaccacggcggcggcttctgcatcgggtcccgcgcctggcccaactgccagaactactgcctgcgcctggcctccgacctgggcgcgctcgtggtggcgccggactaccgcctcgcgcccgagcaccgcctccccgccgccatcgacgacggcgcggcggcggtcctgtggctggcgaggcagggcggcggggacccctgggtcgccgaggccgccgacctcggccgcgtcttcgtgtcgggcgactcggccggcggcaccatcgcgcaccacctcgccgtgcgcttcggtggctcgcccgcggacctggcccccgtcgccgtgcggggatacgtccagctcatgccattcttcggcggcgtggcgcgcacgcggtcggaggccgagtgccccgccgacgctttcctcgaccggcccctcaacgaccgctactggcgcctgtcgctgccggagggcgccacgcccgaccaccccgtggccaacccgttcggccccggcgcgccgccgctggacgccgtcgagttcgcgcccaccctggtcgtcgtcggcggccgcgacctcctccacgaccgcgccgtcgactacgccgccaggctcagggccgccgggaagcccgtcgtggtcagggacttccacggccagcagcacggcttcttcaccatcgacccctggtccgacgcctccgccgagctcatgcgcgtcatcaagcgcttcgtcgacgccgacggccgcttcgacttcgactgacacgtcggtgtcgaactctagtattaaatccgagggagcgagcagaatggtctgcgtcgagccgtcgagtagttcccgggttgaaatcaatgtggtttggtgattgtgatatttttcttgctcgtttgtttttattatggacggttctcctgttaaaaagtagtagcccggtgtgtttagtaggaatcttgtatctagattcgctcgaggaacattctagatg

SEQ ID NO: 3619 - protein, 416 aa, Zea mays subsp. mays
  peptide (1)..(416): Ceres Seq. ID no. 12414166
  misc_feature (54)..(309): Pfam Name: HlyD family secretion protein Pfam Description: HlyD family secretion protein
  misc_feature (20)..(88): Homolog of NCBI NO: 34899928 NR Description: OJ1714_H10.48 [Oryza sativa (japonica
  misc_feature (14)..(65): Homolog of NCBI NO: 34899924 NR Description: OJ1714_H10.46 [Oryza sativa (japonica
  misc_feature (18)..(85): Homolog of NCBI NO: 34899936 NR Description: putative cell death associated protein
STPLQPGASTHPPMASEAAPRVVVDECRGVLSVYSDGTVVRRAQPGFATPVRDDGTVDWKDVTFDEAPRAGAPPLPPPGPRGRGRAAPAGLLLLPRRRLLHRVPRLAQLPELLPAPGLRPGRARGGAGLPPRARAPPPRRHRRRRGGGPVAGEAGRRGPLGRRGRRPRPRLRVGRLGRRHHRAPPRRALRWLARGPGPRRRAGIRPAHAILRRRGAHAVGGRVPRRRFPRPAPQRPLLAPVAAGGRHARPPRGQPVRPRRAAAGRRRVRAHPGRRRRPRPPPRPRRRLRRQAQGRREARRGQGLPRPAARLLHHRPLVRRLRRAHARHQALRRRRRPLRLRLTRRCRTLVLNPRERAEWSASSRRVVPGLKSMWFGDCDIFLARLFLLWTVLLLKSSSPVCLVGILYLDSLEEHSR

SEQ ID NO: 3620 - protein, 403 aa, Zea mays subsp. mays
  peptide (1)..(403): Ceres Seq. ID no. 12414167
  misc_feature (41)..(296): Pfam Name: HlyD family secretion protein Pfam Description: HlyD family secretion protein
  misc_feature (7)..(75): Homolog of NCBI NO: 34899928 NR Description: OJ1714_H10.48 [Oryza sativa (japonica
  misc_feature (1)..(52): Homolog of NCBI NO: 34899924 NR Description: OJ1714_H10.46 [Oryza sativa (japonica
  misc_feature (5)..(72): Homolog of NCBI NO: 34899936 NR Description: putative cell death associated protein
MASEAAPRVVVDECRGVLSVYSDGTVVRRAQPGFATPVRDDGTVDWKDVTFDEAPRAGAPPLPPPGPRGRGRAAPAGLLLLPRRRLLHRVPRLAQLPELLPAPGLRPGRARGGAGLPPRARAPPPRRHRRRRGGGPVAGEAGRRGPLGRRGRRPRPRLRVGRLGRRHHRAPPRRALRWLARGPGPRRRAGIRPAHAILRRRGAHAVGGRVPRRRFPRPAPQRPLLAPVAAGGRHARPPRGQPVRPRRAAAGRRRVRAHPGRRRRPRPPPRPRRRLRRQAQGRREARRGQGLPRPAARLLHHRPLVRRLRRAHARHQALRRRRRPLRLRLTRRCRTLVLNPRERAEWSASSRRVVPGLKSMWFGDCDIFLARLFLLWTVLLLKSSSPVCLVGILYLDSLEEHSR

SEQ ID NO: 3621 - protein, 375 aa, Zea mays subsp. mays
  peptide (1)..(375): Ceres Seq. ID no. 12414168
  misc_feature (72)..(344): Pfam Name: Equine herpesvirus glycoprotein gp2 Pfam Description: Equine herpesvirus glycoprotein gp2
  misc_feature (72)..(367): Homolog of NCBI NO: 13592175 NR Description: ppg3 [Leishmania major]
  misc_feature (67)..(367): Homolog of NCBI NO: 13592175 NR Description: ppg3 [Leishmania major]
  misc_feature (72)..(366): Homolog of NCBI NO: 13592175 NR Description: ppg3 [Leishmania major]
  misc_feature (72)..(355): Homolog of NCBI NO: 13592175 NR Description: ppg3 [Leishmania major]
  misc_feature (72)..(367): Homolog of NCBI NO: 13592175 NR Description: ppg3 [Leishmania major]
  misc_feature (72)..(366): Homolog of NCBI NO: 13592175 NR Description: ppg3 [Leishmania major]
  misc_feature (67)..(367): Homolog of NCBI NO: 13592175 NR Description: ppg3 [Leishmania major]
  misc_feature (67)..(367): Homolog of NCBI NO: 13592175 NR Description: ppg3 [Leishmania major]
  misc_feature (72)..(367): Homolog of NCBI NO: 13592175 NR Description: ppg3 [Leishmania major]
  misc_feature (72)..(367): Homolog of NCBI NO: 13592175 NR Description: ppg3 [Leishmania major]
HSTPARRQHSPTHGVRSRAAGRRGRVPGRAVRVQRRHGGAARAAGVRDAGAGRRHGRLEGRDVRRGPAGWRSASTSPGTAGPRPGGACRSSSTTTAAASASGPAPGPTARTTACAWPPTWARSWWRRTTASRPSTASPPPSTTARRRSCGWRGRAAGTPGSPRPPTSAASSCRATRPAAPSRTTSPCASVARPRTWPPSPCGDTSSSCHSSAAWRARGRRPSAPPTLSSTGPSTTATGACRCRRAPRPTTPWPTRSAPARRRWTPSSSRPPWSSSAAATSSTTAPSTTPPGSGPPGSPSWSGTSTASSTASSPSTPGPTPPPSSCASSSASSTPTAASTSTDTSVSNSSIKSEGASRMVCVEPSSSSRVEINVVW

SEQ ID NO: 3622 - DNA, 1457 bp, Zea mays subsp. mays
  misc_feature (1)..(1457): Ceres Seq. ID no. 12406983
  misc_feature: MA Experiment ID: 108543 Result: Down-regulated in Transcription
acctcccttgacccgtcgtcccatgctaaaagcccagggttaggagctagaggtaatctctctcccgtctctccccagtgggcgtgggggcgccgcatggaagccatggacgtcaagtacaagcccgtcatgttccccaacggcgccggcctcaagaagccgaagccggcggcggccgtggcgctggccggggagccgctgtaccgggagtgcctcaagaaccacgccgcgagcctgggcgggcacgccgtcgacggttgcggcgagttcatgccctcgccgggggccaaccccgccgacccgacgtcgctcaagtgcgcggcgtgcgggtgccaccgcaacttccaccgccggacgctggagggttcccctccgccgcccgcgcccgcgccgctggcgcttcccgcctccgccgagcgtgatgcacggccagccgcaccgcgcccgggaggagacgcccgaggaccgccacccgggggtcgtcgacgccgacgactccgattccgactcggaaggctcggagtacgacgaggagcggtcggtgtccccgccgccgccgccgcaccacctgctgccggcgccggtggcgcagcagcccccgccaccgtcctacttcccgacggcgccgcacatggtgctctcgctaggttccggcgtgcccgggcccgcggtggcggtatccccggcgcagaggctggccccgacccagctgacgccgtccagcgcgccgccccacgccgggggcgcgatgcccatgcccaggaagcggttccgcaccaagttcaccgccgagcagaagcagcggatgcaggagctgtcggagcggctcgggtggcggctgcagaagcgcgacgaggccatcgtcgacgagtggtgccgcgacatcggcgtcggcaagggcgtcttcaaggtctggatgcacaacaacaagcacaacttcctgggcgggcacagcgcccgccgcagcgcctcctcgcccgcccccgcccccgccgccgcgtcgctccaaaccccagccgccggcgccggcgctgctgcagcaccgtcattccacccgtccaggatcacccctccccctcccgtcctcacctcgtccccgacggccgccaccggcttcaacatcaacggcgccgcctcgtcggcgcccaccgtcgccaccgactacaccacggacaacgccaacggagcttcgtcgccgcactccgcttgaactagagaagggagaagagaggaggggggaagggaagggagagcggagagagagaaacatttagcttaatttcagtgatcactcgttttttttttctttagacttcttgccatctactaagaaattaaccccaagaaaaagcatgccgctgtgcgccatgcctagaaatccaagcttcttcctcccctgtactagtactgtatgctcttgggatccgatgatgatgctgatgctgatttaggattag

SEQ ID NO: 3623 - protein, 404 aa, Zea mays subsp. mays
  peptide (1)..(404): Ceres Seq. ID no. 12406984
  misc_feature (68)..(122): Pfam Name: ZF-HD protein dimerisation region Pfam Description: ZF-HD protein dimerisation region
  misc_feature (41)..(152): Homolog of NCBI NO: 21554149 NR Description: unknown [Arabidopsis thaliana]
  misc_feature (41)..(152): Homolog of NCBI NO: 15230335 NR Description: putative protein
  misc_feature (64)..(122): Homolog of NCBI NO: 18398714 NR Description: expressed protein
  misc_feature (68)..(122): Homolog of NCBI NO: 13374061 NR Description: ZF-HD homeobox protein [Flaveria bidentis]
  misc_feature (52)..(122): Homolog of NCBI NO: 18410804 NR Description: expressed protein
  misc_feature (90)..(158): Homolog of NCBI NO: 13277222 NR Description: ZF-HD homeobox protein [Flaveria bidentis]
  misc_feature (54)..(118): Homolog of NCBI NO: 13277216 NR Description: ZF-HD homeobox protein [Flaveria trinervia]
  misc_feature (68)..(118): Homolog of NCBI NO: 13277218 NR Description: ZF-HD homeobox protein [Flaveria bidentis]
  misc_feature (57)..(158): Homolog of NCBI NO: 15222382 NR Description: hypothetical protein; protein id: At1g69600.1
  misc_feature (39)..(149): Homolog of NCBI NO: 13277220 NR Description: ZF-HD homeobox protein [Flaveria bidentis]
TSLDPSSHAKSPGLGARGNLSPVSPQWAWGRRMEAMDVKYKPVMFPNGAGLKKPKPAAAVALAGEPLYRECLKNHAASLGGHAVDGCGEFMPSPGANPADPTSLKCAACGCHRNFHRRTLEGSPPPPAPAPLALPASAERDARPAAPRPGGDARGPPPGGRRRRRLRFRLGRLGVRRGAVGVPAAAAAPPAAGAGGAAAPATVLLPDGAAHGALARFRRARARGGGIPGAEAGPDPADAVQRAAPRRGRDAHAQEAVPHQVHRRAEAADAGAVGAARVAAAEARRGHRRRVVPRHRRRQGRLQGLDAQQQAQLPGRAQRPPQRLLARPRPRRRVAPNPSRRRRRCCSTVIPPVQDHPSPSRPHLVPDGRHRLQHQRRRLVGAHRRHRLHHGQRQRSFVAALRLN

SEQ ID NO: 3624 - protein, 372 aa, Zea mays subsp. mays
  peptide (1)..(372): Ceres Seq. ID no. 12406985
  misc_feature (36)..(90): Pfam Name: ZF-HD protein dimerisation region Pfam Description: ZF-HD protein dimerisation region
  misc_feature (9)..(120): Homolog of NCBI NO: 21554149 NR Description: unknown [Arabidopsis thaliana]
  misc_feature (9)..(120): Homolog of NCBI NO: 15230335 NR Description: putative protein
  misc_feature (32)..(90): Homolog of NCBI NO: 18398714 NR Description: expressed protein
  misc_feature (36)..(90): Homolog of NCBI NO: 13374061 NR Description: ZF-HD homeobox protein [Flaveria bidentis]
  misc_feature (20)..(90): Homolog of NCBI NO: 18410804 NR Description: expressed protein
  misc_feature (58)..(126): Homolog of NCBI NO: 13277222 NR Description: ZF-HD homeobox protein [Flaveria bidentis]
  misc_feature (22)..(86): Homolog of NCBI NO: 13277216 NR Description: ZF-HD homeobox protein [Flaveria trinervia]
  misc_feature (36)..(86): Homolog of NCBI NO: 13277218 NR Description: ZF-HD homeobox protein [Flaveria bidentis]
  misc_feature (25)..(126): Homolog of NCBI NO: 15222382 NR Description: hypothetical protein; protein id: At1g69600.1
  misc_feature (7)..(117): Homolog of NCBI NO: 13277220 NR Description: ZF-HD homeobox protein [Flaveria bidentis]
MEAMDVKYKPVMFPNGAGLKKPKPAAAVALAGEPLYRECLKNHAASLGGHAVDGCGEFMPSPGANPADPTSLKCAACGCHRNFHRRTLEGSPPPPAPAPLALPASAERDARPAAPRPGGDARGPPPGGRRRRRLRFRLGRLGVRRGAVGVPAAAAAPPAAGAGGAAAPATVLLPDGAAHGALARFRRARARGGGIPGAEAGPDPADAVQRAAPRRGRDAHAQEAVPHQVHRRAEAADAGAVGAARVAAAEARRGHRRRVVPRHRRRQGRLQGLDAQQQAQLPGRAQRPPQRLLARPRPRRRVAPNPSRRRRRCCSTVIPPVQDHPSPSRPHLVPDGRHRLQHQRRRLVGAHRRHRLHHGQRQRSFVAALRLN

SEQ ID NO: 3625 - protein, 369 aa, Zea mays subsp. mays
  peptide (1)..(369): Ceres Seq. ID no. 12406986
  misc_feature (33)..(87): Pfam Name: ZF-HD protein dimerisation region Pfam Description: ZF-HD protein dimerisation region
  misc_feature (6)..(117): Homolog of NCBI NO: 21554149 NR Description: unknown [Arabidopsis thaliana]
  misc_feature (6)..(117): Homolog of NCBI NO: 15230335 NR Description: putative protein
  misc_feature (29)..(87): Homolog of NCBI NO: 18398714 NR Description: expressed protein
  misc_feature (33)..(87): Homolog of NCBI NO: 13374061 NR Description: ZF-HD homeobox protein [Flaveria bidentis]
  misc_feature (17)..(87): Homolog of NCBI NO: 18410804 NR Description: expressed protein
  misc_feature (55)..(123): Homolog of NCBI NO: 13277222 NR Description: ZF-HD homeobox protein [Flaveria bidentis]
  misc_feature (19)..(83): Homolog of NCBI NO: 13277216 NR Description: ZF-HD homeobox protein [Flaveria trinervia]
  misc_feature (33)..(83): Homolog of NCBI NO: 13277218 NR Description: ZF-HD homeobox protein [Flaveria bidentis]
  misc_feature (22)..(123): Homolog of NCBI NO: 15222382 NR Description: hypothetical protein; protein id: At1g69600.1
  misc_feature (4)..(114): Homolog of NCBI NO: 13277220 NR Description: ZF-HD homeobox protein [Flaveria bidentis]
MDVKYKPVMFPNGAGLKKPKPAAAVALAGEPLYRECLKNHAASLGGHAVDGCGEFMPSPGANPADPTSLKCAACGCHRNFHRRTLEGSPPPPAPAPLALPASAERDARPAAPRPGGDARGPPPGGRRRRRLRFRLGRLGVRRGAVGVPAAAAAPPAAGAGGAAAPATVLLPDGAAHGALARFRRARARGGGIPGAEAGPDPADAVQRAAPRRGRDAHAQEAVPHQVHRRAEAADAGAVGAARVAAAEARRGHRRRVVPRHRRRQGRLQGLDAQQQAQLPGRAQRPPQRLLARPRPRRRVAPNPSRRRRRCCSTVIPPVQDHPSPSRPHLVPDGRHRLQHQRRRLVGAHRRHRLHHGQRQRSFVAALRLN

SEQ ID NO: 3626 - DNA, 1493 bp, Zea mays subsp. mays
  misc_feature (1)..(1493): Ceres Seq. ID no. 12469735
  misc_feature: MA Experiment ID: 108544 Result: Down-regulated in Transcription
  misc_feature: MA Experiment ID: 20000492 Result: Up-regulated in Transcription
  misc_feature: MA Experiment 20000492 PARAMETER Experiment Name: Zm_Hybrid_Seed_Dev_P Parameter: DAP Value: 12
  misc_feature: MA Experiment 20000492 PARAMETER Experiment Name: Zm_Hybrid_Seed_Dev_P Parameter: Organism Value: Zea mays
  misc_feature: MA Experiment 20000492 PARAMETER Experiment Name: Zm_Hybrid_Seed_Dev_P Parameter: Plant Line Value: 35A19
  misc_feature: MA Experiment 20000492 PARAMETER Experiment Name: Zm_Hybrid_Seed_Dev_P Parameter: Tissue Value: Fert Kernel vs. Unfert Floret
ataaaatgatttcttttatagagtgtacagctggcagtcgccgagccgtcctaactcagcgagagggtttcgaattggcgccaagccgccaaccattccccccaatcccgcctgccagccctagggtttctgctacgccatggcgggaaccgccgccgccgctcccatggacatcgatgcagccgcgccgcctcccccgccgcctggtgcggcggccaagggcaaggcgctgctctccgctggcggcagggcagcgccctgggtcgagaagtaccggccccagtccctcgccgacgtcgccgcccaccgcgatatcgtcgacacaattgacaggcttacaaacgagaatagacttccacacttgttgctatatgggccacctggcactgggaaaacatcgacgattctggctgttgcgaggaagctatatgggtctcagtatagcaacatgatcctggagctcaatgcgtcagatgaacgtggcattgatgttgtcaggcagcagatccaggattttgctggggcacgcagcctctcttttggagcaaggccttctgttaagctggttctcttggatgaagcagacgcaatgacaaaggatgcacaatttgcattgagaagagttatcgagaagtatacaaggagcacaaggtttgcactcatatgcaaccatgtcaacaaaattatccctgcgctacaatcaaggtgcaccaggtttagatttgctccactagatggcagtcatgttagagagcgtcttcaacatataataaaatctgaggggctcagtgtagatgacggtggcttgacagccctagtgcggttaagcaatggtgatatgaggaaggctttgaatatattgcagtcaacgcacatggcatcccaacaaatcacagaagaagctgtctatctttgcacaggaaaccccatgccaaaagatattgagcagatagctttttggctattaaatgaaccattttcaaccagcttcaaatatatatctgacatgaagatgagaaaagggctggccttggttgatatcatacgggaggttactatgtttgtgttcaaaatacaaatgccatctgatgttcgtgtaaagctaatcaataacttggctgatattgagtacagactaagctttgcatgcaacgataaactgcagctgggcgcactgatctcaactttcacggacactcgcacggctatggttgctgctgccagctaattccagtaatgtgaaggatgtttctgctgctccctctggaatctgaagatgaagcgcagctacattatggggtcaacatcttgcctgtagttagcaagctgaaaggtttggtgagggttgtcttagatcatctgtatgtctgctggacgtgatgtggtaactgcctggaacttgggagtactcgtatgactgaacgctgccaggcgttctcatgttatgcgtgtaagattctatccagtagtataaaccctagtgccgttctttg

SEQ ID NO: 3627 - protein, 362 aa, Zea mays subsp. mays
  peptide (1)..(362): Ceres Seq. ID no. 12469736
  misc_feature (74)..(208): Pfam Name: ATPase family associated with various cellular Pfam Description: ATPase family associated with various cellular
  misc_feature (1)..(361): Homolog of NCBI NO: 10798790 NR Description: replication factor C 36kDa subunit [Oryza sativa
  misc_feature (4)..(361): Homolog of NCBI NO: 15223967 NR Description: putative replication factor C; protein id: supported by cDNA: gi_17529331 [Arabidopsis thaliana]
  misc_feature (14)..(361): Homolog of NCBI NO: 20841441 NR Description: replication factor C (activator 1) 5 [Mus >gi|12847646|dbj|BAB27652.1| unnamed protein product [Mus
  misc_feature (37)..(361): Homolog of NCBI NO: 6677723 NR Description: replication factor C (activator 1) 5, 36.5kDa; factor C (activator 1) 5 (36.5kD) [Homo sapiens] Activator 1 36 kDa subunit (Replication factor C 36 kDa subunit)
  misc_feature (27)..(361): Homolog of NCBI NO: 27882432 NR Description: Similar to replication factor C (activator 1) 5
  misc_feature (47)..(361): Homolog of NCBI NO: 23271821 NR Description: Similar to replication factor C (activator 1) 5,
  misc_feature (10)..(340): Homolog of NCBI NO: 34872605 NR Description: similar to replication factor C 5 isoform 1; RFC, kD subunit; activator 1 36 kDa subunit; A1 36 kDa subunit [Rattus
  misc_feature (27)..(349): Homolog of NCBI NO: 13431787 NR Description: Activator 1 40 kDa subunit (Replication factor C kDa subunit) (Replication factor C3) >gi|11278371|pir||T43410
  misc_feature (40)..(350): Homolog of NCBI NO: 19921076 NR Description: CG5313-PA [Drosophila melanogaster] replication factor C subunit 3 [Drosophila melanogaster]
  misc_feature (27)..(347): Homolog of NCBI NO: 30913228 NR Description: Activator 1 subunit 3 (Replication factor C
MAGTAAAAPMDIDAAAPPPPPPGAAAKGKALLSAGGRAAPWVEKYRPQSLADVAAHRDIVDTIDRLTNENRLPHLLLYGPPGTGKTSTILAVARKLYGSQYSNMILELNASDERGIDVVRQQIQDFAGARSLSFGARPSVKLVLLDEADAMTKDAQFALRRVIEKYTRSTRFALICNHVNKIIPALQSRCTRFRFAPLDGSHVRERLQHIIKSEGLSVDDGGLTALVRLSNGDMRKALNILQSTHMASQQITEEAVYLCTGNPMPKDIEQIAFWLLNEPFSTSFKYISDMKMRKGLALVDIIREVTMFVFKIQMPSDVRVKLINNLADIEYRLSFACNDKLQLGALISTFTDTRTAMVAAAS

SEQ ID NO: 3628 - protein, 353 aa, Zea mays subsp. mays
  peptide (1)..(353): Ceres Seq. ID no. 12469737
  misc_feature (65)..(199): Pfam Name: ATPase family associated with various cellular Pfam Description: ATPase family associated with various cellular
  misc_feature (1)..(352): Homolog of NCBI NO: 10798790 NR Description: replication factor C 36kDa subunit [Oryza sativa
  misc_feature (1)..(352): Homolog of NCBI NO: 15223967 NR Description: putative replication factor C; protein id: supported by cDNA: gi_17529331 [Arabidopsis thaliana]
  misc_feature (5)..(352): Homolog of NCBI NO: 20841441 NR Description: replication factor C (activator 1) 5 [Mus >gi|12847646|dbj|BAB27652.1| unnamed protein product [Mus
  misc_feature (28)..(352): Homolog of NCBI NO: 6677723 NR Description: replication factor C (activator 1) 5, 36.5kDa; factor C (activator 1) 5 (36.5kD) [Homo sapiens] Activator 1 36 kDa subunit (Replication factor C 36 kDa subunit)
  misc_feature (18)..(352): Homolog of NCBI NO: 27882432 NR Description: Similar to replication factor C (activator 1) 5
  misc_feature (38)..(352): Homolog of NCBI NO: 23271821 NR Description: Similar to replication factor C (activator 1) 5,
  misc_feature (1)..(331): Homolog of NCBI NO: 34872605 NR Description: similar to replication factor C 5 isoform 1; RFC, kD subunit; activator 1 36 kDa subunit; A1 36 kDa subunit [Rattus
  misc_feature (18)..(340): Homolog of NCBI NO: 13431787 NR Description: Activator 1 40 kDa subunit (Replication factor C kDa subunit) (Replication factor C3) >gi|11278371|pir||T43410
  misc_feature (31)..(341): Homolog of NCBI NO: 19921076 NR Description: CG5313-PA [Drosophila melanogaster] replication factor C subunit 3 [Drosophila melanogaster]
  misc_feature (18)..(338): Homolog of NCBI NO: 30913228 NR Description: Activator 1 subunit 3 (Replication factor C
MDIDAAAPPPPPPGAAAKGKALLSAGGRAAPWVEKYRPQSLADVAAHRDIVDTIDRLTNENRLPHLLLYGPPGTGKTSTILAVARKLYGSQYSNMILELNASDERGIDVVRQQIQDFAGARSLSFGARPSVKLVLLDEADAMTKDAQFALRRVIEKYTRSTRFALICNHVNKIIPALQSRCTRFRFAPLDGSHVRERLQHIIKSEGLSVDDGGLTALVRLSNGDMRKALNILQSTHMASQQITEEAVYLCTGNPMPKDIEQIAFWLLNEPFSTSFKYISDMKMRKGLALVDIIREVTMFVFKIQMPSDVRVKLINNLADIEYRLSFACNDKLQLGALISTFTDTRTAMVAAAS

SEQ ID NO: 3629 - protein, 259 aa, Zea mays subsp. mays
  peptide (1)..(259): Ceres Seq. ID no. 12469738
  misc_feature (1)..(105): Pfam Name: ATPase family associated with various cellular Pfam Description: ATPase family associated with various cellular
  misc_feature (1)..(258): Homolog of NCBI NO: 10798790 NR Description: replication factor C 36kDa subunit [Oryza sativa
  misc_feature (1)..(258): Homolog of NCBI NO: 15223967 NR Description: putative replication factor C; protein id: supported by cDNA: gi_17529331 [Arabidopsis thaliana]
  misc_feature (1)..(258): Homolog of NCBI NO: 20841441 NR Description: replication factor C (activator 1) 5 [Mus >gi|12847646|dbj|BAB27652.1| unnamed protein product [Mus
  misc_feature (1)..(258): Homolog of NCBI NO: 6677723 NR Description: replication factor C (activator 1) 5, 36.5kDa; factor C (activator 1) 5 (36.5kD) [Homo sapiens] Activator 1 36 kDa subunit (Replication factor C 36 kDa subunit)
  misc_feature (1)..(258): Homolog of NCBI NO: 27882432 NR Description: Similar to replication factor C (activator 1) 5
  misc_feature (1)..(258): Homolog of NCBI NO: 23271821 NR Description: Similar to replication factor C (activator 1) 5,
  misc_feature (1)..(237): Homolog of NCBI NO: 34872605 NR Description: similar to replication factor C 5 isoform 1; RFC, kD subunit; activator 1 36 kDa subunit; A1 36 kDa subunit [Rattus
  misc_feature (1)..(246): Homolog of NCBI NO: 13431787 NR Description: Activator 1 40 kDa subunit (Replication factor C kDa subunit) (Replication factor C3) >gi|11278371|pir||T43410
  misc_feature (1)..(247): Homolog of NCBI NO: 19921076 NR Description: CG5313-PA [Drosophila melanogaster] replication factor C subunit 3 [Drosophila melanogaster]
  misc_feature (1)..(244): Homolog of NCBI NO: 30913228 NR Description: Activator 1 subunit 3 (Replication factor C
MILELNASDERGIDVVRQQIQDFAGARSLSFGARPSVKLVLLDEADAMTKDAQFALRRVIEKYTRSTRFALICNHVNKIIPALQSRCTRFRFAPLDGSHVRERLQHIIKSEGLSVDDGGLTALVRLSNGDMRKALNILQSTHMASQQITEEAVYLCTGNPMPKDIEQIAFWLLNEPFSTSFKYISDMKMRKGLALVDIIREVTMFVFKIQMPSDVRVKLINNLADIEYRLSFACNDKLQLGALISTFTDTRTAMVAAAS

SEQ ID NO: 3630 - DNA, 1218 bp, Zea mays subsp. mays
  misc_feature (1)..(1218): Ceres Seq. ID no. 12387244
  misc_feature: MA Experiment ID: 108535 Result: Down-regulated in Transcription
  misc_feature: MA Experiment 108535 PARAMETER Experiment Name: Zm_Meristem_P Parameter: Age (day) Value: 8
  misc_feature: MA Experiment 108535 PARAMETER Experiment Name: Zm_Meristem_P Parameter: Organism Value: Zea mays
  misc_feature: MA Experiment 108535 PARAMETER Experiment Name: Zm_Meristem_P Parameter: Plant Line Value: 35A19
  misc_feature: MA Experiment 108535 PARAMETER Experiment Name: Zm_Meristem_P Parameter: Tissue Value: Root Meristem vs. Above Root Meristem
  misc_feature: MA Experiment ID: 108543 Result: Down-regulated in Transcription
  misc_feature: MA Experiment ID: 20000480 Result: Down-regulated in Transcription
  misc_feature: MA Experiment 20000480 PARAMETER Experiment Name: Zm_Drought_P Parameter: Age (day) Value: 11
  misc_feature: MA Experiment 20000480 PARAMETER Experiment Name: Zm_Drought_P Parameter: Organism Value: Zea mays
  misc_feature: MA Experiment 20000480 PARAMETER Experiment Name: Zm_Drought_P Parameter: Plant Line Value: 35A19
  misc_feature: MA Experiment 20000480 PARAMETER Experiment Name: Zm_Drought_P Parameter: Timepoint (hr) Value: 72
  misc_feature: MA Experiment 20000480 PARAMETER Experiment Name: Zm_Drought_P Parameter: Tissue Value: Aerial
  misc_feature: MA Experiment 20000480 PARAMETER Experiment Name: Zm_Drought_P Parameter: Treatment Value: Drought vs. No Drought
attccccaatctagggttgctgagctccccaccactgccggccatgcccgacgcggatgttgacaccgtgattcgcgaagccgccgcggccgcggccccagccggcgacgacgacagcgagggtgacaccgaggaggaggaggaggagggggacgaggtcgacgaggacgaggacgacgacgaggagttacccgccgaggcgccggcgccggacgaggagcaacctgctccagcgcccatctcgaccttgccggggaatccaaaccagctgacgctggtcttccagggcgaggtttacgttttcgaatccgtcacccccgagaaggttcaagctgtgctgctacttttaggacgtggtgaactaccacctggtttagctggcatggttttacccaatcaaaatgaaaacaagggctatgacgatatacttcagaggacagacattccagcaaaaagggttgcttcactaattaggttccgtgagaaaaggaaggaaagaaattttgataagaaaatacgttatgctgttcgcaaagaagtggcactcaggatgcagcgtcggaaggggcaatttgctggaagagccagtctggagggagaatctccagctcctggatgtgatcctggttctcagggctcaggcctagattttgcatctcgagaatcaatgtgccagaactgtggtactagtgaaaaaatgaccccagcaatgcgtcgtggtccagcgggtccaaggactttgtgcaatgcttgtggattgatgtgggcaaacaagggtaccctgagaagttgccccagggcaaaagttgaatctcctgcggttgcaactgagcagggaacaagtgacaacaaagccctggcaacactgaataataacaatgttgctgcaagcaatggcgaagccacaagtgcagcagagaaaggagtgccaaaggcgccgtgacagtatatagacattattgtcagagacaaagatttcggattctttgcctatagctagacaagacaccccgttagaaatatttggtaatgataatgattgtcatcaagtgtacattcattcttgcttgacagtgttagacgtgtaattaatataagctgtccgattgtgtaaacagtaaacccatatggcatctgttgtgttacaacttacactttctaactttcttcattctcataacatcatgatcaaagattcgatgctacccattgattgtc

SEQ ID NO: 3631 - protein, 313 aa, Zea mays subsp. mays
  peptide (1)..(313): Ceres Seq. ID no. 12387245
  misc_feature (157)..(196): Pfam Name: CCT motif Pfam Description: CCT motif
  misc_feature (184)..(284): Homolog of NCBI NO: 26451385 NR Description: unknown protein [Arabidopsis thaliana]
  misc_feature (38)..(226): Homolog of NCBI NO: 25405485 NR Description: hypothetical protein F19C24.17 [imported] -
  misc_feature (26)..(303): Homolog of NCBI NO: 15233844 NR Description: Zinc finger protein, Zim
  misc_feature (26)..(303): Homolog of NCBI NO: 11358938 NR Description: zinc-finger protein - Arabidopsis thaliana
  misc_feature (38)..(284): Homolog of NCBI NO: 15028099 NR Description: putative flowering protein CONSTANS [Arabidopsis
  misc_feature (38)..(284): Homolog of NCBI NO: 18403600 NR Description: flowering protein CONSTANS, putative
  misc_feature (38)..(284): Homolog of NCBI NO: 18402914 NR Description: GATA zinc finger protein
  misc_feature (38)..(304): Homolog of NCBI NO: 21537322 NR Description: flowering protein CONSTANS, putative [Arabidopsis
  misc_feature (38)..(284): Homolog of NCBI NO: 30686115 NR Description: GATA zinc finger protein [Arabidopsis thaliana]
  misc_feature (19)..(312): Homolog of NCBI NO: 13174240 NR Description: putative zinc finger protein [Oryza sativa]
FPNLGLLSSPPLPAMPDADVDTVIREAAAAAAPAGDDDSEGDTEEEEEEGDEVDEDEDDDEELPAEAPAPDEEQPAPAPISTLPGNPNQLTLVFQGEVYVFESVTPEKVQAVLLLLGRGELPPGLAGMVLPNQNENKGYDDILQRTDIPAKRVASLIRFREKRKERNFDKKIRYAVRKEVALRMQRRKGQFAGRASLEGESPAPGCDPGSQGSGLDFASRESMCQNCGTSEKMTPAMRRGPAGPRTLCNACGLMWANKGTLRSCPRAKVESPAVATEQGTSDNKALATLNNNNVAASNGEATSAAEKGVPKAP

SEQ ID NO: 3632 - protein, 299 aa, Zea mays subsp. mays
  peptide (1)..(299): Ceres Seq. ID no. 12387246
  misc_feature (143)..(182): Pfam Name: CCT motif Pfam Description: CCT motif
  misc_feature (170)..(270): Homolog of NCBI NO: 26451385 NR Description: unknown protein [Arabidopsis thaliana]
  misc_feature (24)..(212): Homolog of NCBI NO: 25405485 NR Description: hypothetical protein F19C24.17 [imported] -
  misc_feature (12)..(289): Homolog of NCBI NO: 15233844 NR Description: Zinc finger protein, Zim
  misc_feature (12)..(289): Homolog of NCBI NO: 11358938 NR Description: zinc-finger protein - Arabidopsis thaliana
  misc_feature (24)..(270): Homolog of NCBI NO: 15028099 NR Description: putative flowering protein CONSTANS [Arabidopsis
  misc_feature (24)..(270): Homolog of NCBI NO: 18403600 NR Description: flowering protein CONSTANS, putative
  misc_feature (24)..(270): Homolog of NCBI NO: 18402914 NR Description: GATA zinc finger protein
  misc_feature (24)..(290): Homolog of NCBI NO: 21537322 NR Description: flowering protein CONSTANS, putative [Arabidopsis
  misc_feature (24)..(270): Homolog of NCBI NO: 30686115 NR Description: GATA zinc finger protein [Arabidopsis thaliana]
  misc_feature (5)..(298): Homolog of NCBI NO: 13174240 NR Description: putative zinc finger protein [Oryza sativa]
MPDADVDTVIREAAAAAAPAGDDDSEGDTEEEEEEGDEVDEDEDDDEELPAEAPAPDEEQPAPAPISTLPGNPNQLTLVFQGEVYVFESVTPEKVQAVLLLLGRGELPPGLAGMVLPNQNENKGYDDILQRTDIPAKRVASLIRFREKRKERNFDKKIRYAVRKEVALRMQRRKGQFAGRASLEGESPAPGCDPGSQGSGLDFASRESMCQNCGTSEKMTPAMRRGPAGPRTLCNACGLMWANKGTLRSCPRAKVESPAVATEQGTSDNKALATLNNNNVAASNGEATSAAEKGVPKAP

SEQ ID NO: 3633 - protein, 186 aa, Zea mays subsp. mays
  peptide (1)..(186): Ceres Seq. ID no. 12387247
  misc_feature (30)..(69): Pfam Name: CCT motif Pfam Description: CCT motif
  misc_feature (57)..(157): Homolog of NCBI NO: 26451385 NR Description: unknown protein [Arabidopsis thaliana]
  misc_feature (1)..(99): Homolog of NCBI NO: 25405485 NR Description: hypothetical protein F19C24.17 [imported] -
  misc_feature (1)..(176): Homolog of NCBI NO: 15233844 NR Description: Zinc finger protein, Zim
  misc_feature (1)..(176): Homolog of NCBI NO: 11358938 NR Description: zinc-finger protein - Arabidopsis thaliana
  misc_feature (1)..(157): Homolog of NCBI NO: 15028099 NR Description: putative flowering protein CONSTANS [Arabidopsis
  misc_feature (1)..(157): Homolog of NCBI NO: 18403600 NR Description: flowering protein CONSTANS, putative
  misc_feature (1)..(157): Homolog of NCBI NO: 18402914 NR Description: GATA zinc finger protein
  misc_feature (1)..(177): Homolog of NCBI NO: 21537322 NR Description: flowering protein CONSTANS, putative [Arabidopsis
  misc_feature (1)..(157): Homolog of NCBI NO: 30686115 NR Description: GATA zinc finger protein [Arabidopsis thaliana]
  misc_feature (1)..(185): Homolog of NCBI NO: 13174240 NR Description: putative zinc finger protein [Oryza sativa]
MVLPNQNENKGYDDILQRTDIPAKRVASLIRFREKRKERNFDKKIRYAVRKEVALRMQRRKGQFAGRASLEGESPAPGCDPGSQGSGLDFASRESMCQNCGTSEKMTPAMRRGPAGPRTLCNACGLMWANKGTLRSCPRAKVESPAVATEQGTSDNKALATLNNNNVAASNGEATSAAEKGVPKAP

SEQ ID NO: 3634 - DNA, 1415 bp, Zea mays subsp. mays
  misc_feature (1)..(1415): Ceres Seq. ID no. 12352230
  misc_feature: MA Experiment ID: 108523 Result: Down-regulated in Transcription
  misc_feature: MA Experiment 108523 PARAMETER Experiment Name: Zm_42deg_Heat_P Parameter: Age (day) Value: 8
  misc_feature: MA Experiment 108523 PARAMETER Experiment Name: Zm_42deg_Heat_P Parameter: Organism Value: Zea mays
  misc_feature: MA Experiment 108523 PARAMETER Experiment Name: Zm_42deg_Heat_P Parameter: Plant Line Value: 35A19
  misc_feature: MA Experiment 108523 PARAMETER Experiment Name: Zm_42deg_Heat_P Parameter: Temperature (deg C) Value: 42 vs. 22
  misc_feature: MA Experiment 108523 PARAMETER Experiment Name: Zm_42deg_Heat_P Parameter: Timepoint (hr) Value: 6
  misc_feature: MA Experiment 108523 PARAMETER Experiment Name: Zm_42deg_Heat_P Parameter: Tissue Value: Aerial
  misc_feature: MA Experiment ID: 108527 Result: Down-regulated in Transcription
  misc_feature: MA Experiment 108527 PARAMETER Experiment Name: Zm_5mM_NO_P Parameter: Age (day) Value: 8
  misc_feature: MA Experiment 108527 PARAMETER Experiment Name: Zm_5mM_NO_P Parameter: Organism Value: Zea mays
  misc_feature: MA Experiment 108527 PARAMETER Experiment Name: Zm_5mM_NO_P Parameter: Plant Line Value: 35A19
  misc_feature: MA Experiment 108527 PARAMETER Experiment Name: Zm_5mM_NO_P Parameter: Timepoint (hr) Value: 6
  misc_feature: MA Experiment 108527 PARAMETER Experiment Name: Zm_5mM_NO_P Parameter: Tissue Value: Aerial
  misc_feature: MA Experiment 108527 PARAMETER Experiment Name: Zm_5mM_NO_P Parameter: Treatment Value: 5mM NO vs. No Treatment
  misc_feature: MA Experiment ID: 108529 Result: Up-regulated in Transcription
  misc_feature: MA Experiment 108529 PARAMETER Experiment Name: Zm_Imbibed_Seeds_P Parameter: Age (day) Value: 5 vs. 2
  misc_feature: MA Experiment 108529 PARAMETER Experiment Name: Zm_Imbibed_Seeds_P Parameter: Organism Value: Zea mays
  misc_feature: MA Experiment 108529 PARAMETER Experiment Name: Zm_Imbibed_Seeds_P Parameter: Plant Line Value: 35A19
  misc_feature: MA Experiment 108529 PARAMETER Experiment Name: Zm_Imbibed_Seeds_P Parameter: Tissue Value: Roots vs. Embryo
  misc_feature: MA Experiment ID: 108535 Result: Down-regulated in Transcription
  misc_feature: MA Experiment 108535 PARAMETER Experiment Name: Zm_Meristem_P Parameter: Age (day) Value: 8
  misc_feature: MA Experiment 108535 PARAMETER Experiment Name: Zm_Meristem_P Parameter: Organism Value: Zea mays
  misc_feature: MA Experiment 108535 PARAMETER Experiment Name: Zm_Meristem_P Parameter: Plant Line Value: 35A19
  misc_feature: MA Experiment 108535 PARAMETER Experiment Name: Zm_Meristem_P Parameter: Tissue Value: Root Meristem vs. Above Root Meristem
  misc_feature: MA Experiment ID: 108536 Result: Down-regulated in Transcription
  misc_feature: MA Experiment 108536 PARAMETER Experiment Name: Zm_Meristem_P Parameter: Age (day) Value: 8
  misc_feature: MA Experiment 108536 PARAMETER Experiment Name: Zm_Meristem_P Parameter: Organism Value: Zea mays
  misc_feature: MA Experiment 108536 PARAMETER Experiment Name: Zm_Meristem_P Parameter: Plant Line Value: 35A19
  misc_feature: MA Experiment 108536 PARAMETER Experiment Name: Zm_Meristem_P Parameter: Tissue Value: Shoot Meristem vs. Above Shoot Meristem
  misc_feature: MA Experiment ID: 108543 Result: Up-regulated in Transcription
  misc_feature: MA Experiment ID: 108556 Result: Down-regulated in Transcription
  misc_feature: MA Experiment 108556 PARAMETER Experiment Name: Zm_Drought_P Parameter: Age (day) Value: 9
  misc_feature: MA Experiment 108556 PARAMETER Experiment Name: Zm_Drought_P Parameter: Organism Value: Zea mays
  misc_feature: MA Experiment 108556 PARAMETER Experiment Name: Zm_Drought_P Parameter: Plant Line Value: 35A19
  misc_feature: MA Experiment 108556 PARAMETER Experiment Name: Zm_Drought_P Parameter: Timepoint (hr) Value: 24
  misc_feature: MA Experiment 108556 PARAMETER Experiment Name: Zm_Drought_P Parameter: Tissue Value: Aerial
  misc_feature: MA Experiment 108556 PARAMETER Experiment Name: Zm_Drought_P Parameter: Treatment Value: Drought vs. No Drought
  misc_feature: MA Experiment ID: 108559 Result: Down-regulated in Transcription
  misc_feature: MA Experiment 108559 PARAMETER Experiment Name: Zm_5mM_NO_P Parameter: Age (day) Value: 8
  misc_feature: MA Experiment 108559 PARAMETER Experiment Name: Zm_5mM_NO_P Parameter: Organism Value: Zea mays
  misc_feature: MA Experiment 108559 PARAMETER Experiment Name: Zm_5mM_NO_P Parameter: Plant Line Value: 35A19
  misc_feature: MA Experiment 108559 PARAMETER Experiment Name: Zm_5mM_NO_P Parameter: Timepoint (hr) Value: 12
  misc_feature: MA Experiment 108559 PARAMETER Experiment Name: Zm_5mM_NO_P Parameter: Tissue Value: Aerial
  misc_feature: MA Experiment 108559 PARAMETER Experiment Name: Zm_5mM_NO_P Parameter: Treatment Value: 5mM NO vs. No Treatment
  misc_feature: MA Experiment ID: 20000108 Result: Down-regulated in Transcription
  misc_feature: MA Experiment 20000108 PARAMETER Experiment Name: Zm_Root-Tips_P Parameter: Age (day) Value: 12
  misc_feature: MA Experiment 20000108 PARAMETER Experiment Name: Zm_Root-Tips_P Parameter: Organism Value: Zea mays
  misc_feature: MA Experiment 20000108 PARAMETER Experiment Name: Zm_Root-Tips_P Parameter: Tissue Value: Root tips vs. Root mid region    35
  misc_feature: MA Experiment 20000108 PARAMETER Experiment Name: Zm_Root-Tips_P Parameter: Tissue Value: Root tips vs. Root mid region   Sequence Listing-Misc Features (4)
  misc_feature: MA Experiment ID: 20000480 Result: Down-regulated in Transcription
  misc_feature: MA Experiment 20000480 PARAMETER Experiment Name: Zm_Drought_P Parameter: Age (day) Value: 11
  misc_feature: MA Experiment 20000480 PARAMETER Experiment Name: Zm_Drought_P Parameter: Organism Value: Zea mays
  misc_feature: MA Experiment 20000480 PARAMETER Experiment Name: Zm_Drought_P Parameter: Plant Line Value: 35A19
  misc_feature: MA Experiment 20000480 PARAMETER Experiment Name: Zm_Drought_P Parameter: Timepoint (hr) Value: 72
  misc_feature: MA Experiment 20000480 PARAMETER Experiment Name: Zm_Drought_P Parameter: Tissue Value: Aerial
  misc_feature: MA Experiment 20000480 PARAMETER Experiment Name: Zm_Drought_P Parameter: Treatment Value: Drought vs. No Drought
  misc_feature: MA Experiment ID: 20000534 Result: Down-regulated in Transcription
  misc_feature: MA Experiment 20000534 PARAMETER Experiment Name: Zm_Hybrid_Pollen_P Parameter: Age (day) Value: 8
  misc_feature: MA Experiment 20000534 PARAMETER Experiment Name: Zm_Hybrid_Pollen_P Parameter: Organism Value: Zea mays
  misc_feature: MA Experiment 20000534 PARAMETER Experiment Name: Zm_Hybrid_Pollen_P Parameter: Plant Line Value: 35A19
  misc_feature: MA Experiment 20000534 PARAMETER Experiment Name: Zm_Hybrid_Pollen_P Parameter: Tissue Value: Pollen vs. Aerial
  misc_feature: MA Experiment ID: 20000535 Result: Up-regulated in Transcription
  misc_feature: MA Experiment 20000535 PARAMETER Experiment Name: Zm_Hybrid_Seed_Dev_P Parameter: DAP Value: 30 vs. 12
  misc_feature: MA Experiment 20000535 PARAMETER Experiment Name: Zm_Hybrid_Seed_Dev_P Parameter: Organism Value: Zea mays
  misc_feature: MA Experiment 20000535 PARAMETER Experiment Name: Zm_Hybrid_Seed_Dev_P Parameter: Plant Line Value: 35A19
  misc_feature: MA Experiment 20000535 PARAMETER Experiment Name: Zm_Hybrid_Seed_Dev_P Parameter: Tissue Value: Embryo vs. Unfert Floret
atcgaatcggatcggaggggaagcaggagcccgcagggggcggctagcgctggtgcgtgcttcctccattatattatcattgcgcctcgtcctccccaatcctcattgcccatcacattccatcgaccagtctcaattcaaggagctgaggacgacctgtccgtccggagctgatcgagaaacggaggggcggttccagtttcagtccagctagctagctagctagaagatcccattcgctgacagatgggttcctacatccaaggagatgatgaggtccctgtgtacgagtcgggcgccgaggtgcttgcgaaggtgcaagagaaatgggcggcggcggcggcatcgcggcctcctccctacccggccatgtactcgagcgtgttcggcggcatcatcctggacccggccatgatggttctccccatcgacgaccacatggtccaccggggccacggcgtgttcgacacggccatgatcctggacggcgccctgtacgagctggacgcgcacctggaccgcttcctccggtcggccgcggcggcgcgcgtggacacggccccgttcccgcgcgaggcgctgcggcgcatcctgatccagatgaccgccgcctcgggctgccgcatgggctccatccgctactggctcagctccgggcccggcgacttcctgctgtcatccaggggctgcccgtcgccggcgttctacggcgtggtgatcgcgtcggagtacgagcagtgcggggtggacggcaccggggtgcgcgcggtcacggccacggtgcccatgaagccgccgcagttcgcgaccgtgaagaacgtgaactacctgcccaacgtgctgtccatcatggacgccgaggaccgcggcgccttcgcgtccgtgtgggtggacgaccaagggtacgtggccgagggccccatggtgaacgtggcgttcgtgacgcccgagcgggagctcgtgctcccggccttcgacaagatcctcagcgggtgcacggccaagaggatgctcgcgctggcgcctcgcctcgtggacgccggcctgctcgcgggcgtcagcaccagggacatcacggccgaggacgccaagcgcagcgccgagatggcgttcgtcggcagcggcctccccgtgctgcccgtcgtcgagtgggacggcaaacccatcggagacgggaaggttgggaagctgatgccggcgctgtctgatctgctgtgggaggacatgaagtccggtcccgacaggatccccgttccatacaagcagtagcctgaagcgaaggcgaagccatgacatctctctctctgtgtgtgtgtgtgtttgcagtcgaatggtgattgccttgcctgaataaaaataaacctctctctgtatatctgagcgaatcgttttggaaatacgagcagattccattc

SEQ ID NO: 3635 - protein, 340 aa, Zea mays subsp. mays
  peptide (1)..(340): Ceres Seq. ID no. 12352231
  misc_feature (48)..(324): Pfam Name: Aminotransferase class IV Pfam Description: Aminotransferase class IV
  misc_feature (61)..(338): Homolog of NCBI NO: 20804076 NR Description: PUTATIVE BRANCHED-CHAIN AMINO ACID
  misc_feature (49)..(329): Homolog of NCBI NO: 15669197 NR Description: branched-chain amino acid aminotransferase (ilvE)
  misc_feature (44)..(322): Homolog of NCBI NO: 33595042 NR Description: probable aminotransferase [Bordetella
  misc_feature (44)..(322): Homolog of NCBI NO: 33591942 NR Description: probable aminotransferase [Bordetella pertussis]
  misc_feature (44)..(322): Homolog of NCBI NO: 33599322 NR Description: probable aminotransferase [Bordetella
  misc_feature (59)..(322): Homolog of NCBI NO: 20095063 NR Description: Branched-chain amino acid aminotransferase
  misc_feature (26)..(327): Homolog of NCBI NO: 23474241 NR Description: hypothetical protein [Desulfovibrio desulfuricans
  misc_feature (42)..(338): Homolog of NCBI NO: 9758354 NR Description: branched-chain amino acid aminotransferase-like
  misc_feature (41)..(338): Homolog of NCBI NO: 22327924 NR Description: branched-chain amino acid aminotransferase-like
  misc_feature (42)..(339): Homolog of NCBI NO: 34904468 NR Description: putative branched-chain amino acid
MGSYIQGDDEVPVYESGAEVLAKVQEKWAAAAASRPPPYPAMYSSVFGGIILDPAMMVLPIDDHMVHRGHGVFDTAMILDGALYELDAHLDRFLRSAAAARVDTAPFPREALRRILIQMTAASGCRMGSIRYWLSSGPGDFLLSSRGCPSPAFYGVVIASEYEQCGVDGTGVRAVTATVPMKPPQFATVKNVNYLPNVLSIMDAEDRGAFASVWVDDQGYVAEGPMVNVAFVTPERELVLPAFDKILSGCTAKRMLALAPRLVDAGLLAGVSTRDITAEDAKRSAEMAFVGSGLPVLPVVEWDGKPIGDGKVGKLMPALSDLLWEDMKSGPDRIPVPYKQ

SEQ ID NO: 3636 - protein, 299 aa, Zea mays subsp. mays
  peptide (1)..(299): Ceres Seq. ID no. 12352232
  misc_feature (7)..(283): Pfam Name: Aminotransferase class IV Pfam Description: Aminotransferase class IV
  misc_feature (20)..(297): Homolog of NCBI NO: 20804076 NR Description: PUTATIVE BRANCHED-CHAIN AMINO ACID
  misc_feature (8)..(288): Homolog of NCBI NO: 15669197 NR Description: branched-chain amino acid aminotransferase (ilvE)
  misc_feature (3)..(281): Homolog of NCBI NO: 33595042 NR Description: probable aminotransferase [Bordetella
  misc_feature (3)..(281): Homolog of NCBI NO: 33591942 NR Description: probable aminotransferase [Bordetella pertussis]
  misc_feature (3)..(281): Homolog of NCBI NO: 33599322 NR Description: probable aminotransferase [Bordetella
  misc_feature (18)..(281): Homolog of NCBI NO: 20095063 NR Description: Branched-chain amino acid aminotransferase
  misc_feature (1)..(286): Homolog of NCBI NO: 23474241 NR Description: hypothetical protein [Desulfovibrio desulfuricans
  misc_feature (1)..(297): Homolog of NCBI NO: 9758354 NR Description: branched-chain amino acid aminotransferase-like
  misc_feature (1)..(297): Homolog of NCBI NO: 22327924 NR Description: branched-chain amino acid aminotransferase-like
  misc_feature (1)..(298): Homolog of NCBI NO: 34904468 NR Description: putative branched-chain amino acid
MYSSVFGGIILDPAMMVLPIDDHMVHRGHGVFDTAMILDGALYELDAHLDRFLRSAAAARVDTAPFPREALRRILIQMTAASGCRMGSIRYWLSSGPGDFLLSSRGCPSPAFYGVVIASEYEQCGVDGTGVRAVTATVPMKPPQFATVKNVNYLPNVLSIMDAEDRGAFASVWVDDQGYVAEGPMVNVAFVTPERELVLPAFDKILSGCTAKRMLALAPRLVDAGLLAGVSTRDITAEDAKRSAEMAFVGSGLPVLPVVEWDGKPIGDGKVGKLMPALSDLLWEDMKSGPDRIPVPYKQ

SEQ ID NO: 3637 - protein, 293 aa, Zea mays subsp. mays
  peptide (1)..(293): Ceres Seq. ID no. 12352233
  misc_feature (12)..(275): Homolog of NCBI NO: 23102225 NR Description: hypothetical protein [Azotobacter vinelandii]
MGGGGGIAASSLPGHVLERVRRHHPGPGHDGSPHRRPHGPPGPRRVRHGHDPGRRPVRAGRAPGPLPPVGRGGARGHGPVPARGAAAHPDPDDRRLGLPHGLHPLLAQLRARRLPAVIQGLPVAGVLRRGDRVGVRAVRGGRHRGARGHGHGAHEAAAVRDREERELPAQRAVHHGRRGPRRLRVRVGGRPRVRGRGPHGERGVRDARAGARAPGLRQDPQRVHGQEDARAGASPRGRRPARGRQHQGHHGRGRQAQRRDGVRRQRPPRAARRRVGRQTHRRREGWEADAGAV

SEQ ID NO: 3638 - DNA, 1838 bp, Zea mays subsp. mays
  misc_feature (1)..(1838): Ceres Seq. ID no. 12405709
  misc_feature: MA Experiment ID: 108534 Result: Up-regulated in Transcription
  misc_feature: MA Experiment 108534 PARAMETER Experiment Name: Zm_4deg_Cold_P Parameter: Age (hr) Value: 8
  misc_feature: MA Experiment 108534 PARAMETER Experiment Name: Zm_4deg_Cold_P Parameter: Organism Value: Zea mays
  misc_feature: MA Experiment 108534 PARAMETER Experiment Name: Zm_4deg_Cold_P Parameter: Plant Line Value: 35A19
  misc_feature: MA Experiment 108534 PARAMETER Experiment Name: Zm_4deg_Cold_P Parameter: Temperature (deg C) Value: 4 vs. 22
  misc_feature: MA Experiment 108534 PARAMETER Experiment Name: Zm_4deg_Cold_P Parameter: Timepoint (hr) Value: 6
  misc_feature: MA Experiment 108534 PARAMETER Experiment Name: Zm_4deg_Cold_P Parameter: Tissue Value: Aerial
  misc_feature: MA Experiment ID: 108535 Result: Down-regulated in Transcription
  misc_feature: MA Experiment 108535 PARAMETER Experiment Name: Zm_Meristem_P Parameter: Age (day) Value: 8
  misc_feature: MA Experiment 108535 PARAMETER Experiment Name: Zm_Meristem_P Parameter: Organism Value: Zea mays
  misc_feature: MA Experiment 108535 PARAMETER Experiment Name: Zm_Meristem_P Parameter: Plant Line Value: 35A19
  misc_feature: MA Experiment 108535 PARAMETER Experiment Name: Zm_Meristem_P Parameter: Tissue Value: Root Meristem vs. Above Root Meristem
  misc_feature: MA Experiment ID: 108543 Result: Up-regulated in Transcription
  misc_feature: MA Experiment ID: 108546 Result: Up-regulated in Transcription
  misc_feature: MA Experiment 108546 PARAMETER Experiment Name: Zm_Imbibed_Seeds_P Parameter: Age (day) Value: 3 vs. 2
  misc_feature: MA Experiment 108546 PARAMETER Experiment Name: Zm_Imbibed_Seeds_P Parameter: Organism Value: Zea mays
  misc_feature: MA Experiment 108546 PARAMETER Experiment Name: Zm_Imbibed_Seeds_P Parameter: Plant Line Value: 35A19
  misc_feature: MA Experiment 108546 PARAMETER Experiment Name: Zm_Imbibed_Seeds_P Parameter: Tissue Value: Roots vs. Embryo
  misc_feature: MA Experiment ID: 20000477 Result: Down-regulated in Transcription
  misc_feature: MA Experiment 20000477 PARAMETER Experiment Name: Zm_5mM_SA_P Parameter: Age (day) Value: 10
  misc_feature: MA Experiment 20000477 PARAMETER Experiment Name: Zm_5mM_SA_P Parameter: Organism Value: Zea mays
  misc_feature: MA Experiment 20000477 PARAMETER Experiment Name: Zm_5mM_SA_P Parameter: Plant Line Value: 35A19
  misc_feature: MA Experiment 20000477 PARAMETER Experiment Name: Zm_5mM_SA_P Parameter: Timepoint (hr) Value: 48
  misc_feature: MA Experiment 20000477 PARAMETER Experiment Name: Zm_5mM_SA_P Parameter: Tissue Value: Aerial
  misc_feature: MA Experiment 20000477 PARAMETER Experiment Name: Zm_5mM_SA_P Parameter: Treatment Value: 5mM SA vs. No Treatment
  misc_feature: MA Experiment ID: 20000535 Result: Down-regulated in Transcription
  misc_feature: MA Experiment 20000535 PARAMETER Experiment Name: Zm_Hybrid_Seed_Dev_P Parameter: DAP Value: 30 vs. 12
  misc_feature: MA Experiment 20000535 PARAMETER Experiment Name: Zm_Hybrid_Seed_Dev_P Parameter: Organism Value: Zea mays
  misc_feature: MA Experiment 20000535 PARAMETER Experiment Name: Zm_Hybrid_Seed_Dev_P Parameter: Plant Line Value: 35A19
  misc_feature: MA Experiment 20000535 PARAMETER Experiment Name: Zm_Hybrid_Seed_Dev_P Parameter: Tissue Value: Embryo vs. Unfert Floret
  misc_feature: MA Experiment ID: 20001608 Result: Down-regulated in Transcription
  misc_feature: MA Experiment 20001608 PARAMETER Experiment Name: Zm_50ppm_KNO3_L-to-H_P Parameter: Age (day) Value: 21
  misc_feature: MA Experiment 20001608 PARAMETER Experiment Name: Zm_50ppm_KNO3_L-to-H_P Parameter: Organism Value: Zea mays
  misc_feature: MA Experiment 20001608 PARAMETER Experiment Name: Zm_50ppm_KNO3_L-to-H_P Parameter: Plant Line Value: 35A19
  misc_feature: MA Experiment 20001608 PARAMETER Experiment Name: Zm_50ppm_KNO3_L-to-H_P Parameter: Timepoint (hr) Value: 48
  misc_feature: MA Experiment 20001608 PARAMETER Experiment Name: Zm_50ppm_KNO3_L-to-H_P Parameter: Tissue Value: Shoots
  misc_feature: MA Experiment 20001608 PARAMETER Experiment Name: Zm_50ppm_KNO3_L-to-H_P Parameter: Treatment Value: 50ppm KNO3 vs. 50ppm KCl
gctgttcccctccctcctttttttcgtcgtctcgcacgctctctttctctctctctctctctcttgcccatccccccacctcggctgggctcagctcagctcctaaaccggcacctacctctctgcctgctgccccggcccctgatcctgatttccccaatcgagagtccgagacccgagaggaggcacaggcacctgcgctagctgcagctgcaaatcgtcttccccagatccggcgccgcctagttcgctcctgctcgcgacagcgcccagagccgtccgcgtgcgcccgcagagatcgtttcggggacagccgagcagagcagagctgactctgccgcttgttgcccgttcttggctgctgttgctggcgagagcgcgcaggaggagcggttgatttttgattctctctgtccctccctcccttgcttcgcttcgctcgcgcggggtgcgtgcacgtaccatgagaagatgatgcgcgccaggcccaaaggtacattcgccgacgcgatgagggagagctcccctcctcctcctccccctccccctccggctccggcttcggcagcggtgaaagaggacgagtgggaggtgcggcccggcgggatgctggtgcagaagcggagccccgacgccgacgcccccgccggggcgcccgtccctaccatccgcgtcaaggtcaagttcaacggcgtgtaccacgagatctacatcaactcccaggcctccttcggtgagctgaagaagatgctgtcggcgcggaccgggctgcaccccgaggaccagaagctggtgtacaaggacaaggagcgggactccaaggcgttcctggacatggccggcgtcaaggaccgctccaagttggtgctgctcgaggaccccgccgcgcaggccaagcgcctcctcgagcagcgccgcaccgacaaggcggagcgcgccgccaagtccatctctcgcatcggcctcgacgtcgacaagctcgccaccaaggtgtcggcgctggaggccatcgtcagcaagggcggcaaggtggtggacgctgacgtggtcgccctcaccgaggcgctcatgaacgagctggtcaagctggactccatcgccgccgacggcgaagtcaaggtgcagcgacgaatgcaggagaagcgggtgcagaagtacgtggagacgctggacgctatccgcgccaagaacgcggcggcgcccaaggccaaggccaaggccaacgacgacatgaatgggcacgccaaggcccgcgcgccgcaactcccgccgcgcccgccgcccgtgtcgcagaggcggaacttccagcagccctccccggcgccagcgccgcccacgcagggctgggagtcgttcgacctgctgtcgtcggtgccgtccacgtcctcggccaccgtgaccaccaccatggcggccgcgaccaccaccacctcgccggccggcgtctccccgatcccgcggttcgactgggagctcttctgaagccctccctcctcgcggcgcgtcggcgtgccggttggtcgatcagacggtacctacctcccttgtccatggatcttccctgctctcatcagtagtgccattgtttcttctgtggattctttccatttcttttcgcctcattctctcttcttttcttccatttcctttcgaatttgtatatctactatatgtctacaaaaagaacagagagaccgacgcggtgcggtgagtgtgttcactgggtcaaaagtccgtcagttgacaactcctcctcgtgaggatccatccatgcatgttgttgttcagtcacagcaaataagtggtggtcttattatgatggcgatgaagaagtttcc

SEQ ID NO: 3639 - protein, 336 aa, Zea mays subsp. mays
  peptide (1)..(336): Ceres Seq. ID no. 12405710
  misc_feature (64)..(137): Pfam Name: Ubiquitin family Pfam Description: Ubiquitin family
  misc_feature (99)..(240): Homolog of NCBI NO: 10334497 NR Description: hypothetical protein [Cicer arietinum]
  misc_feature (36)..(306): Homolog of NCBI NO: 10176928 NR Description: contains similarity to unknown
  misc_feature (36)..(336): Homolog of NCBI NO: 30697627 NR Description: BAG domain containing protein [Arabidopsis
  misc_feature (36)..(336): Homolog of NCBI NO: 21553443 NR Description: unknown [Arabidopsis thaliana]
  misc_feature (36)..(306): Homolog of NCBI NO: 30697630 NR Description: BAG domain containing protein [Arabidopsis
  misc_feature (27)..(336): Homolog of NCBI NO: 15240726 NR Description: putative protein
  misc_feature (27)..(336): Homolog of NCBI NO: 21537107 NR Description: unknown [Arabidopsis thaliana]
  misc_feature (40)..(336): Homolog of NCBI NO: 15242267 NR Description: putative protein; protein id: At5g52060.1
  misc_feature (20)..(336): Homolog of NCBI NO: 34898024 NR Description: ESTs AU082174(S13676),AU032395(R3986) correspond a region of the predicted gene.~Similar to Arabidopsis thaliana
  misc_feature (1)..(336): Homolog of NCBI NO: 25553557 NR Description: OSJNBa0038F22.4 [Oryza sativa (japonica
MMRARPKGTFADAMRESSPPPPPPPPPAPASAAVKEDEWEVRPGGMLVQKRSPDADAPAGAPVPTIRVKVKFNGVYHEIYINSQASFGELKKMLSARTGLHPEDQKLVYKDKERDSKAFLDMAGVKDRSKLVLLEDPAAQAKRLLEQRRTDKAERAAKSISRIGLDVDKLATKVSALEAIVSKGGKVVDADVVALTEALMNELVKLDSIAADGEVKVQRRMQEKRVQKYVETLDAIRAKNAAAPKAKAKANDDMNGHAKARAPQLPPRPPPVSQRRNFQQPSPAPAPPTQGWESFDLLSSVPSTSSATVTTTMAAATTTTSPAGVSPIPRFDWELF

SEQ ID NO: 3640 - protein, 335 aa, Zea mays subsp. mays
  peptide (1)..(335): Ceres Seq. ID no. 12405711
  misc_feature (63)..(136): Pfam Name: Ubiquitin family Pfam Description: Ubiquitin family
  misc_feature (19)..(335): Homolog of NCBI NO: 34898024 NR Description: ESTs AU082174(S13676),AU032395(R3986) correspond a region of the predicted gene.~Similar to Arabidopsis thaliana
  misc_feature (98)..(239): Homolog of NCBI NO: 10334497 NR Description: hypothetical protein [Cicer arietinum]
  misc_feature (35)..(335): Homolog of NCBI NO: 30697627 NR Description: BAG domain containing protein [Arabidopsis
  misc_feature (35)..(305): Homolog of NCBI NO: 30697630 NR Description: BAG domain containing protein [Arabidopsis
  misc_feature (26)..(335): Homolog of NCBI NO: 21537107 NR Description: unknown [Arabidopsis thaliana]
  misc_feature (39)..(335): Homolog of NCBI NO: 15242267 NR Description: putative protein; protein id: At5g52060.1
  misc_feature (26)..(335): Homolog of NCBI NO: 15240726 NR Description: putative protein
  misc_feature (35)..(335): Homolog of NCBI NO: 21553443 NR Description: unknown [Arabidopsis thaliana]
  misc_feature (35)..(305): Homolog of NCBI NO: 10176928 NR Description: contains similarity to unknown
  misc_feature (1)..(335): Homolog of NCBI NO: 25553557 NR Description: OSJNBa0038F22.4 [Oryza sativa (japonica
MRARPKGTFADAMRESSPPPPPPPPPAPASAAVKEDEWEVRPGGMLVQKRSPDADAPAGAPVPTIRVKVKFNGVYHEIYINSQASFGELKKMLSARTGLHPEDQKLVYKDKERDSKAFLDMAGVKDRSKLVLLEDPAAQAKRLLEQRRTDKAERAAKSISRIGLDVDKLATKVSALEAIVSKGGKVVDADVVALTEALMNELVKLDSIAADGEVKVQRRMQEKRVQKYVETLDAIRAKNAAAPKAKAKANDDMNGHAKARAPQLPPRPPPVSQRRNFQQPSPAPAPPTQGWESFDLLSSVPSTSSATVTTTMAAATTTTSPAGVSPIPRFDWELF

SEQ ID NO: 3641 - protein, 323 aa, Zea mays subsp. mays
  peptide (1)..(323): Ceres Seq. ID no. 12405712
  misc_feature (51)..(124): Pfam Name: Ubiquitin family Pfam Description: Ubiquitin family
  misc_feature (86)..(227): Homolog of NCBI NO: 10334497 NR Description: hypothetical protein [Cicer arietinum]
  misc_feature (23)..(293): Homolog of NCBI NO: 10176928 NR Description: contains similarity to unknown
  misc_feature (23)..(323): Homolog of NCBI NO: 30697627 NR Description: BAG domain containing protein [Arabidopsis
  misc_feature (23)..(323): Homolog of NCBI NO: 21553443 NR Description: unknown [Arabidopsis thaliana]
  misc_feature (23)..(293): Homolog of NCBI NO: 30697630 NR Description: BAG domain containing protein [Arabidopsis
  misc_feature (14)..(323): Homolog of NCBI NO: 15240726 NR Description: putative protein
  misc_feature (14)..(323): Homolog of NCBI NO: 21537107 NR Description: unknown [Arabidopsis thaliana]
  misc_feature (27)..(323): Homolog of NCBI NO: 15242267 NR Description: putative protein; protein id: At5g52060.1
  misc_feature (7)..(323): Homolog of NCBI NO: 34898024 NR Description: ESTs AU082174(S13676),AU032395(R3986) correspond a region of the predicted gene.~Similar to Arabidopsis thaliana
  misc_feature (1)..(323): Homolog of NCBI NO: 25553557 NR Description: OSJNBa0038F22.4 [Oryza sativa (japonica
MRESSPPPPPPPPPAPASAAVKEDEWEVRPGGMLVQKRSPDADAPAGAPVPTIRVKVKFNGVYHEIYINSQASFGELKKMLSARTGLHPEDQKLVYKDKERDSKAFLDMAGVKDRSKLVLLEDPAAQAKRLLEQRRTDKAERAAKSISRIGLDVDKLATKVSALEAIVSKGGKVVDADVVALTEALMNELVKLDSIAADGEVKVQRRMQEKRVQKYVETLDAIRAKNAAAPKAKAKANDDMNGHAKARAPQLPPRPPPVSQRRNFQQPSPAPAPPTQGWESFDLLSSVPSTSSATVTTTMAAATTTTSPAGVSPIPRFDWELF

SEQ ID NO: 3642 - DNA, 1124 bp, Zea mays subsp. mays
  misc_feature (1)..(1124): Ceres Seq. ID no. 12352234
  misc_feature: MA Experiment ID: 108522 Result: Up-regulated in Transcription
  misc_feature: MA Experiment 108522 PARAMETER Experiment Name: Zm_42deg_Heat_P Parameter: Age (day) Value: 8
  misc_feature: MA Experiment 108522 PARAMETER Experiment Name: Zm_42deg_Heat_P Parameter: Organism Value: Zea mays
  misc_feature: MA Experiment 108522 PARAMETER Experiment Name: Zm_42deg_Heat_P Parameter: Plant Line Value: 35A19
  misc_feature: MA Experiment 108522 PARAMETER Experiment Name: Zm_42deg_Heat_P Parameter: Temperature (deg C) Value: 42 vs. 22
  misc_feature: MA Experiment 108522 PARAMETER Experiment Name: Zm_42deg_Heat_P Parameter: Timepoint (hr) Value: 1
  misc_feature: MA Experiment 108522 PARAMETER Experiment Name: Zm_42deg_Heat_P Parameter: Tissue Value: Aerial
  misc_feature: MA Experiment ID: 108523 Result: Up-regulated in Transcription
  misc_feature: MA Experiment 108523 PARAMETER Experiment Name: Zm_42deg_Heat_P Parameter: Age (day) Value: 8
  misc_feature: MA Experiment 108523 PARAMETER Experiment Name: Zm_42deg_Heat_P Parameter: Organism Value: Zea mays
  misc_feature: MA Experiment 108523 PARAMETER Experiment Name: Zm_42deg_Heat_P Parameter: Plant Line Value: 35A19
  misc_feature: MA Experiment 108523 PARAMETER Experiment Name: Zm_42deg_Heat_P Parameter: Temperature (deg C) Value: 42 vs. 22
  misc_feature: MA Experiment 108523 PARAMETER Experiment Name: Zm_42deg_Heat_P Parameter: Timepoint (hr) Value: 6
  misc_feature: MA Experiment 108523 PARAMETER Experiment Name: Zm_42deg_Heat_P Parameter: Tissue Value: Aerial
aatgccggcactgccggtcccaccgccggcgccaccgctcccgcggcggtatcctcgactcccagaaccgtcctgctctttgtgctctcgaaagcgccggatctaaccttcaccacctccggggcctcctccgccaccgccgcctgccaggcggcctccactcctttggctgctacgcctcgccacaggcatcctcgatggtcgccaaccttgtggagggcgtgtcgtaccccttcttctactcgctcgccgacatgggtaccctccccgaccaccccacaagaacatcgctcgcctcctcaaggccaagcgcttccgcaagcccgatatctccgagaccatccaggagctgctcggcggcgaggtggggagggggcaaccatccggtgggttggtggtggacgtgggtgccaatgttggcatggcatcattcgtggccggctggccgccgtgacggagtttcgggtgctggcattcgagcccgtgttcgagaatctgcagcggagatgcgacggggtgtacctcaaccgggtgcaggaccgcattgtggtgtatcacgctgcgtcgctgcagcttctgatcgagttgggactattacgatgcacaaggtgattggtcgactggacaacagtgctatatctgcagatggtacaaagttagcattcaagtctaatgcagaaattgctgttgaagtttccacaattcctttggatgaagttgttccagatactgagagagttcttatgatctaagttgatgttcaaggctgggaataccacgtactgggaggtgcatcaaatttgctttcaaggattaaaggtgaagctccctatccctaccttatatatgaagaagatgaacacctactgcaggctggcaacagcagtgcacaggacataaggacatttctcactagtgttggttataaccactgtaaaaggcatggaaatggtgctcactgtaaaaggaatagacaaatttgtttctgattgatgctcttatgctcctaagctaggtttgtatatgaactctgaagaatcagctgagttctggcagttttgcccctttgttacttagcaatgccagatgtttatacatgtcatgtgcccaatagttgtattgct

SEQ ID NO: 3643 - protein, 249 aa, Zea mays subsp. mays
  peptide (1)..(249): Ceres Seq. ID no. 12352235
  misc_feature (49)..(92): Homolog of NCBI NO: 18401209 NR Description: expressed protein
  misc_feature (189)..(249): Homolog of NCBI NO: 18401209 NR Description: expressed protein
  misc_feature (49)..(92): Homolog of NCBI NO: 21593723 NR Description: unknown [Arabidopsis thaliana]
  misc_feature (189)..(249): Homolog of NCBI NO: 21593723 NR Description: unknown [Arabidopsis thaliana]
  misc_feature (46)..(92): Homolog of NCBI NO: 34896590 NR Description: hypothetical protein [Oryza sativa]
  misc_feature (189)..(249): Homolog of NCBI NO: 34896590 NR Description: hypothetical protein [Oryza sativa]
CRHCRSHRRRHRSRGGILDSQNRPALCALESAGSNLHHLRGLLRHRRLPGGLHSFGCYASPQASSMVANLVEGVSYPFFYSLADMGTLPDHPTRTSLASSRPSASASPISPRPSRSCSAARWGGGNHPVGWWWTWVPMLAWHHSWPAGRRDGVSGAGIRARVRESAAEMRRGVPQPGAGPHCGVSRCVAAASDRVGTITMHKVIGRLDNSAISADGTKLAFKSNAEIAVEVSTIPLDEVVPDTERVLMI

SEQ ID NO: 3644 - protein, 203 aa, Zea mays subsp. mays
  peptide (1)..(203): Ceres Seq. ID no. 12352236
  misc_feature (149)..(189): Homolog of NCBI NO: 18401209 NR Description: expressed protein
  misc_feature (149)..(189): Homolog of NCBI NO: 21593723 NR Description: unknown [Arabidopsis thaliana]
  misc_feature (149)..(189): Homolog of NCBI NO: 34896590 NR Description: hypothetical protein [Oryza sativa]
NAGTAGPTAGATAPAAVSSTPRTVLLFVLSKAPDLTFTTSGASSATAACQAASTPLAATPRHRHPRWSPTLWRACRTPSSTRSPTWVPSPTTPQEHRSPPQGQALPQARYLRDHPGAARRRGGEGATIRWVGGGRGCQCWHGIIRGRLAAVTEFRVLAFEPVFENLQRRCDGVYLNRVQDRIVVYHAASLQLLIELGLLRCTR

SEQ ID NO: 3645 - protein, 184 aa, Zea mays subsp. mays
  peptide (1)..(184): Ceres Seq. ID no. 12352237
  misc_feature (1)..(27): Homolog of NCBI NO: 18401209 NR Description: expressed protein
  misc_feature (124)..(184): Homolog of NCBI NO: 18401209 NR Description: expressed protein
  misc_feature (1)..(27): Homolog of NCBI NO: 21593723 NR Description: unknown [Arabidopsis thaliana]
  misc_feature (124)..(184): Homolog of NCBI NO: 21593723 NR Description: unknown [Arabidopsis thaliana]
  misc_feature (1)..(27): Homolog of NCBI NO: 34896590 NR Description: hypothetical protein [Oryza sativa]
  misc_feature (124)..(184): Homolog of NCBI NO: 34896590 NR Description: hypothetical protein [Oryza sativa]
MVANLVEGVSYPFFYSLADMGTLPDHPTRTSLASSRPSASASPISPRPSRSCSAARWGGGNHPVGWWWTWVPMLAWHHSWPAGRRDGVSGAGIRARVRESAAEMRRGVPQPGAGPHCGVSRCVAAASDRVGTITMHKVIGRLDNSAISADGTKLAFKSNAEIAVEVSTIPLDEVVPDTERVLMI

SEQ ID NO: 3646 - DNA, 1987 bp, Zea mays subsp. mays
  misc_feature (1)..(1987): Ceres Seq. ID no. 12358799
  misc_feature: MA Experiment ID: 108535 Result: Down-regulated in Transcription
  misc_feature: MA Experiment 108535 PARAMETER Experiment Name: Zm_Meristem_P Parameter: Age (day) Value: 8
  misc_feature: MA Experiment 108535 PARAMETER Experiment Name: Zm_Meristem_P Parameter: Organism Value: Zea mays
  misc_feature: MA Experiment 108535 PARAMETER Experiment Name: Zm_Meristem_P Parameter: Plant Line Value: 35A19
  misc_feature: MA Experiment 108535 PARAMETER Experiment Name: Zm_Meristem_P Parameter: Tissue Value: Root Meristem vs. Above Root Meristem
  misc_feature: MA Experiment ID: 108536 Result: Down-regulated in Transcription
  misc_feature: MA Experiment 108536 PARAMETER Experiment Name: Zm_Meristem_P Parameter: Age (day) Value: 8
  misc_feature: MA Experiment 108536 PARAMETER Experiment Name: Zm_Meristem_P Parameter: Organism Value: Zea mays
  misc_feature: MA Experiment 108536 PARAMETER Experiment Name: Zm_Meristem_P Parameter: Plant Line Value: 35A19
  misc_feature: MA Experiment 108536 PARAMETER Experiment Name: Zm_Meristem_P Parameter: Tissue Value: Shoot Meristem vs. Above Shoot Meristem
  misc_feature: MA Experiment ID: 108556 Result: Up-regulated in Transcription
  misc_feature: MA Experiment 108556 PARAMETER Experiment Name: Zm_Drought_P Parameter: Age (day) Value: 9
  misc_feature: MA Experiment 108556 PARAMETER Experiment Name: Zm_Drought_P Parameter: Organism Value: Zea mays
  misc_feature: MA Experiment 108556 PARAMETER Experiment Name: Zm_Drought_P Parameter: Plant Line Value: 35A19
  misc_feature: MA Experiment 108556 PARAMETER Experiment Name: Zm_Drought_P Parameter: Timepoint (hr) Value: 24
  misc_feature: MA Experiment 108556 PARAMETER Experiment Name: Zm_Drought_P Parameter: Tissue Value: Aerial
  misc_feature: MA Experiment 108556 PARAMETER Experiment Name: Zm_Drought_P Parameter: Treatment Value: Drought vs. No Drought
  misc_feature: MA Experiment ID: 108687 Result: Up-regulated in Transcription
  misc_feature: MA Experiment 108687 PARAMETER Experiment Name: Zm_Embryos-Flowers__P Parameter: Tissue Value: Embryo vs. Aerial+
  misc_feature: MA Experiment ID: 108688 Result: Down-regulated in Transcription
  misc_feature: MA Experiment 108688 PARAMETER Experiment Name: Zm_Embryos-Flowers__P Parameter: Tissue Value: Immature Flowers vs. Aerial+
  misc_feature: MA Experiment ID: 108689 Result: Up-regulated in Transcription
  misc_feature: MA Experiment 108689 PARAMETER Experiment Name: Zm_Drought_Roots_P Parameter: Age (day) Value: 9
  misc_feature: MA Experiment 108689 PARAMETER Experiment Name: Zm_Drought_Roots_P Parameter: Organism Value: Zea mays
  misc_feature: MA Experiment 108689 PARAMETER Experiment Name: Zm_Drought_Roots_P Parameter: Plant Line Value: 35A19
  misc_feature: MA Experiment 108689 PARAMETER Experiment Name: Zm_Drought_Roots_P Parameter: Timepoint (hr) Value: 24
  misc_feature: MA Experiment 108689 PARAMETER Experiment Name: Zm_Drought_Roots_P Parameter: Tissue Value: Roots
  misc_feature: MA Experiment 108689 PARAMETER Experiment Name: Zm_Drought_Roots_P Parameter: Treatment Value: Drought vs. No Drought
  misc_feature: MA Experiment ID: 20000479 Result: Up-regulated in Transcription
  misc_feature: MA Experiment 20000479 PARAMETER Experiment Name: Zm_Drought_P Parameter: Age (day) Value: 10
  misc_feature: MA Experiment 20000479 PARAMETER Experiment Name: Zm_Drought_P Parameter: Organism Value: Zea mays
  misc_feature: MA Experiment 20000479 PARAMETER Experiment Name: Zm_Drought_P Parameter: Plant Line Value: 35A19
  misc_feature: MA Experiment 20000479 PARAMETER Experiment Name: Zm_Drought_P Parameter: Timepoint (hr) Value: 48
  misc_feature: MA Experiment 20000479 PARAMETER Experiment Name: Zm_Drought_P Parameter: Tissue Value: Aerial
  misc_feature: MA Experiment 20000479 PARAMETER Experiment Name: Zm_Drought_P Parameter: Treatment Value: Drought vs. No Drought
ctcgagtcgagcgaaccgaagccgaacatacccacccatcgtctcgtcgtctcgtcgcgcgtgggcgtggctctctctccccccacctcctcttttaagacgacgccatcgccagccggccctccctcgccgtccggcgccgtcctccttcgtccttccctctcatcacagtttccacctcgcgaggggctcgcgcgcgcgcccatcccggccgatcgactcacgaattcgcgcgcgatcatattcgtgcaagggcatccccgcacggccggaagcacggaatcacttccccgccccccaattcccgggctcctcggcgccgatccctcgccggtgttcgctttccggcggtttccgcggcgtgtcgcgggcaggcgcaggcggctcggctcggttgtttcctcctcgtgccatcatccatggaggcgaagcagcgcccgcggcacggcggggagaggaggccgccgccggcgacggacggcggcgaggagtacgacccgtggacggcgtggctctacaagccgcgcaccatctcggtgctcctcgtcggcgcctgccttctcatctgggcaagtggagcacttgatcctgaaggtactgccgctcacagtagcgtgacatcaatcaagaggggtgtctgggctatgattgcagtcttccttgcctactgcacgcttcaggcaccttcaacgatacttattaggccccatcctgctgtctggcgcctggtacatggactggctgtcgtttacctcgttgctcttacctttcttcttttccagaaccgtgacgatgctcgccagttcatgaaacaccttcacccagatcttggagttgaattgccggagagatcttatggagcagattgccgcttgtatgttccagaaaaccctaaaaacaagttcataaatatttatgagacattgtttgatgaatttgttgttgcccatatccttgggtggtggggcaaagctgtaatgatacgaaatcaacttctactttgggtcttgtcgattggctttgagctaatggagctaacgttcagacatatgctgccaaactttaatgagtgctggtgggatagcattatcttggacatattgatctgcaattggtttggtatttgggcaggaatgcacacagtccgtcactttgatggcaaaacttatgaatgggttggattgagccgccaacgaagtatcatgggtaaggtgaaaagatcgttgagccagttcactcctgctcaatgggacaaggatcagtggcatcctttcatggggccactgcggttcatccaagtgctgttcctctgcgttgtcttcatgaccgtggagcttaacacattcttccttaagttttgcctttggatccctccaaggaaccccttggtcgtgtacagattgatcctctggtggctgatcgccatcccaaccatccgcgagtacaactcctacctgcaagacaggaaaccggtgaagaaggttggagccttctgttggctctctctagctatatgcatagtggagctgcttatctgcatgaagtttgggcatgggctgtttcatgacccgatgcctacctggctgatcatcttttggagctcggtcgggactgcactcgtgattttcttgctttcgtggtcatggaggagtcaccaaaggttcaggagaaagcagctctgattgtttcagtttgctacttttctttttcgaattttatataggcgttgtacatatttgatatggtttgtgatgtaacttacgttttaggggtggccatttttctgctgcccctggcaggaacttggtttgtcacgatagatcatgcattgttgacaacatgagattgattaataaattgaaataaccgcgacatcataaccagttgtaattaattattaaagcaaggtcactgcatattttggttccaaactaattctgggccaacaatgcacagttctgtaatacgaatgaccaatcattatctt

SEQ ID NO: 3647 - protein, 420 aa, Zea mays subsp. mays
  peptide (1)..(420): Ceres Seq. ID no. 12358800
  misc_feature (96)..(379): Pfam Name: Phosphatidyl serine synthase Pfam Description: Phosphatidyl serine synthase
  misc_feature (72)..(410): Homolog of NCBI NO: 14290490 NR Description: Similar to phosphatidylserine synthase 2 [Mus
  misc_feature (1)..(410): Homolog of NCBI NO: 31560497 NR Description: phosphatidylserine synthase 2 [Mus musculus]
  misc_feature (1)..(410): Homolog of NCBI NO: 4063700 NR Description: phosphatidylserine synthase-2 [Mus musculus]
  misc_feature (1)..(410): Homolog of NCBI NO: 2190007 NR Description: phosphatidylserine synthase II [Cricetulus
  misc_feature (17)..(51): Homolog of NCBI NO: 34911216 NR Description: putative phosphatidylserine synthase
  misc_feature (1)..(410): Homolog of NCBI NO: 13540555 NR Description: phosphatidylserine synthase 2 [Homo sapiens]
  misc_feature (211)..(419): Homolog of NCBI NO: 22329573 NR Description: putative phosphatidylserine synthase
  misc_feature (50)..(138): Homolog of NCBI NO: 34911216 NR Description: putative phosphatidylserine synthase
  misc_feature (209)..(323): Homolog of NCBI NO: 34911216 NR Description: putative phosphatidylserine synthase
  misc_feature (4)..(379): Homolog of NCBI NO: 25518032 NR Description: F9L1.4 protein - Arabidopsis thaliana
MEAKQRPRHGGERRPPPATDGGEEYDPWTAWLYKPRTISVLLVGACLLIWASGALDPEGTAAHSSVTSIKRGVWAMIAVFLAYCTLQAPSTILIRPHPAVWRLVHGLAVVYLVALTFLLFQNRDDARQFMKHLHPDLGVELPERSYGADCRLYVPENPKNKFINIYETLFDEFVVAHILGWWGKAVMIRNQLLLWVLSIGFELMELTFRHMLPNFNECWWDSIILDILICNWFGIWAGMHTVRHFDGKTYEWVGLSRQRSIMGKVKRSLSQFTPAQWDKDQWHPFMGPLRFIQVLFLCVVFMTVELNTFFLKFCLWIPPRNPLVVYRLILWWLIAIPTIREYNSYLQDRKPVKKVGAFCWLSLAICIVELLICMKFGHGLFHDPMPTWLIIFWSSVGTALVIFLLSWSWRSHQRFRRKQL

SEQ ID NO: 3648 - protein, 345 aa, Zea mays subsp. mays
  peptide (1)..(345): Ceres Seq. ID no. 12358801
  misc_feature (21)..(304): Pfam Name: Phosphatidyl serine synthase Pfam Description: Phosphatidyl serine synthase
  misc_feature (1)..(339): Homolog of NCBI NO: 8388685 NR Description: phosphatidylserine synthase [Leishmania major]
  misc_feature (1)..(335): Homolog of NCBI NO: 14290490 NR Description: Similar to phosphatidylserine synthase 2 [Mus
  misc_feature (1)..(335): Homolog of NCBI NO: 31560497 NR Description: phosphatidylserine synthase 2 [Mus musculus]
  misc_feature (1)..(335): Homolog of NCBI NO: 4063700 NR Description: phosphatidylserine synthase-2 [Mus musculus]
  misc_feature (1)..(335): Homolog of NCBI NO: 2190007 NR Description: phosphatidylserine synthase II [Cricetulus
  misc_feature (1)..(335): Homolog of NCBI NO: 13540555 NR Description: phosphatidylserine synthase 2 [Homo sapiens]
  misc_feature (136)..(344): Homolog of NCBI NO: 22329573 NR Description: putative phosphatidylserine synthase
  misc_feature (1)..(63): Homolog of NCBI NO: 34911216 NR Description: putative phosphatidylserine synthase
  misc_feature (134)..(248): Homolog of NCBI NO: 34911216 NR Description: putative phosphatidylserine synthase
  misc_feature (1)..(304): Homolog of NCBI NO: 25518032 NR Description: F9L1.4 protein - Arabidopsis thaliana
MIAVFLAYCTLQAPSTILIRPHPAVWRLVHGLAVVYLVALTFLLFQNRDDARQFMKHLHPDLGVELPERSYGADCRLYVPENPKNKFINIYETLFDEFVVAHILGWWGKAVMIRNQLLLWVLSIGFELMELTFRHMLPNFNECWWDSIILDILICNWFGIWAGMHTVRHFDGKTYEWVGLSRQRSIMGKVKRSLSQFTPAQWDKDQWHPFMGPLRFIQVLFLCVVFMTVELNTFFLKFCLWIPPRNPLVVYRLILWWLIAIPTIREYNSYLQDRKPVKKVGAFCWLSLAICIVELLICMKFGHGLFHDPMPTWLIIFWSSVGTALVIFLLSWSWRSHQRFRRKQL

SEQ ID NO: 3649 - protein, 291 aa, Zea mays subsp. mays
  peptide (1)..(291): Ceres Seq. ID no. 12358802
  misc_feature (1)..(250): Pfam Name: Phosphatidyl serine synthase Pfam Description: Phosphatidyl serine synthase
  misc_feature (1)..(278): Homolog of NCBI NO: 27881972 NR Description: Unknown (protein for MGC:55906) [Danio rerio]
  misc_feature (1)..(285): Homolog of NCBI NO: 8388685 NR Description: phosphatidylserine synthase [Leishmania major]
  misc_feature (1)..(281): Homolog of NCBI NO: 14290490 NR Description: Similar to phosphatidylserine synthase 2 [Mus
  misc_feature (1)..(281): Homolog of NCBI NO: 31560497 NR Description: phosphatidylserine synthase 2 [Mus musculus]
  misc_feature (1)..(281): Homolog of NCBI NO: 4063700 NR Description: phosphatidylserine synthase-2 [Mus musculus]
  misc_feature (1)..(281): Homolog of NCBI NO: 2190007 NR Description: phosphatidylserine synthase II [Cricetulus
  misc_feature (1)..(281): Homolog of NCBI NO: 13540555 NR Description: phosphatidylserine synthase 2 [Homo sapiens]
  misc_feature (82)..(290): Homolog of NCBI NO: 22329573 NR Description: putative phosphatidylserine synthase
  misc_feature (80)..(194): Homolog of NCBI NO: 34911216 NR Description: putative phosphatidylserine synthase
  misc_feature (1)..(250): Homolog of NCBI NO: 25518032 NR Description: F9L1.4 protein - Arabidopsis thaliana
MKHLHPDLGVELPERSYGADCRLYVPENPKNKFINIYETLFDEFVVAHILGWWGKAVMIRNQLLLWVLSIGFELMELTFRHMLPNFNECWWDSIILDILICNWFGIWAGMHTVRHFDGKTYEWVGLSRQRSIMGKVKRSLSQFTPAQWDKDQWHPFMGPLRFIQVLFLCVVFMTVELNTFFLKFCLWIPPRNPLVVYRLILWWLIAIPTIREYNSYLQDRKPVKKVGAFCWLSLAICIVELLICMKFGHGLFHDPMPTWLIIFWSSVGTALVIFLLSWSWRSHQRFRRKQL

SEQ ID NO: 3650 - DNA, 1637 bp, Zea mays subsp. mays
  misc_feature (1)..(1637): Ceres Seq. ID no. 12407796
  misc_feature: MA Experiment ID: 108527 Result: Down-regulated in Transcription
  misc_feature: MA Experiment 108527 PARAMETER Experiment Name: Zm_5mM_NO_P Parameter: Age (day) Value: 8
  misc_feature: MA Experiment 108527 PARAMETER Experiment Name: Zm_5mM_NO_P Parameter: Organism Value: Zea mays
  misc_feature: MA Experiment 108527 PARAMETER Experiment Name: Zm_5mM_NO_P Parameter: Plant Line Value: 35A19
  misc_feature: MA Experiment 108527 PARAMETER Experiment Name: Zm_5mM_NO_P Parameter: Timepoint (hr) Value: 6
  misc_feature: MA Experiment 108527 PARAMETER Experiment Name: Zm_5mM_NO_P Parameter: Tissue Value: Aerial
  misc_feature: MA Experiment 108527 PARAMETER Experiment Name: Zm_5mM_NO_P Parameter: Treatment Value: 5mM NO vs. No Treatment
  misc_feature: MA Experiment ID: 108528 Result: Up-regulated in Transcription
  misc_feature: MA Experiment 108528 PARAMETER Experiment Name: Zm_Imbibed_Seeds_P Parameter: Age (day) Value: 5 vs. 2
  misc_feature: MA Experiment 108528 PARAMETER Experiment Name: Zm_Imbibed_Seeds_P Parameter: Organism Value: Zea mays
  misc_feature: MA Experiment 108528 PARAMETER Experiment Name: Zm_Imbibed_Seeds_P Parameter: Plant Line Value: 35A19
  misc_feature: MA Experiment 108528 PARAMETER Experiment Name: Zm_Imbibed_Seeds_P Parameter: Tissue Value: Aerial vs. Embryo
  misc_feature: MA Experiment ID: 108529 Result: Down-regulated in Transcription
  misc_feature: MA Experiment 108529 PARAMETER Experiment Name: Zm_Imbibed_Seeds_P Parameter: Age (day) Value: 5 vs. 2
  misc_feature: MA Experiment 108529 PARAMETER Experiment Name: Zm_Imbibed_Seeds_P Parameter: Organism Value: Zea mays
  misc_feature: MA Experiment 108529 PARAMETER Experiment Name: Zm_Imbibed_Seeds_P Parameter: Plant Line Value: 35A19
  misc_feature: MA Experiment 108529 PARAMETER Experiment Name: Zm_Imbibed_Seeds_P Parameter: Tissue Value: Roots vs. Embryo
  misc_feature: MA Experiment ID: 108530 Result: Up-regulated in Transcription
  misc_feature: MA Experiment 108530 PARAMETER Experiment Name: Zm_Imbibed_Seeds_P Parameter: Age (day) Value: 6 vs. 2
  misc_feature: MA Experiment 108530 PARAMETER Experiment Name: Zm_Imbibed_Seeds_P Parameter: Organism Value: Zea mays
  misc_feature: MA Experiment 108530 PARAMETER Experiment Name: Zm_Imbibed_Seeds_P Parameter: Plant Line Value: 35A19
  misc_feature: MA Experiment 108530 PARAMETER Experiment Name: Zm_Imbibed_Seeds_P Parameter: Tissue Value: Aerial vs. Embryo
  misc_feature: MA Experiment ID: 108536 Result: Down-regulated in Transcription
  misc_feature: MA Experiment 108536 PARAMETER Experiment Name: Zm_Meristem_P Parameter: Age (day) Value: 8
  misc_feature: MA Experiment 108536 PARAMETER Experiment Name: Zm_Meristem_P Parameter: Organism Value: Zea mays
  misc_feature: MA Experiment 108536 PARAMETER Experiment Name: Zm_Meristem_P Parameter: Plant Line Value: 35A19
  misc_feature: MA Experiment 108536 PARAMETER Experiment Name: Zm_Meristem_P Parameter: Tissue Value: Shoot Meristem vs. Above Shoot Meristem
  misc_feature: MA Experiment ID: 108544 Result: Down-regulated in Transcription
  misc_feature: MA Experiment ID: 108545 Result: Up-regulated in Transcription
  misc_feature: MA Experiment 108545 PARAMETER Experiment Name: Zm_Imbibed_Seeds_P Parameter: Age (day) Value: 3 vs. 2
  misc_feature: MA Experiment 108545 PARAMETER Experiment Name: Zm_Imbibed_Seeds_P Parameter: Organism Value: Zea mays
  misc_feature: MA Experiment 108545 PARAMETER Experiment Name: Zm_Imbibed_Seeds_P Parameter: Plant Line Value: 35A19
  misc_feature: MA Experiment 108545 PARAMETER Experiment Name: Zm_Imbibed_Seeds_P Parameter: Tissue Value: Aerial vs. Embryo
  misc_feature: MA Experiment ID: 108546 Result: Down-regulated in Transcription
  misc_feature: MA Experiment 108546 PARAMETER Experiment Name: Zm_Imbibed_Seeds_P Parameter: Age (day) Value: 3 vs. 2
  misc_feature: MA Experiment 108546 PARAMETER Experiment Name: Zm_Imbibed_Seeds_P Parameter: Organism Value: Zea mays
  misc_feature: MA Experiment 108546 PARAMETER Experiment Name: Zm_Imbibed_Seeds_P Parameter: Plant Line Value: 35A19
  misc_feature: MA Experiment 108546 PARAMETER Experiment Name: Zm_Imbibed_Seeds_P Parameter: Tissue Value: Roots vs. Embryo
  misc_feature: MA Experiment ID: 108547 Result: Up-regulated in Transcription
  misc_feature: MA Experiment 108547 PARAMETER Experiment Name: Zm_Imbibed_Seeds_P Parameter: Age (day) Value: 4 vs. 2
  misc_feature: MA Experiment 108547 PARAMETER Experiment Name: Zm_Imbibed_Seeds_P Parameter: Organism Value: Zea mays
  misc_feature: MA Experiment 108547 PARAMETER Experiment Name: Zm_Imbibed_Seeds_P Parameter: Plant Line Value: 35A19
  misc_feature: MA Experiment 108547 PARAMETER Experiment Name: Zm_Imbibed_Seeds_P Parameter: Tissue Value: Aerial vs. Embryo
  misc_feature: MA Experiment ID: 108559 Result: Down-regulated in Transcription
  misc_feature: MA Experiment 108559 PARAMETER Experiment Name: Zm_5mM_NO_P Parameter: Age (day) Value: 8
  misc_feature: MA Experiment 108559 PARAMETER Experiment Name: Zm_5mM_NO_P Parameter: Organism Value: Zea mays
  misc_feature: MA Experiment 108559 PARAMETER Experiment Name: Zm_5mM_NO_P Parameter: Plant Line Value: 35A19
  misc_feature: MA Experiment 108559 PARAMETER Experiment Name: Zm_5mM_NO_P Parameter: Timepoint (hr) Value: 12
  misc_feature: MA Experiment 108559 PARAMETER Experiment Name: Zm_5mM_NO_P Parameter: Tissue Value: Aerial
  misc_feature: MA Experiment 108559 PARAMETER Experiment Name: Zm_5mM_NO_P Parameter: Treatment Value: 5mM NO vs. No Treatment
  misc_feature: MA Experiment ID: 108688 Result: Down-regulated in Transcription
  misc_feature: MA Experiment 108688 PARAMETER Experiment Name: Zm_Embryos-Flowers__P Parameter: Tissue Value: Immature Flowers vs. Aerial+
tcgctcgcgtctcccttatccattcccaaataatccccacctcccgctgctgctccgccgcccgccatggcttccctcacctcggcgtccacttcactcctcttcccgcaggcctcctcatccatgagccgcatccgtctctccacccccctgggcttctccgcgcagcctgcgcggctgcggagccagggggcggcagtgggcgcgcggcggcgcgggcgcctgctggtggtgcgcgcagcgaggggcaagttcgagcgcaccaaaccacacgtcaacataggcaccatcggccatgtcgaccacggaaagaccactctcaccgccgcgctcaccatggtgctcgcctccgtcggcggcagcgcgcctaagaagtacgacgagatcgacgccgcccccgaggagcgcgcccgcggtatcaccatcaacaccgccaccgtcgagtacgagaccgagacccgccactacgcacacgtcgactgccccggccacgccgactatgtcaagaatatgatcaccggcgctgcgcagatggacggtgccatcctcgtcgtatccggtgccgacgggcccatgccgcagaccaaagagcacatcctcctcgccaagcaagtcggtgttcccaagatcgttgtcttcctcaacaaaaaggacatggtcgacgacgaggagctgctcgagctcgtcgagctcgaggtccgcgagctgctcagcaactacgagtacgacggcgacgacgtaccaatcgtcgctggctccgccctcaaggcgctcgaggctctcatggtcaaccctgccctgaagcgcggcgacgatgagtgggtcgactacatcttctcgttggttgataaagtggattcctatattccagtcccgcagaggcagactgacctcccgttcttgctcgctgttgaagatgtcttctccatcaccggtcgtggtacagttgccactggccgtatagagcgtggcaccgtcaagattggtgacacagtcgatatcgtcggaatccgggacacccggaactgcacggtcactggtgttgagatgttccagaagaccatggatgatgccatggccggagacaatgttgggctgctgctccgtggtatgcagaaggatgacattgaaagaggcatggtgctggcaaagcctggctctatcacaccgcacaccaagtttgaggctgttgtgtatgtgcttaagaaggaagagggtggccgacactcacctttcttccctggttaccgcccacagttctacatgcggacaactgatgtgacagggagtgtgactacgattatgaatgacaaggatgaggaggcgaagatgtgcatgcctggtgaccgtatcaaaatgattgttcagctcatccagcctgttgcttgtgagcagggtatgaggtttgctatccgtgagggtggtaagaccgttggtgccggtgtcatcaacaaaatcattgagtaaactggatataacatatccaccatgagaattttccttgtttactcaaagcgacatgctccgtagttgttattatgtggtgagttttaggggttgctcatgtgcaattgtagtatgacacttttttttgtcaagtgaatttgcataatttatgacattcacgacaaagattc

SEQ ID NO: 3651 - protein, 466 aa, Zea mays subsp. mays
  peptide (1)..(466): Ceres Seq. ID no. 12407797
  misc_feature (67)..(271): Pfam Name: Elongation factor Tu GTP binding domain Pfam Description: Elongation factor Tu GTP binding domain
  misc_feature (3)..(466): Homolog of NCBI NO: 12830555 NR Description: chloroplast translational elongation factor Tu
  misc_feature (1)..(466): Homolog of NCBI NO: 6525065 NR Description: chloroplast translational elongation factor Tu
  misc_feature (1)..(466): Homolog of NCBI NO: 17225494 NR Description: translational elongation factor Tu [Oryza sativa]
MASLTSASTSLLFPQASSSMSRIRLSTPLGFSAQPARLRSQGAAVGARRRGRLLVVRAARGKFERTKPHVNIGTIGHVDHGKTTLTAALTMVLASVGGSAPKKYDEIDAAPEERARGITINTATVEYETETRHYAHVDCPGHADYVKNMITGAAQMDGAILVVSGADGPMPQTKEHILLAKQVGVPKIVVFLNKKDMVDDEELLELVELEVRELLSNYEYDGDDVPIVAGSALKALEALMVNPALKRGDDEWVDYIFSLVDKVDSYIPVPQRQTDLPFLLAVEDVFSITGRGTVATGRIERGTVKIGDTVDIVGIRDTRNCTVTGVEMFQKTMDDAMAGDNVGLLLRGMQKDDIERGMVLAKPGSITPHTKFEAVVYVLKKEEGGRHSPFFPGYRPQFYMRTTDVTGSVTTIMNDKDEEAKMCMPGDRIKMIVQLIQPVACEQGMRFAIREGGKTVGAGVINKIIE

SEQ ID NO: 3652 - protein, 447 aa, Zea mays subsp. mays
  peptide (1)..(447): Ceres Seq. ID no. 12407798
  misc_feature (48)..(252): Pfam Name: Elongation factor Tu GTP binding domain Pfam Description: Elongation factor Tu GTP binding domain
  misc_feature (1)..(447): Homolog of NCBI NO: 12830555 NR Description: chloroplast translational elongation factor Tu
  misc_feature (1)..(447): Homolog of NCBI NO: 6525065 NR Description: chloroplast translational elongation factor Tu
  misc_feature (1)..(447): Homolog of NCBI NO: 17225494 NR Description: translational elongation factor Tu [Oryza sativa]
MSRIRLSTPLGFSAQPARLRSQGAAVGARRRGRLLVVRAARGKFERTKPHVNIGTIGHVDHGKTTLTAALTMVLASVGGSAPKKYDEIDAAPEERARGITINTATVEYETETRHYAHVDCPGHADYVKNMITGAAQMDGAILVVSGADGPMPQTKEHILLAKQVGVPKIVVFLNKKDMVDDEELLELVELEVRELLSNYEYDGDDVPIVAGSALKALEALMVNPALKRGDDEWVDYIFSLVDKVDSYIPVPQRQTDLPFLLAVEDVFSITGRGTVATGRIERGTVKIGDTVDIVGIRDTRNCTVTGVEMFQKTMDDAMAGDNVGLLLRGMQKDDIERGMVLAKPGSITPHTKFEAVVYVLKKEEGGRHSPFFPGYRPQFYMRTTDVTGSVTTIMNDKDEEAKMCMPGDRIKMIVQLIQPVACEQGMRFAIREGGKTVGAGVINKIIE

SEQ ID NO: 3653 - protein, 376 aa, Zea mays subsp. mays
  peptide (1)..(376): Ceres Seq. ID no. 12407799
  misc_feature (1)..(181): Pfam Name: Elongation factor Tu GTP binding domain Pfam Description: Elongation factor Tu GTP binding domain
  misc_feature (1)..(376): Homolog of NCBI NO: 12830555 NR Description: chloroplast translational elongation factor Tu
  misc_feature (1)..(376): Homolog of NCBI NO: 6525065 NR Description: chloroplast translational elongation factor Tu
  misc_feature (1)..(376): Homolog of NCBI NO: 17225494 NR Description: translational elongation factor Tu [Oryza sativa]
MVLASVGGSAPKKYDEIDAAPEERARGITINTATVEYETETRHYAHVDCPGHADYVKNMITGAAQMDGAILVVSGADGPMPQTKEHILLAKQVGVPKIVVFLNKKDMVDDEELLELVELEVRELLSNYEYDGDDVPIVAGSALKALEALMVNPALKRGDDEWVDYIFSLVDKVDSYIPVPQRQTDLPFLLAVEDVFSITGRGTVATGRIERGTVKIGDTVDIVGIRDTRNCTVTGVEMFQKTMDDAMAGDNVGLLLRGMQKDDIERGMVLAKPGSITPHTKFEAVVYVLKKEEGGRHSPFFPGYRPQFYMRTTDVTGSVTTIMNDKDEEAKMCMPGDRIKMIVQLIQPVACEQGMRFAIREGGKTVGAGVINKIIE

SEQ ID NO: 3654 - DNA, 839 bp, Zea mays subsp. mays
  misc_feature (1)..(839): Ceres Seq. ID no. 12368805
  misc_feature: MA Experiment ID: 108523 Result: Up-regulated in Transcription
  misc_feature: MA Experiment 108523 PARAMETER Experiment Name: Zm_42deg_Heat_P Parameter: Age (day) Value: 8
  misc_feature: MA Experiment 108523 PARAMETER Experiment Name: Zm_42deg_Heat_P Parameter: Organism Value: Zea mays
  misc_feature: MA Experiment 108523 PARAMETER Experiment Name: Zm_42deg_Heat_P Parameter: Plant Line Value: 35A19
  misc_feature: MA Experiment 108523 PARAMETER Experiment Name: Zm_42deg_Heat_P Parameter: Temperature (deg C) Value: 42 vs. 22
  misc_feature: MA Experiment 108523 PARAMETER Experiment Name: Zm_42deg_Heat_P Parameter: Timepoint (hr) Value: 6
  misc_feature: MA Experiment 108523 PARAMETER Experiment Name: Zm_42deg_Heat_P Parameter: Tissue Value: Aerial
  misc_feature: MA Experiment ID: 108527 Result: Down-regulated in Transcription
  misc_feature: MA Experiment 108527 PARAMETER Experiment Name: Zm_5mM_NO_P Parameter: Age (day) Value: 8
  misc_feature: MA Experiment 108527 PARAMETER Experiment Name: Zm_5mM_NO_P Parameter: Organism Value: Zea mays
  misc_feature: MA Experiment 108527 PARAMETER Experiment Name: Zm_5mM_NO_P Parameter: Plant Line Value: 35A19
  misc_feature: MA Experiment 108527 PARAMETER Experiment Name: Zm_5mM_NO_P Parameter: Timepoint (hr) Value: 6
  misc_feature: MA Experiment 108527 PARAMETER Experiment Name: Zm_5mM_NO_P Parameter: Tissue Value: Aerial
  misc_feature: MA Experiment 108527 PARAMETER Experiment Name: Zm_5mM_NO_P Parameter: Treatment Value: 5mM NO vs. No Treatment
  misc_feature: MA Experiment ID: 108529 Result: Up-regulated in Transcription
  misc_feature: MA Experiment 108529 PARAMETER Experiment Name: Zm_Imbibed_Seeds_P Parameter: Age (day) Value: 5 vs. 2
  misc_feature: MA Experiment 108529 PARAMETER Experiment Name: Zm_Imbibed_Seeds_P Parameter: Organism Value: Zea mays
  misc_feature: MA Experiment 108529 PARAMETER Experiment Name: Zm_Imbibed_Seeds_P Parameter: Plant Line Value: 35A19
  misc_feature: MA Experiment 108529 PARAMETER Experiment Name: Zm_Imbibed_Seeds_P Parameter: Tissue Value: Roots vs. Embryo
  misc_feature: MA Experiment ID: 108535 Result: Down-regulated in Transcription
  misc_feature: MA Experiment 108535 PARAMETER Experiment Name: Zm_Meristem_P Parameter: Age (day) Value: 8
  misc_feature: MA Experiment 108535 PARAMETER Experiment Name: Zm_Meristem_P Parameter: Organism Value: Zea mays
  misc_feature: MA Experiment 108535 PARAMETER Experiment Name: Zm_Meristem_P Parameter: Plant Line Value: 35A19
  misc_feature: MA Experiment 108535 PARAMETER Experiment Name: Zm_Meristem_P Parameter: Tissue Value: Root Meristem vs. Above Root Meristem
  misc_feature: MA Experiment ID: 108546 Result: Up-regulated in Transcription
  misc_feature: MA Experiment 108546 PARAMETER Experiment Name: Zm_Imbibed_Seeds_P Parameter: Age (day) Value: 3 vs. 2
  misc_feature: MA Experiment 108546 PARAMETER Experiment Name: Zm_Imbibed_Seeds_P Parameter: Organism Value: Zea mays
  misc_feature: MA Experiment 108546 PARAMETER Experiment Name: Zm_Imbibed_Seeds_P Parameter: Plant Line Value: 35A19
  misc_feature: MA Experiment 108546 PARAMETER Experiment Name: Zm_Imbibed_Seeds_P Parameter: Tissue Value: Roots vs. Embryo
  misc_feature: MA Experiment ID: 20000535 Result: Down-regulated in Transcription
  misc_feature: MA Experiment 20000535 PARAMETER Experiment Name: Zm_Hybrid_Seed_Dev_P Parameter: DAP Value: 30 vs. 12
  misc_feature: MA Experiment 20000535 PARAMETER Experiment Name: Zm_Hybrid_Seed_Dev_P Parameter: Organism Value: Zea mays
  misc_feature: MA Experiment 20000535 PARAMETER Experiment Name: Zm_Hybrid_Seed_Dev_P Parameter: Plant Line Value: 35A19
  misc_feature: MA Experiment 20000535 PARAMETER Experiment Name: Zm_Hybrid_Seed_Dev_P Parameter: Tissue Value: Embryo vs. Unfert Floret
accacacgtacgcccacaccagataatacactacagcacagcaccgacaacacctctcaagtaacccagcaggcaccatggccgccgccgtgcccctcctcctcctcctgctactgccaacgaccctgatggccgcgtcggcggcgtccggcggcgagaagagcacgcacatcaagctgtactggcacgacgtggtgagcgggccgagcccgacggcggtgccggtggcgcaggcggcggtgaccaacacctccaagaccgccttcggcatggtggtggtgatcgacgacccgctgaccgagggccccgacctcaagtcctccaagccgctcggccgcgcgcagggcacctacgtcggcgcgggcaaggacgagctctccctgatgatgaacatgaatttcgtgttccaggccggcgagtacaacggcagcaccgtcgccatcatgggccggaacgccgtgttcgacgccgtccgcgagatggccgtcgtgggcggcaccggcgcgttcaggatggcgcgcgggtacgcgcaggcccgcacgcacaccttcgacctcaacaccggcgacgccaccgtcgagtacaacctctacatcaagcactagctagctagcccatcggctttgtgtttctgattgttggtgctcatatatgaacacgatcgaactccataattgtcttgtgagctcaatttgtgccactggcttttgcagttttggtgaaaaagaagagggtaattaaaggacgatagcttcggtcgttgtaagctgacttcgatttaacttgcacaatgattgaggacttaaagaataaagatagtaatagactttgtttatctg

SEQ ID NO: 3655 - protein, 175 aa, Zea mays subsp. mays
  peptide (1)..(175): Ceres Seq. ID no. 12368806
  misc_feature (27)..(175): Pfam Name: Dirigent-like protein Pfam Description: Dirigent-like protein
  misc_feature (24)..(170): Homolog of NCBI NO: 25412014 NR Description: probable disease resistance response protein
  misc_feature (27)..(175): Homolog of NCBI NO: 15231302 NR Description: disease resistance response protein-related/
  misc_feature (24)..(175): Homolog of NCBI NO: 30681257 NR Description: disease resistance response protein-related/
  misc_feature (27)..(175): Homolog of NCBI NO: 22135914 NR Description: unknown protein [Arabidopsis thaliana]
  misc_feature (27)..(175): Homolog of NCBI NO: 15239779 NR Description: disease resistance response protein-related/
  misc_feature (27)..(175): Homolog of NCBI NO: 15222673 NR Description: disease resistance response protein-related/
  misc_feature (5)..(175): Homolog of NCBI NO: 15238982 NR Description: disease resistance response protein-related
  misc_feature (27)..(175): Homolog of NCBI NO: 15238980 NR Description: disease resistance response protein-related
  misc_feature (15)..(175): Homolog of NCBI NO: 15218836 NR Description: disease resistance response protein-related/
  misc_feature (7)..(175): Homolog of NCBI NO: 15217886 NR Description: disease resistance response protein-related/
MAAAVPLLLLLLLPTTLMAASAASGGEKSTHIKLYWHDVVSGPSPTAVPVAQAAVTNTSKTAFGMVVVIDDPLTEGPDLKSSKPLGRAQGTYVGAGKDELSLMMNMNFVFQAGEYNGSTVAIMGRNAVFDAVREMAVVGGTGAFRMARGYAQARTHTFDLNTGDATVEYNLYIKH

SEQ ID NO: 3656 - protein, 158 aa, Zea mays subsp. mays
  peptide (1)..(158): Ceres Seq. ID no. 12368807
  misc_feature (10)..(158): Pfam Name: Dirigent-like protein Pfam Description: Dirigent-like protein
  misc_feature (1)..(158): Homolog of NCBI NO: 15218836 NR Description: disease resistance response protein-related/
  misc_feature (7)..(153): Homolog of NCBI NO: 25412014 NR Description: probable disease resistance response protein
  misc_feature (7)..(158): Homolog of NCBI NO: 30681257 NR Description: disease resistance response protein-related/
  misc_feature (10)..(158): Homolog of NCBI NO: 15239779 NR Description: disease resistance response protein-related/
  misc_feature (1)..(158): Homolog of NCBI NO: 15238982 NR Description: disease resistance response protein-related
  misc_feature (10)..(158): Homolog of NCBI NO: 15238980 NR Description: disease resistance response protein-related
  misc_feature (10)..(158): Homolog of NCBI NO: 15222673 NR Description: disease resistance response protein-related/
  misc_feature (10)..(158): Homolog of NCBI NO: 22135914 NR Description: unknown protein [Arabidopsis thaliana]
  misc_feature (10)..(158): Homolog of NCBI NO: 15231302 NR Description: disease resistance response protein-related/
  misc_feature (1)..(158): Homolog of NCBI NO: 15217886 NR Description: disease resistance response protein-related/
MAASAASGGEKSTHIKLYWHDVVSGPSPTAVPVAQAAVTNTSKTAFGMVVVIDDPLTEGPDLKSSKPLGRAQGTYVGAGKDELSLMMNMNFVFQAGEYNGSTVAIMGRNAVFDAVREMAVVGGTGAFRMARGYAQARTHTFDLNTGDATVEYNLYIKH

SEQ ID NO: 3657 - protein, 111 aa, Zea mays subsp. mays
  peptide (1)..(111): Ceres Seq. ID no. 12368808
  misc_feature (1)..(111): Pfam Name: Dirigent-like protein Pfam Description: Dirigent-like protein
  misc_feature (1)..(106): Homolog of NCBI NO: 25412014 NR Description: probable disease resistance response protein
  misc_feature (1)..(111): Homolog of NCBI NO: 15231302 NR Description: disease resistance response protein-related/
  misc_feature (1)..(111): Homolog of NCBI NO: 30681257 NR Description: disease resistance response protein-related/
  misc_feature (1)..(111): Homolog of NCBI NO: 22135914 NR Description: unknown protein [Arabidopsis thaliana]
  misc_feature (1)..(111): Homolog of NCBI NO: 15239779 NR Description: disease resistance response protein-related/
  misc_feature (1)..(111): Homolog of NCBI NO: 15222673 NR Description: disease resistance response protein-related/
  misc_feature (1)..(111): Homolog of NCBI NO: 15238982 NR Description: disease resistance response protein-related
  misc_feature (1)..(111): Homolog of NCBI NO: 15238980 NR Description: disease resistance response protein-related
  misc_feature (1)..(111): Homolog of NCBI NO: 15218836 NR Description: disease resistance response protein-related/
  misc_feature (1)..(111): Homolog of NCBI NO: 15217886 NR Description: disease resistance response protein-related/
MVVVIDDPLTEGPDLKSSKPLGRAQGTYVGAGKDELSLMMNMNFVFQAGEYNGSTVAIMGRNAVFDAVREMAVVGGTGAFRMARGYAQARTHTFDLNTGDATVEYNLYIKH

SEQ ID NO: 3658 - DNA, 1101 bp, Zea mays subsp. mays
  misc_feature (1)..(1101): Ceres Seq. ID no. 12376272
  misc_feature: MA Experiment ID: 108523 Result: Down-regulated in Transcription
  misc_feature: MA Experiment 108523 PARAMETER Experiment Name: Zm_42deg_Heat_P Parameter: Age (day) Value: 8
  misc_feature: MA Experiment 108523 PARAMETER Experiment Name: Zm_42deg_Heat_P Parameter: Organism Value: Zea mays
  misc_feature: MA Experiment 108523 PARAMETER Experiment Name: Zm_42deg_Heat_P Parameter: Plant Line Value: 35A19
  misc_feature: MA Experiment 108523 PARAMETER Experiment Name: Zm_42deg_Heat_P Parameter: Temperature (deg C) Value: 42 vs. 22
  misc_feature: MA Experiment 108523 PARAMETER Experiment Name: Zm_42deg_Heat_P Parameter: Timepoint (hr) Value: 6
  misc_feature: MA Experiment 108523 PARAMETER Experiment Name: Zm_42deg_Heat_P Parameter: Tissue Value: Aerial
  misc_feature: MA Experiment ID: 108529 Result: Up-regulated in Transcription
  misc_feature: MA Experiment 108529 PARAMETER Experiment Name: Zm_Imbibed_Seeds_P Parameter: Age (day) Value: 5 vs. 2
  misc_feature: MA Experiment 108529 PARAMETER Experiment Name: Zm_Imbibed_Seeds_P Parameter: Organism Value: Zea mays
  misc_feature: MA Experiment 108529 PARAMETER Experiment Name: Zm_Imbibed_Seeds_P Parameter: Plant Line Value: 35A19
  misc_feature: MA Experiment 108529 PARAMETER Experiment Name: Zm_Imbibed_Seeds_P Parameter: Tissue Value: Roots vs. Embryo
  misc_feature: MA Experiment ID: 108535 Result: Down-regulated in Transcription
  misc_feature: MA Experiment 108535 PARAMETER Experiment Name: Zm_Meristem_P Parameter: Age (day) Value: 8
  misc_feature: MA Experiment 108535 PARAMETER Experiment Name: Zm_Meristem_P Parameter: Organism Value: Zea mays
  misc_feature: MA Experiment 108535 PARAMETER Experiment Name: Zm_Meristem_P Parameter: Plant Line Value: 35A19
  misc_feature: MA Experiment 108535 PARAMETER Experiment Name: Zm_Meristem_P Parameter: Tissue Value: Root Meristem vs. Above Root Meristem
  misc_feature: MA Experiment ID: 108536 Result: Up-regulated in Transcription
  misc_feature: MA Experiment 108536 PARAMETER Experiment Name: Zm_Meristem_P Parameter: Age (day) Value: 8
  misc_feature: MA Experiment 108536 PARAMETER Experiment Name: Zm_Meristem_P Parameter: Organism Value: Zea mays
  misc_feature: MA Experiment 108536 PARAMETER Experiment Name: Zm_Meristem_P Parameter: Plant Line Value: 35A19
  misc_feature: MA Experiment 108536 PARAMETER Experiment Name: Zm_Meristem_P Parameter: Tissue Value: Shoot Meristem vs. Above Shoot Meristem
  misc_feature: MA Experiment ID: 108544 Result: Up-regulated in Transcription
  misc_feature: MA Experiment ID: 108546 Result: Up-regulated in Transcription
  misc_feature: MA Experiment 108546 PARAMETER Experiment Name: Zm_Imbibed_Seeds_P Parameter: Age (day) Value: 3 vs. 2
  misc_feature: MA Experiment 108546 PARAMETER Experiment Name: Zm_Imbibed_Seeds_P Parameter: Organism Value: Zea mays
  misc_feature: MA Experiment 108546 PARAMETER Experiment Name: Zm_Imbibed_Seeds_P Parameter: Plant Line Value: 35A19
  misc_feature: MA Experiment 108546 PARAMETER Experiment Name: Zm_Imbibed_Seeds_P Parameter: Tissue Value: Roots vs. Embryo
  misc_feature: MA Experiment ID: 108556 Result: Down-regulated in Transcription
  misc_feature: MA Experiment 108556 PARAMETER Experiment Name: Zm_Drought_P Parameter: Age (day) Value: 9
  misc_feature: MA Experiment 108556 PARAMETER Experiment Name: Zm_Drought_P Parameter: Organism Value: Zea mays
  misc_feature: MA Experiment 108556 PARAMETER Experiment Name: Zm_Drought_P Parameter: Plant Line Value: 35A19
  misc_feature: MA Experiment 108556 PARAMETER Experiment Name: Zm_Drought_P Parameter: Timepoint (hr) Value: 24
  misc_feature: MA Experiment 108556 PARAMETER Experiment Name: Zm_Drought_P Parameter: Tissue Value: Aerial
  misc_feature: MA Experiment 108556 PARAMETER Experiment Name: Zm_Drought_P Parameter: Treatment Value: Drought vs. No Drought
  misc_feature: MA Experiment ID: 108689 Result: Down-regulated in Transcription
  misc_feature: MA Experiment 108689 PARAMETER Experiment Name: Zm_Drought_Roots_P Parameter: Age (day) Value: 9
  misc_feature: MA Experiment 108689 PARAMETER Experiment Name: Zm_Drought_Roots_P Parameter: Organism Value: Zea mays
  misc_feature: MA Experiment 108689 PARAMETER Experiment Name: Zm_Drought_Roots_P Parameter: Plant Line Value: 35A19
  misc_feature: MA Experiment 108689 PARAMETER Experiment Name: Zm_Drought_Roots_P Parameter: Timepoint (hr) Value: 24
  misc_feature: MA Experiment 108689 PARAMETER Experiment Name: Zm_Drought_Roots_P Parameter: Tissue Value: Roots
  misc_feature: MA Experiment 108689 PARAMETER Experiment Name: Zm_Drought_Roots_P Parameter: Treatment Value: Drought vs. No Drought
  misc_feature: MA Experiment ID: 20000478 Result: Down-regulated in Transcription
  misc_feature: MA Experiment 20000478 PARAMETER Experiment Name: Zm_5mM_SA_P Parameter: Age (day) Value: 11
  misc_feature: MA Experiment 20000478 PARAMETER Experiment Name: Zm_5mM_SA_P Parameter: Organism Value: Zea mays
  misc_feature: MA Experiment 20000478 PARAMETER Experiment Name: Zm_5mM_SA_P Parameter: Plant Line Value: 35A19
  misc_feature: MA Experiment 20000478 PARAMETER Experiment Name: Zm_5mM_SA_P Parameter: Timepoint (hr) Value: 72
  misc_feature: MA Experiment 20000478 PARAMETER Experiment Name: Zm_5mM_SA_P Parameter: Tissue Value: Aerial
  misc_feature: MA Experiment 20000478 PARAMETER Experiment Name: Zm_5mM_SA_P Parameter: Treatment Value: 5mM SA vs. No Treatment
  misc_feature: MA Experiment ID: 20000479 Result: Down-regulated in Transcription
  misc_feature: MA Experiment 20000479 PARAMETER Experiment Name: Zm_Drought_P Parameter: Age (day) Value: 10
  misc_feature: MA Experiment 20000479 PARAMETER Experiment Name: Zm_Drought_P Parameter: Organism Value: Zea mays
  misc_feature: MA Experiment 20000479 PARAMETER Experiment Name: Zm_Drought_P Parameter: Plant Line Value: 35A19
  misc_feature: MA Experiment 20000479 PARAMETER Experiment Name: Zm_Drought_P Parameter: Timepoint (hr) Value: 48
  misc_feature: MA Experiment 20000479 PARAMETER Experiment Name: Zm_Drought_P Parameter: Tissue Value: Aerial
  misc_feature: MA Experiment 20000479 PARAMETER Experiment Name: Zm_Drought_P Parameter: Treatment Value: Drought vs. No Drought
  misc_feature: MA Experiment ID: 20000480 Result: Down-regulated in Transcription
  misc_feature: MA Experiment 20000480 PARAMETER Experiment Name: Zm_Drought_P Parameter: Age (day) Value: 11
  misc_feature: MA Experiment 20000480 PARAMETER Experiment Name: Zm_Drought_P Parameter: Organism Value: Zea mays
  misc_feature: MA Experiment 20000480 PARAMETER Experiment Name: Zm_Drought_P Parameter: Plant Line Value: 35A19
  misc_feature: MA Experiment 20000480 PARAMETER Experiment Name: Zm_Drought_P Parameter: Timepoint (hr) Value: 72
  misc_feature: MA Experiment 20000480 PARAMETER Experiment Name: Zm_Drought_P Parameter: Tissue Value: Aerial
  misc_feature: MA Experiment 20000480 PARAMETER Experiment Name: Zm_Drought_P Parameter: Treatment Value: Drought vs. No Drought
  misc_feature: MA Experiment ID: 20001610 Result: Down-regulated in Transcription
  misc_feature: MA Experiment 20001610 PARAMETER Experiment Name: Zm_50ppm_KNO3_L-to-H_P Parameter: Age (day) Value: 19
  misc_feature: MA Experiment 20001610 PARAMETER Experiment Name: Zm_50ppm_KNO3_L-to-H_P Parameter: Organism Value: Zea mays
  misc_feature: MA Experiment 20001610 PARAMETER Experiment Name: Zm_50ppm_KNO3_L-to-H_P Parameter: Plant Line Value: 35A19
  misc_feature: MA Experiment 20001610 PARAMETER Experiment Name: Zm_50ppm_KNO3_L-to-H_P Parameter: Timepoint (hr) Value: 2
  misc_feature: MA Experiment 20001610 PARAMETER Experiment Name: Zm_50ppm_KNO3_L-to-H_P Parameter: Tissue Value: Roots
  misc_feature: MA Experiment 20001610 PARAMETER Experiment Name: Zm_50ppm_KNO3_L-to-H_P Parameter: Treatment Value: 50ppm KNO3 vs. 50ppm KCl
aagacaccgttatacgctactgtggttggcgacgcggcgaacatcatactggacccgattttgatgtttgtttgccatatgggcgtcactggtgcggctattgctcatgttgtttctcagtacatgataacgttgatactgctgtgccggctcgtccagcgagttcacgttatcccacccagcattaaatctctgaaatttgggaggtttcttggatgtggattcctgctgctcgcaagggttgtcgcggtgacgttctgcgtcacgctggcggcgtccctggccgctcgccatggacccaccgtcatggcaggcttccagatctgctgccagctctggctggcccacgtctcttctcgccgatggattggccgtggcaggacaggcggtgcttgcaagcgcgttcgccaagaacgacagtaagaaggtcgctgccgcgacatcccgtgtgttgcagctgagcattgtcctgggcatgggtctcaccgtcgtgctgggacttgctatgaggttcggggctggcattttcacaagcgacgtgcccgtgatccaagtcattcacagaggcatcccgtttgtcgccgggacgcagaccatcaattccctggccttcgtgtttgatggcatcaactttggaacgtcagactacagatactctgcttactccatggttgctgttgcgtctgtgtcgataccatgcctgctgtacctttctgcgcataacggattcatcggtatatggatcgcattgacgatctacatgagtctgaggaccatagctagcacctggaggatgggggcagcgaggggaccatggacgtttctccggaactgatgatggattggcttggaactgatgatctgcggcacactgctgacagataaggctgcgccgcgctgcgcatgcgcctctcatgtagcatcagcgaagtatagtacgtgttctgctggtgtttaaagcttcggatatcggaggtagatgtagctatgggactatcccctcctgatcgtctgacttgtggccttgcgtggagagtttacgttgctccgttgatttatgttgtatcatgccaggatgtcagtttaataccatacatcggt

SEQ ID NO: 3659 - protein, 180 aa, Zea mays subsp. mays
  peptide (1)..(180): Ceres Seq. ID no. 12376273
  misc_feature (8)..(175): Homolog of NCBI NO: 21222317 NR Description: putative membrane protein [Streptomyces
  misc_feature (8)..(175): Homolog of NCBI NO: 29830828 NR Description: putative DNA-damage-inducible protein F
  misc_feature (1)..(168): Homolog of NCBI NO: 7487160 NR Description: hypothetical protein At2g38330 [imported] -
  misc_feature (1)..(178): Homolog of NCBI NO: 30687474 NR Description: MATE efflux protein family [Arabidopsis thaliana]
  misc_feature (127)..(168): Homolog of NCBI NO: 20270057 NR Description: Putative membrane protein [Oryza sativa (japonica
  misc_feature (17)..(102): Homolog of NCBI NO: 20270057 NR Description: Putative membrane protein [Oryza sativa (japonica
  misc_feature (17)..(168): Homolog of NCBI NO: 37532300 NR Description: putative membrane protein
  misc_feature (17)..(167): Homolog of NCBI NO: 25405456 NR Description: hypothetical protein F11M15.20 [imported] -
  misc_feature (17)..(126): Homolog of NCBI NO: 19386721 NR Description: P0678F11.10 [Oryza sativa (japonica
  misc_feature (17)..(179): Homolog of NCBI NO: 15231918 NR Description: MATE efflux family protein, putative
MDPPSWQASRSAASSGWPTSLLADGLAVAGQAVLASAFAKNDSKKVAAATSRVLQLSIVLGMGLTVVLGLAMRFGAGIFTSDVPVIQVIHRGIPFVAGTQTINSLAFVFDGINFGTSDYRYSAYSMVAVASVSIPCLLYLSAHNGFIGIWIALTIYMSLRTIASTWRMGAARGPWTFLRN

SEQ ID NO: 3660 - protein, 140 aa, Zea mays subsp. mays
  peptide (1)..(140): Ceres Seq. ID no. 12376274
  misc_feature (1)..(113): Homolog of NCBI NO: 21222317 NR Description: putative membrane protein [Streptomyces
  misc_feature (1)..(113): Homolog of NCBI NO: 29830828 NR Description: putative DNA-damage-inducible protein F
  misc_feature (2)..(115): Homolog of NCBI NO: 18403476 NR Description: expressed protein
  misc_feature (2)..(115): Homolog of NCBI NO: 7487160 NR Description: hypothetical protein At2g38330 [imported] -
  misc_feature (2)..(115): Homolog of NCBI NO: 30687474 NR Description: MATE efflux protein family [Arabidopsis thaliana]
  misc_feature (1)..(115): Homolog of NCBI NO: 20270057 NR Description: Putative membrane protein [Oryza sativa (japonica
  misc_feature (1)..(115): Homolog of NCBI NO: 37532300 NR Description: putative membrane protein
  misc_feature (2)..(115): Homolog of NCBI NO: 25405456 NR Description: hypothetical protein F11M15.20 [imported] -
  misc_feature (1)..(114): Homolog of NCBI NO: 15231918 NR Description: MATE efflux family protein, putative
  misc_feature (1)..(115): Homolog of NCBI NO: 19386721 NR Description: P0678F11.10 [Oryza sativa (japonica
KTPLYATVVGDAANIILDPILMFVCHMGVTGAAIAHVVSQYMITLILLCRLVQRVHVIPPSIKSLKFGRFLGCGFLLLARVVAVTFCVTLAASLAARHGPTVMAGFQICCQLWLAHVSSRRWIGRGRTGGACKRVRQERQ

SEQ ID NO: 3661 - protein, 119 aa, Zea mays subsp. mays
  peptide (1)..(119): Ceres Seq. ID no. 12376275
  misc_feature (1)..(92): Homolog of NCBI NO: 21222317 NR Description: putative membrane protein [Streptomyces
  misc_feature (1)..(92): Homolog of NCBI NO: 29830828 NR Description: putative DNA-damage-inducible protein F
  misc_feature (1)..(94): Homolog of NCBI NO: 18403476 NR Description: expressed protein
  misc_feature (1)..(94): Homolog of NCBI NO: 7487160 NR Description: hypothetical protein At2g38330 [imported] -
  misc_feature (1)..(94): Homolog of NCBI NO: 30687474 NR Description: MATE efflux protein family [Arabidopsis thaliana]
  misc_feature (1)..(94): Homolog of NCBI NO: 20270057 NR Description: Putative membrane protein [Oryza sativa (japonica
  misc_feature (1)..(94): Homolog of NCBI NO: 37532300 NR Description: putative membrane protein
  misc_feature (1)..(94): Homolog of NCBI NO: 25405456 NR Description: hypothetical protein F11M15.20 [imported] -
  misc_feature (1)..(93): Homolog of NCBI NO: 15231918 NR Description: MATE efflux family protein, putative
  misc_feature (1)..(94): Homolog of NCBI NO: 19386721 NR Description: P0678F11.10 [Oryza sativa (japonica
MFVCHMGVTGAAIAHVVSQYMITLILLCRLVQRVHVIPPSIKSLKFGRFLGCGFLLLARVVAVTFCVTLAASLAARHGPTVMAGFQICCQLWLAHVSSRRWIGRGRTGGACKRVRQERQ

SEQ ID NO: 3662 - DNA, 1079 bp, Zea mays subsp. mays
  misc_feature (1)..(1079): Ceres Seq. ID no. 12402285
  misc_feature: MA Experiment ID: 108504 Result: Down-regulated in Transcription
  misc_feature: MA Experiment 108504 PARAMETER Experiment Name: Zm_Drought_P Parameter: Age (day) Value: 8
  misc_feature: MA Experiment 108504 PARAMETER Experiment Name: Zm_Drought_P Parameter: Organism Value: Zea mays
  misc_feature: MA Experiment 108504 PARAMETER Experiment Name: Zm_Drought_P Parameter: Plant Line Value: 35A19
  misc_feature: MA Experiment 108504 PARAMETER Experiment Name: Zm_Drought_P Parameter: Timepoint (hr) Value: 12
  misc_feature: MA Experiment 108504 PARAMETER Experiment Name: Zm_Drought_P Parameter: Tissue Value: Aerial
  misc_feature: MA Experiment 108504 PARAMETER Experiment Name: Zm_Drought_P Parameter: Treatment Value: Drought vs. No Drought
  misc_feature: MA Experiment ID: 108515 Result: Down-regulated in Transcription
  misc_feature: MA Experiment 108515 PARAMETER Experiment Name: Zm_2mM_SA_P Parameter: Age (day) Value: 8
  misc_feature: MA Experiment 108515 PARAMETER Experiment Name: Zm_2mM_SA_P Parameter: Organism Value: Zea mays
  misc_feature: MA Experiment 108515 PARAMETER Experiment Name: Zm_2mM_SA_P Parameter: Plant Line Value: 35A19
  misc_feature: MA Experiment 108515 PARAMETER Experiment Name: Zm_2mM_SA_P Parameter: Timepoint (hr) Value: 12
  misc_feature: MA Experiment 108515 PARAMETER Experiment Name: Zm_2mM_SA_P Parameter: Tissue Value: Aerial
  misc_feature: MA Experiment 108515 PARAMETER Experiment Name: Zm_2mM_SA_P Parameter: Treatment Value: 2mM SA vs. No Treatment
  misc_feature: MA Experiment ID: 108523 Result: Down-regulated in Transcription
  misc_feature: MA Experiment 108523 PARAMETER Experiment Name: Zm_42deg_Heat_P Parameter: Age (day) Value: 8
  misc_feature: MA Experiment 108523 PARAMETER Experiment Name: Zm_42deg_Heat_P Parameter: Organism Value: Zea mays
  misc_feature: MA Experiment 108523 PARAMETER Experiment Name: Zm_42deg_Heat_P Parameter: Plant Line Value: 35A19
  misc_feature: MA Experiment 108523 PARAMETER Experiment Name: Zm_42deg_Heat_P Parameter: Temperature (deg C) Value: 42 vs. 22
  misc_feature: MA Experiment 108523 PARAMETER Experiment Name: Zm_42deg_Heat_P Parameter: Timepoint (hr) Value: 6
  misc_feature: MA Experiment 108523 PARAMETER Experiment Name: Zm_42deg_Heat_P Parameter: Tissue Value: Aerial
  misc_feature: MA Experiment ID: 108528 Result: Up-regulated in Transcription
  misc_feature: MA Experiment 108528 PARAMETER Experiment Name: Zm_Imbibed_Seeds_P Parameter: Age (day) Value: 5 vs. 2
  misc_feature: MA Experiment 108528 PARAMETER Experiment Name: Zm_Imbibed_Seeds_P Parameter: Organism Value: Zea mays
  misc_feature: MA Experiment 108528 PARAMETER Experiment Name: Zm_Imbibed_Seeds_P Parameter: Plant Line Value: 35A19
  misc_feature: MA Experiment 108528 PARAMETER Experiment Name: Zm_Imbibed_Seeds_P Parameter: Tissue Value: Aerial vs. Embryo
  misc_feature: MA Experiment ID: 108530 Result: Up-regulated in Transcription
  misc_feature: MA Experiment 108530 PARAMETER Experiment Name: Zm_Imbibed_Seeds_P Parameter: Age (day) Value: 6 vs. 2
  misc_feature: MA Experiment 108530 PARAMETER Experiment Name: Zm_Imbibed_Seeds_P Parameter: Organism Value: Zea mays
  misc_feature: MA Experiment 108530 PARAMETER Experiment Name: Zm_Imbibed_Seeds_P Parameter: Plant Line Value: 35A19
  misc_feature: MA Experiment 108530 PARAMETER Experiment Name: Zm_Imbibed_Seeds_P Parameter: Tissue Value: Aerial vs. Embryo
  misc_feature: MA Experiment ID: 108536 Result: Down-regulated in Transcription
  misc_feature: MA Experiment 108536 PARAMETER Experiment Name: Zm_Meristem_P Parameter: Age (day) Value: 8
  misc_feature: MA Experiment 108536 PARAMETER Experiment Name: Zm_Meristem_P Parameter: Organism Value: Zea mays
  misc_feature: MA Experiment 108536 PARAMETER Experiment Name: Zm_Meristem_P Parameter: Plant Line Value: 35A19
  misc_feature: MA Experiment 108536 PARAMETER Experiment Name: Zm_Meristem_P Parameter: Tissue Value: Shoot Meristem vs. Above Shoot Meristem
  misc_feature: MA Experiment ID: 108540 Result: Down-regulated in Transcription
  misc_feature: MA Experiment 108540 PARAMETER Experiment Name: Zm_20percent_PEG_P Parameter: Age (day) Value: 8
  misc_feature: MA Experiment 108540 PARAMETER Experiment Name: Zm_20percent_PEG_P Parameter: Organism Value: Zea mays
  misc_feature: MA Experiment 108540 PARAMETER Experiment Name: Zm_20percent_PEG_P Parameter: Plant Line Value: 35A19
  misc_feature: MA Experiment 108540 PARAMETER Experiment Name: Zm_20percent_PEG_P Parameter: Timepoint (hr) Value: 6
  misc_feature: MA Experiment 108540 PARAMETER Experiment Name: Zm_20percent_PEG_P Parameter: Tissue Value: Aerial
  misc_feature: MA Experiment 108540 PARAMETER Experiment Name: Zm_20percent_PEG_P Parameter: Treatment Value: 20percent PEG vs. No Treatment
  misc_feature: MA Experiment ID: 108545 Result: Up-regulated in Transcription
  misc_feature: MA Experiment 108545 PARAMETER Experiment Name: Zm_Imbibed_Seeds_P Parameter: Age (day) Value: 3 vs. 2
  misc_feature: MA Experiment 108545 PARAMETER Experiment Name: Zm_Imbibed_Seeds_P Parameter: Organism Value: Zea mays
  misc_feature: MA Experiment 108545 PARAMETER Experiment Name: Zm_Imbibed_Seeds_P Parameter: Plant Line Value: 35A19
  misc_feature: MA Experiment 108545 PARAMETER Experiment Name: Zm_Imbibed_Seeds_P Parameter: Tissue Value: Aerial vs. Embryo
  misc_feature: MA Experiment ID: 108547 Result: Up-regulated in Transcription
  misc_feature: MA Experiment 108547 PARAMETER Experiment Name: Zm_Imbibed_Seeds_P Parameter: Age (day) Value: 4 vs. 2
  misc_feature: MA Experiment 108547 PARAMETER Experiment Name: Zm_Imbibed_Seeds_P Parameter: Organism Value: Zea mays
  misc_feature: MA Experiment 108547 PARAMETER Experiment Name: Zm_Imbibed_Seeds_P Parameter: Plant Line Value: 35A19
  misc_feature: MA Experiment 108547 PARAMETER Experiment Name: Zm_Imbibed_Seeds_P Parameter: Tissue Value: Aerial vs. Embryo
  misc_feature: MA Experiment ID: 108556 Result: Down-regulated in Transcription
  misc_feature: MA Experiment 108556 PARAMETER Experiment Name: Zm_Drought_P Parameter: Age (day) Value: 9
  misc_feature: MA Experiment 108556 PARAMETER Experiment Name: Zm_Drought_P Parameter: Organism Value: Zea mays
  misc_feature: MA Experiment 108556 PARAMETER Experiment Name: Zm_Drought_P Parameter: Plant Line Value: 35A19
  misc_feature: MA Experiment 108556 PARAMETER Experiment Name: Zm_Drought_P Parameter: Timepoint (hr) Value: 24
  misc_feature: MA Experiment 108556 PARAMETER Experiment Name: Zm_Drought_P Parameter: Tissue Value: Aerial
  misc_feature: MA Experiment 108556 PARAMETER Experiment Name: Zm_Drought_P Parameter: Treatment Value: Drought vs. No Drought
  misc_feature: MA Experiment ID: 108597 Result: Down-regulated in Transcription
  misc_feature: MA Experiment 108597 PARAMETER Experiment Name: Zm_100uM_ABA_P Parameter: Age (day) Value: 9
  misc_feature: MA Experiment 108597 PARAMETER Experiment Name: Zm_100uM_ABA_P Parameter: Organism Value: Zea mays
  misc_feature: MA Experiment 108597 PARAMETER Experiment Name: Zm_100uM_ABA_P Parameter: Plant Line Value: 35A19
  misc_feature: MA Experiment 108597 PARAMETER Experiment Name: Zm_100uM_ABA_P Parameter: Timepoint (hr) Value: 24
  misc_feature: MA Experiment 108597 PARAMETER Experiment Name: Zm_100uM_ABA_P Parameter: Tissue Value: Aerial
  misc_feature: MA Experiment 108597 PARAMETER Experiment Name: Zm_100uM_ABA_P Parameter: Treatment Value: 100uM ABA vs. No Treatment
  misc_feature: MA Experiment ID: 108689 Result: Up-regulated in Transcription
  misc_feature: MA Experiment 108689 PARAMETER Experiment Name: Zm_Drought_Roots_P Parameter: Age (day) Value: 9
  misc_feature: MA Experiment 108689 PARAMETER Experiment Name: Zm_Drought_Roots_P Parameter: Organism Value: Zea mays
  misc_feature: MA Experiment 108689 PARAMETER Experiment Name: Zm_Drought_Roots_P Parameter: Plant Line Value: 35A19
  misc_feature: MA Experiment 108689 PARAMETER Experiment Name: Zm_Drought_Roots_P Parameter: Timepoint (hr) Value: 24
  misc_feature: MA Experiment 108689 PARAMETER Experiment Name: Zm_Drought_Roots_P Parameter: Tissue Value: Roots
  misc_feature: MA Experiment 108689 PARAMETER Experiment Name: Zm_Drought_Roots_P Parameter: Treatment Value: Drought vs. No Drought
  misc_feature: MA Experiment ID: 20000477 Result: Down-regulated in Transcription
  misc_feature: MA Experiment 20000477 PARAMETER Experiment Name: Zm_5mM_SA_P Parameter: Age (day) Value: 10
  misc_feature: MA Experiment 20000477 PARAMETER Experiment Name: Zm_5mM_SA_P Parameter: Organism Value: Zea mays
  misc_feature: MA Experiment 20000477 PARAMETER Experiment Name: Zm_5mM_SA_P Parameter: Plant Line Value: 35A19
  misc_feature: MA Experiment 20000477 PARAMETER Experiment Name: Zm_5mM_SA_P Parameter: Timepoint (hr) Value: 48
  misc_feature: MA Experiment 20000477 PARAMETER Experiment Name: Zm_5mM_SA_P Parameter: Tissue Value: Aerial
  misc_feature: MA Experiment 20000477 PARAMETER Experiment Name: Zm_5mM_SA_P Parameter: Treatment Value: 5mM SA vs. No Treatment
  misc_feature: MA Experiment ID: 20000478 Result: Down-regulated in Transcription
  misc_feature: MA Experiment 20000478 PARAMETER Experiment Name: Zm_5mM_SA_P Parameter: Age (day) Value: 11
  misc_feature: MA Experiment 20000478 PARAMETER Experiment Name: Zm_5mM_SA_P Parameter: Organism Value: Zea mays
  misc_feature: MA Experiment 20000478 PARAMETER Experiment Name: Zm_5mM_SA_P Parameter: Plant Line Value: 35A19
  misc_feature: MA Experiment 20000478 PARAMETER Experiment Name: Zm_5mM_SA_P Parameter: Timepoint (hr) Value: 72
  misc_feature: MA Experiment 20000478 PARAMETER Experiment Name: Zm_5mM_SA_P Parameter: Tissue Value: Aerial
  misc_feature: MA Experiment 20000478 PARAMETER Experiment Name: Zm_5mM_SA_P Parameter: Treatment Value: 5mM SA vs. No Treatment
  misc_feature: MA Experiment ID: 20000480 Result: Down-regulated in Transcription
  misc_feature: MA Experiment 20000480 PARAMETER Experiment Name: Zm_Drought_P Parameter: Age (day) Value: 11
  misc_feature: MA Experiment 20000480 PARAMETER Experiment Name: Zm_Drought_P Parameter: Organism Value: Zea mays
  misc_feature: MA Experiment 20000480 PARAMETER Experiment Name: Zm_Drought_P Parameter: Plant Line Value: 35A19
  misc_feature: MA Experiment 20000480 PARAMETER Experiment Name: Zm_Drought_P Parameter: Timepoint (hr) Value: 72
  misc_feature: MA Experiment 20000480 PARAMETER Experiment Name: Zm_Drought_P Parameter: Tissue Value: Aerial
  misc_feature: MA Experiment 20000480 PARAMETER Experiment Name: Zm_Drought_P Parameter: Treatment Value: Drought vs. No Drought
  misc_feature: MA Experiment ID: 20000488 Result: Down-regulated in Transcription
  misc_feature: MA Experiment 20000488 PARAMETER Experiment Name: Zm_50mM_NH4NO3_L_to_H_P Parameter: Organism Value: Zea mays
  misc_feature: MA Experiment 20000488 PARAMETER Experiment Name: Zm_50mM_NH4NO3_L_to_H_P Parameter: Timepoint (hr) Value: 8
  misc_feature: MA Experiment 20000488 PARAMETER Experiment Name: Zm_50mM_NH4NO3_L_to_H_P Parameter: Tissue Value: Leaves
  misc_feature: MA Experiment 20000488 PARAMETER Experiment Name: Zm_50mM_NH4NO3_L_to_H_P Parameter: Treatment Value: 50mM NH4NO3 vs. 100mM Mannitol
  misc_feature: MA Experiment ID: 20000532 Result: Down-regulated in Transcription
  misc_feature: MA Experiment 20000532 PARAMETER Experiment Name: Zm_0.001percent_MeJA_P Parameter: Age (day) Value: 10
  misc_feature: MA Experiment 20000532 PARAMETER Experiment Name: Zm_0.001percent_MeJA_P Parameter: Organism Value: Zea mays
  misc_feature: MA Experiment 20000532 PARAMETER Experiment Name: Zm_0.001percent_MeJA_P Parameter: Plant Line Value: 35A19
  misc_feature: MA Experiment 20000532 PARAMETER Experiment Name: Zm_0.001percent_MeJA_P Parameter: Timepoint (hr) Value: 48
  misc_feature: MA Experiment 20000532 PARAMETER Experiment Name: Zm_0.001percent_MeJA_P Parameter: Tissue Value: Aerial
  misc_feature: MA Experiment 20000532 PARAMETER Experiment Name: Zm_0.001percent_MeJA_P Parameter: Treatment Value: 0.001percent MeJA vs. No Treatment
  misc_feature: MA Experiment ID: 20000533 Result: Down-regulated in Transcription
  misc_feature: MA Experiment 20000533 PARAMETER Experiment Name: Zm_0.001percent_MeJA_P Parameter: Age (day) Value: 11
  misc_feature: MA Experiment 20000533 PARAMETER Experiment Name: Zm_0.001percent_MeJA_P Parameter: Organism Value: Zea mays
  misc_feature: MA Experiment 20000533 PARAMETER Experiment Name: Zm_0.001percent_MeJA_P Parameter: Plant Line Value: 35A19
  misc_feature: MA Experiment 20000533 PARAMETER Experiment Name: Zm_0.001percent_MeJA_P Parameter: Timepoint (hr) Value: 72
  misc_feature: MA Experiment 20000533 PARAMETER Experiment Name: Zm_0.001percent_MeJA_P Parameter: Tissue Value: Aerial
  misc_feature: MA Experiment 20000533 PARAMETER Experiment Name: Zm_0.001percent_MeJA_P Parameter: Treatment Value: 0.001percent MeJA vs. No Treatment
  misc_feature: MA Experiment ID: 20000534 Result: Down-regulated in Transcription
  misc_feature: MA Experiment 20000534 PARAMETER Experiment Name: Zm_Hybrid_Pollen_P Parameter: Age (day) Value: 8
  misc_feature: MA Experiment 20000534 PARAMETER Experiment Name: Zm_Hybrid_Pollen_P Parameter: Organism Value: Zea mays
  misc_feature: MA Experiment 20000534 PARAMETER Experiment Name: Zm_Hybrid_Pollen_P Parameter: Plant Line Value: 35A19
  misc_feature: MA Experiment 20000534 PARAMETER Experiment Name: Zm_Hybrid_Pollen_P Parameter: Tissue Value: Pollen vs. Aerial
  misc_feature: MA Experiment ID: 20000626 Result: Down-regulated in Transcription
  misc_feature: MA Experiment 20000626 PARAMETER Experiment Name: Zm_Herbicide-Treatments_P Parameter: Timepoint (hr) Value: 12
  misc_feature: MA Experiment 20000626 PARAMETER Experiment Name: Zm_Herbicide-Treatments_P Parameter: Tissue Value: Aerial
  misc_feature: MA Experiment 20000626 PARAMETER Experiment Name: Zm_Herbicide-Treatments_P Parameter: Treatment Value: Roundup vs. No Treatment
  misc_feature: MA Experiment ID: 20000630 Result: Down-regulated in Transcription
  misc_feature: MA Experiment 20000630 PARAMETER Experiment Name: Zm_Herbicide-Treatments_P Parameter: Timepoint (hr) Value: 4
  misc_feature: MA Experiment 20000630 PARAMETER Experiment Name: Zm_Herbicide-Treatments_P Parameter: Tissue Value: Aerial
  misc_feature: MA Experiment 20000630 PARAMETER Experiment Name: Zm_Herbicide-Treatments_P Parameter: Treatment Value: Roundup vs. No Treatment
agctctcacccatccacgtcttctcattcctcgacaatggagatccaggcacgacagctactggtgtctgtttttggcattctgatagcgataggtttcgccaatgccgcgctgggagagacagcaccgccggttgttgtcggcttggccaagtgctcggactgcgccaggaggaacatgaacgccgaggcagctttcagaggtcttcaggtggccatcaagtgcaagaacagcaagggggcctacgagagcgcagccgtgggacaggtgaacaagtccggggccttcagcgtcccgctggccgccgacgccgtcggcgaggacggggagctcaagtcggaatgcttcgcgcagctcatccacagcgcgtcgagtgcgccgtgccccgggcaggagccctccaggatcgtcgccgcgccacccggccacacggcccacaccaacggcaacgggaagacgttcctcgcgctcggcggcagggtctaccaaccgtcgcccgaatgcgcctcggcgttcctctgccaccctttcttccacagcatgcaccaccatcacgtaggagtccacacgcctgtggttatcccgcacctgcccgttcacggccactccgtgccgcctgtcaccaagccgccgccggtagacgttcctgagcacaaaccggcgccggtgcccgtgccggaccacaagcctccgtcgacgccgccggtagacgctcctgagcacaaaccggcgccggtgcccgagccggagcacaagcctccgtcgacgccggcgaacgctgcaccgtcgacgcccacggagccgtcagcgccggttaattcgccgccgaagccagcccccatctaccacccaccggcaaggcacgacgctgccactggcccgtagctcttcaagaggctgctcccgttcttcaagaagttgcccttctttcctccttctgcgatggagagtcagcactagaatgtttggacagtgtttcttggcttttgcaggttatgcagtttcctcggaataatttgtgacgttgattagttcagcatgaacgttgggtcagtttaagagtgtgtgttctacttccg

SEQ ID NO: 3663 - protein, 294 aa, Zea mays subsp. mays
  peptide (1)..(294): Ceres Seq. ID no. 12402286
  misc_feature (141)..(280): Pfam Name: Amelogenin Pfam Description: Amelogenin
  misc_feature (20)..(142): Homolog of NCBI NO: 37531090 NR Description: putative proline-rich protein
  misc_feature (17)..(201): Homolog of NCBI NO: 37531076 NR Description: putative proline-rich protein
  misc_feature (17)..(201): Homolog of NCBI NO: 37531070 NR Description: putative proline-rich protein
  misc_feature (13)..(201): Homolog of NCBI NO: 37531074 NR Description: putative proline-rich protein
  misc_feature (20)..(259): Homolog of NCBI NO: 37531088 NR Description: putative proline-rich protein
  misc_feature (13)..(201): Homolog of NCBI NO: 37531082 NR Description: putative proline-rich protein
  misc_feature (13)..(211): Homolog of NCBI NO: 37531080 NR Description: putative proline-rich protein
  misc_feature (26)..(286): Homolog of NCBI NO: 37531064 NR Description: putative proline-rich protein
  misc_feature (18)..(288): Homolog of NCBI NO: 6689616 NR Description: proline-rich protein [Zea mays]
  misc_feature (18)..(253): Homolog of NCBI NO: 37531058 NR Description: putative proline-rich protein
SSHPSTSSHSSTMEIQARQLLVSVFGILIAIGFANAALGETAPPVVVGLAKCSDCARRNMNAEAAFRGLQVAIKCKNSKGAYESAAVGQVNKSGAFSVPLAADAVGEDGELKSECFAQLIHSASSAPCPGQEPSRIVAAPPGHTAHTNGNGKTFLALGGRVYQPSPECASAFLCHPFFHSMHHHHVGVHTPVVIPHLPVHGHSVPPVTKPPPVDVPEHKPAPVPVPDHKPPSTPPVDAPEHKPAPVPEPEHKPPSTPANAAPSTPTEPSAPVNSPPKPAPIYHPPARHDAATGP

SEQ ID NO: 3664 - protein, 282 aa, Zea mays subsp. mays
  peptide (1)..(282): Ceres Seq. ID no. 12402287
  misc_feature (129)..(268): Pfam Name: Amelogenin Pfam Description: Amelogenin
  misc_feature (1)..(189): Homolog of NCBI NO: 37531074 NR Description: putative proline-rich protein
  misc_feature (8)..(247): Homolog of NCBI NO: 37531088 NR Description: putative proline-rich protein
  misc_feature (1)..(189): Homolog of NCBI NO: 37531082 NR Description: putative proline-rich protein
  misc_feature (1)..(199): Homolog of NCBI NO: 37531080 NR Description: putative proline-rich protein
  misc_feature (5)..(189): Homolog of NCBI NO: 37531076 NR Description: putative proline-rich protein
  misc_feature (5)..(189): Homolog of NCBI NO: 37531070 NR Description: putative proline-rich protein
  misc_feature (8)..(130): Homolog of NCBI NO: 37531090 NR Description: putative proline-rich protein
  misc_feature (14)..(274): Homolog of NCBI NO: 37531064 NR Description: putative proline-rich protein
  misc_feature (6)..(276): Homolog of NCBI NO: 6689616 NR Description: proline-rich protein [Zea mays]
  misc_feature (6)..(241): Homolog of NCBI NO: 37531058 NR Description: putative proline-rich protein
MEIQARQLLVSVFGILIAIGFANAALGETAPPVVVGLAKCSDCARRNMNAEAAFRGLQVAIKCKNSKGAYESAAVGQVNKSGAFSVPLAADAVGEDGELKSECFAQLIHSASSAPCPGQEPSRIVAAPPGHTAHTNGNGKTFLALGGRVYQPSPECASAFLCHPFFHSMHHHHVGVHTPVVIPHLPVHGHSVPPVTKPPPVDVPEHKPAPVPVPDHKPPSTPPVDAPEHKPAPVPEPEHKPPSTPANAAPSTPTEPSAPVNSPPKPAPIYHPPARHDAATGP

SEQ ID NO: 3665 - protein, 235 aa, Zea mays subsp. mays
  peptide (1)..(235): Ceres Seq. ID no. 12402288
  misc_feature (82)..(221): Pfam Name: Amelogenin Pfam Description: Amelogenin
  misc_feature (1)..(83): Homolog of NCBI NO: 37531090 NR Description: putative proline-rich protein
  misc_feature (1)..(142): Homolog of NCBI NO: 37531076 NR Description: putative proline-rich protein
  misc_feature (1)..(142): Homolog of NCBI NO: 37531070 NR Description: putative proline-rich protein
  misc_feature (1)..(142): Homolog of NCBI NO: 37531074 NR Description: putative proline-rich protein
  misc_feature (1)..(200): Homolog of NCBI NO: 37531088 NR Description: putative proline-rich protein
  misc_feature (1)..(142): Homolog of NCBI NO: 37531082 NR Description: putative proline-rich protein
  misc_feature (1)..(152): Homolog of NCBI NO: 37531080 NR Description: putative proline-rich protein
  misc_feature (1)..(227): Homolog of NCBI NO: 37531064 NR Description: putative proline-rich protein
  misc_feature (1)..(229): Homolog of NCBI NO: 6689616 NR Description: proline-rich protein [Zea mays]
  misc_feature (1)..(194): Homolog of NCBI NO: 37531058 NR Description: putative proline-rich protein
MNAEAAFRGLQVAIKCKNSKGAYESAAVGQVNKSGAFSVPLAADAVGEDGELKSECFAQLIHSASSAPCPGQEPSRIVAAPPGHTAHTNGNGKTFLALGGRVYQPSPECASAFLCHPFFHSMHHHHVGVHTPVVIPHLPVHGHSVPPVTKPPPVDVPEHKPAPVPVPDHKPPSTPPVDAPEHKPAPVPEPEHKPPSTPANAAPSTPTEPSAPVNSPPKPAPIYHPPARHDAATGP

SEQ ID NO: 3666 - DNA, 1297 bp, Zea mays subsp. mays
  misc_feature (1)..(1297): Ceres Seq. ID no. 12401906
  misc_feature: MA Experiment ID: 108522 Result: Up-regulated in Transcription
  misc_feature: MA Experiment 108522 PARAMETER Experiment Name: Zm_42deg_Heat_P Parameter: Age (day) Value: 8
  misc_feature: MA Experiment 108522 PARAMETER Experiment Name: Zm_42deg_Heat_P Parameter: Organism Value: Zea mays
  misc_feature: MA Experiment 108522 PARAMETER Experiment Name: Zm_42deg_Heat_P Parameter: Plant Line Value: 35A19
  misc_feature: MA Experiment 108522 PARAMETER Experiment Name: Zm_42deg_Heat_P Parameter: Temperature (deg C) Value: 42 vs. 22
  misc_feature: MA Experiment 108522 PARAMETER Experiment Name: Zm_42deg_Heat_P Parameter: Timepoint (hr) Value: 1
  misc_feature: MA Experiment 108522 PARAMETER Experiment Name: Zm_42deg_Heat_P Parameter: Tissue Value: Aerial
gcacgagaccattacctagaacatcctaatcgaaaaactcgcatcgcagcgcactcgcgccacagtcggcatcacagaccagatccctgcgggtgcggcggccatggccgagaacttccagctgcagggccggcacggcaagtcccgcgtccgcgtctcccgcgtctggcgccgcccggccgcggcggggggcgacgtcatcgttgagtggaacgtcgccgtcagtatcgtctccgactgcctcccctcctacacctccagcgacaactccgccatcgtcgccacagattccatcaagaacaccgtgtatgtcaaggcgaaagagtgcacggaagtggttgtccatggaggaattcgccgtgattcttggaaggcatttcacctcgctgtaccctcaggttacagaggccacggtgactatcgtggagcgcccatgggagcgtgtgactgtcgacggaaagcctcattcgcatgggttcaaagttggtgttgagaagcacagcacagaggtcattgtaaaaaaatctggaagcctgcttataaattctggaattcaaggatactcgctgctaaagacaactcagtctgggtttgaagggttcgtgacggatcgctataggcttcttcctgatacaagggaaaggatagtagcaacagaagtaactgcttggtggaggtatccctttgaacatgtttcgcagctcccatcgaagccattctgcttcacgcagagataccaggacgtaaagaaagtccttgcagagacgttctttggtcctccggatgttggtgtgtatagtccatccgtacaaaatacgctatacctcatggccaaggaagtccttacaaggttcccagatatatcgtcagtccagcttagaatgccgaaccttcactttctgcctgtcaacttggggaccaaagaagctccgctggtgaagtttgctgatgatgtgtacctgccgacggacgaaccacacgggaccattgaagcaaccttgagccgtcccatgtcaaagctgtaaaaaaatttgtagtcgtcaggctgatattagactcctgcttcgtctccccagcattcccaggctaaaatggacagtaagctgtaagggaaagataaactatcataaatcgtagcccctatgctttacgtggtggtggtaataagtgcacaaacttgtattggatgttgtcagctgtagcctgtaggcgtccagcttgtgacgtttcgccactgtaatcgtgtacattgctcgtcttgtgtggaaaccagttaatatctttggaagctttgctc

SEQ ID NO: 3667 - protein, 238 aa, Zea mays subsp. mays
  peptide (1)..(238): Ceres Seq. ID no. 12401907
  misc_feature (77)..(229): Pfam Name: Uricase Pfam Description: Uricase
  misc_feature (2)..(238): Homolog of NCBI NO: 81803 NR Description: urate oxidase (EC 1.7.3.3) - soybean
  misc_feature (2)..(238): Homolog of NCBI NO: 170033 NR Description: uricase II subunit
  misc_feature (2)..(238): Homolog of NCBI NO: 11414898 NR Description: uricase [Lotus japonicus]
  misc_feature (2)..(238): Homolog of NCBI NO: 170031 NR Description: nodulin 35
  misc_feature (2)..(238): Homolog of NCBI NO: 6175091 NR Description: Uricase II (Urate oxidase) (Nodule specific
  misc_feature (3)..(238): Homolog of NCBI NO: 34908558 NR Description: putative uricase [Oryza sativa (japonica
MSRRKSARKWLSMEEFAVILGRHFTSLYPQVTEATVTIVERPWERVTVDGKPHSHGFKVGVEKHSTEVIVKKSGSLLINSGIQGYSLLKTTQSGFEGFVTDRYRLLPDTRERIVATEVTAWWRYPFEHVSQLPSKPFCFTQRYQDVKKVLAETFFGPPDVGVYSPSVQNTLYLMAKEVLTRFPDISSVQLRMPNLHFLPVNLGTKEAPLVKFADDVYLPTDEPHGTIEATLSRPMSKL

SEQ ID NO: 3668 - protein, 226 aa, Zea mays subsp. mays
  peptide (1)..(226): Ceres Seq. ID no. 12401908
  misc_feature (65)..(217): Pfam Name: Uricase Pfam Description: Uricase
  misc_feature (1)..(226): Homolog of NCBI NO: 81803 NR Description: urate oxidase (EC 1.7.3.3) - soybean
  misc_feature (1)..(226): Homolog of NCBI NO: 170033 NR Description: uricase II subunit
  misc_feature (1)..(226): Homolog of NCBI NO: 11414898 NR Description: uricase [Lotus japonicus]
  misc_feature (1)..(226): Homolog of NCBI NO: 170031 NR Description: nodulin 35
  misc_feature (1)..(226): Homolog of NCBI NO: 6175091 NR Description: Uricase II (Urate oxidase) (Nodule specific
  misc_feature (1)..(226): Homolog of NCBI NO: 34908558 NR Description: putative uricase [Oryza sativa (japonica
MEEFAVILGRHFTSLYPQVTEATVTIVERPWERVTVDGKPHSHGFKVGVEKHSTEVIVKKSGSLLINSGIQGYSLLKTTQSGFEGFVTDRYRLLPDTRERIVATEVTAWWRYPFEHVSQLPSKPFCFTQRYQDVKKVLAETFFGPPDVGVYSPSVQNTLYLMAKEVLTRFPDISSVQLRMPNLHFLPVNLGTKEAPLVKFADDVYLPTDEPHGTIEATLSRPMSKL

SEQ ID NO: 3669 - protein, 129 aa, Zea mays subsp. mays
  peptide (1)..(129): Ceres Seq. ID no. 12401909
  misc_feature (1)..(79): Homolog of NCBI NO: 81803 NR Description: urate oxidase (EC 1.7.3.3) - soybean
  misc_feature (1)..(79): Homolog of NCBI NO: 170033 NR Description: uricase II subunit
  misc_feature (1)..(79): Homolog of NCBI NO: 11414898 NR Description: uricase [Lotus japonicus]
  misc_feature (1)..(79): Homolog of NCBI NO: 170031 NR Description: nodulin 35
  misc_feature (1)..(79): Homolog of NCBI NO: 6175091 NR Description: Uricase II (Urate oxidase) (Nodule specific
  misc_feature (1)..(79): Homolog of NCBI NO: 34908558 NR Description: putative uricase [Oryza sativa (japonica
MAENFQLQGRHGKSRVRVSRVWRRPAAAGGDVIVEWNVAVSIVSDCLPSYTSSDNSAIVATDSIKNTVYVKAKECTEVVVHGGIRRDSWKAFHLAVPSGYRGHGDYRGAPMGACDCRRKASFAWVQSWC

SEQ ID NO: 3670 - DNA, 943 bp, Zea mays subsp. mays
  misc_feature (1)..(943): Ceres Seq. ID no. 13498278
  misc_feature: MA Experiment ID: 108527 Result: Up-regulated in Transcription
  misc_feature: MA Experiment 108527 PARAMETER Experiment Name: Zm_5mM_NO_P Parameter: Age (day) Value: 8
  misc_feature: MA Experiment 108527 PARAMETER Experiment Name: Zm_5mM_NO_P Parameter: Organism Value: Zea mays
  misc_feature: MA Experiment 108527 PARAMETER Experiment Name: Zm_5mM_NO_P Parameter: Plant Line Value: 35A19
  misc_feature: MA Experiment 108527 PARAMETER Experiment Name: Zm_5mM_NO_P Parameter: Timepoint (hr) Value: 6
  misc_feature: MA Experiment 108527 PARAMETER Experiment Name: Zm_5mM_NO_P Parameter: Tissue Value: Aerial
  misc_feature: MA Experiment 108527 PARAMETER Experiment Name: Zm_5mM_NO_P Parameter: Treatment Value: 5mM NO vs. No Treatment
  misc_feature: MA Experiment ID: 108528 Result: Down-regulated in Transcription
  misc_feature: MA Experiment 108528 PARAMETER Experiment Name: Zm_Imbibed_Seeds_P Parameter: Age (day) Value: 5 vs. 2
  misc_feature: MA Experiment 108528 PARAMETER Experiment Name: Zm_Imbibed_Seeds_P Parameter: Organism Value: Zea mays
  misc_feature: MA Experiment 108528 PARAMETER Experiment Name: Zm_Imbibed_Seeds_P Parameter: Plant Line Value: 35A19
  misc_feature: MA Experiment 108528 PARAMETER Experiment Name: Zm_Imbibed_Seeds_P Parameter: Tissue Value: Aerial vs. Embryo
  misc_feature: MA Experiment ID: 108542 Result: Up-regulated in Transcription
  misc_feature: MA Experiment 108542 PARAMETER Experiment Name: Zm_150mM_NaCl_P Parameter: Age (day) Value: 8
  misc_feature: MA Experiment 108542 PARAMETER Experiment Name: Zm_150mM_NaCl_P Parameter: Organism Value: Zea mays
  misc_feature: MA Experiment 108542 PARAMETER Experiment Name: Zm_150mM_NaCl_P Parameter: Plant Line Value: 35A19
  misc_feature: MA Experiment 108542 PARAMETER Experiment Name: Zm_150mM_NaCl_P Parameter: Timepoint (hr) Value: 6
  misc_feature: MA Experiment 108542 PARAMETER Experiment Name: Zm_150mM_NaCl_P Parameter: Tissue Value: Aerial
  misc_feature: MA Experiment 108542 PARAMETER Experiment Name: Zm_150mM_NaCl_P Parameter: Treatment Value: 150mM NaCl vs. No Treatment
  misc_feature: MA Experiment ID: 108543 Result: Down-regulated in Transcription
  misc_feature: MA Experiment ID: 108545 Result: Down-regulated in Transcription
  misc_feature: MA Experiment 108545 PARAMETER Experiment Name: Zm_Imbibed_Seeds_P Parameter: Age (day) Value: 3 vs. 2
  misc_feature: MA Experiment 108545 PARAMETER Experiment Name: Zm_Imbibed_Seeds_P Parameter: Organism Value: Zea mays
  misc_feature: MA Experiment 108545 PARAMETER Experiment Name: Zm_Imbibed_Seeds_P Parameter: Plant Line Value: 35A19
  misc_feature: MA Experiment 108545 PARAMETER Experiment Name: Zm_Imbibed_Seeds_P Parameter: Tissue Value: Aerial vs. Embryo
  misc_feature: MA Experiment ID: 108547 Result: Down-regulated in Transcription
  misc_feature: MA Experiment 108547 PARAMETER Experiment Name: Zm_Imbibed_Seeds_P Parameter: Age (day) Value: 4 vs. 2
  misc_feature: MA Experiment 108547 PARAMETER Experiment Name: Zm_Imbibed_Seeds_P Parameter: Organism Value: Zea mays
  misc_feature: MA Experiment 108547 PARAMETER Experiment Name: Zm_Imbibed_Seeds_P Parameter: Plant Line Value: 35A19
  misc_feature: MA Experiment 108547 PARAMETER Experiment Name: Zm_Imbibed_Seeds_P Parameter: Tissue Value: Aerial vs. Embryo
  misc_feature: MA Experiment ID: 108556 Result: Up-regulated in Transcription
  misc_feature: MA Experiment 108556 PARAMETER Experiment Name: Zm_Drought_P Parameter: Age (day) Value: 9
  misc_feature: MA Experiment 108556 PARAMETER Experiment Name: Zm_Drought_P Parameter: Organism Value: Zea mays
  misc_feature: MA Experiment 108556 PARAMETER Experiment Name: Zm_Drought_P Parameter: Plant Line Value: 35A19
  misc_feature: MA Experiment 108556 PARAMETER Experiment Name: Zm_Drought_P Parameter: Timepoint (hr) Value: 24
  misc_feature: MA Experiment 108556 PARAMETER Experiment Name: Zm_Drought_P Parameter: Tissue Value: Aerial
  misc_feature: MA Experiment 108556 PARAMETER Experiment Name: Zm_Drought_P Parameter: Treatment Value: Drought vs. No Drought
  misc_feature: MA Experiment ID: 108597 Result: Up-regulated in Transcription
  misc_feature: MA Experiment 108597 PARAMETER Experiment Name: Zm_100uM_ABA_P Parameter: Age (day) Value: 9
  misc_feature: MA Experiment 108597 PARAMETER Experiment Name: Zm_100uM_ABA_P Parameter: Organism Value: Zea mays
  misc_feature: MA Experiment 108597 PARAMETER Experiment Name: Zm_100uM_ABA_P Parameter: Plant Line Value: 35A19
  misc_feature: MA Experiment 108597 PARAMETER Experiment Name: Zm_100uM_ABA_P Parameter: Timepoint (hr) Value: 24
  misc_feature: MA Experiment 108597 PARAMETER Experiment Name: Zm_100uM_ABA_P Parameter: Tissue Value: Aerial
  misc_feature: MA Experiment 108597 PARAMETER Experiment Name: Zm_100uM_ABA_P Parameter: Treatment Value: 100uM ABA vs. No Treatment
  misc_feature: MA Experiment ID: 20000479 Result: Up-regulated in Transcription
  misc_feature: MA Experiment 20000479 PARAMETER Experiment Name: Zm_Drought_P Parameter: Age (day) Value: 10
  misc_feature: MA Experiment 20000479 PARAMETER Experiment Name: Zm_Drought_P Parameter: Organism Value: Zea mays
  misc_feature: MA Experiment 20000479 PARAMETER Experiment Name: Zm_Drought_P Parameter: Plant Line Value: 35A19
  misc_feature: MA Experiment 20000479 PARAMETER Experiment Name: Zm_Drought_P Parameter: Timepoint (hr) Value: 48
  misc_feature: MA Experiment 20000479 PARAMETER Experiment Name: Zm_Drought_P Parameter: Tissue Value: Aerial
  misc_feature: MA Experiment 20000479 PARAMETER Experiment Name: Zm_Drought_P Parameter: Treatment Value: Drought vs. No Drought
  misc_feature: MA Experiment ID: 20000532 Result: Up-regulated in Transcription
  misc_feature: MA Experiment 20000532 PARAMETER Experiment Name: Zm_0.001percent_MeJA_P Parameter: Age (day) Value: 10
  misc_feature: MA Experiment 20000532 PARAMETER Experiment Name: Zm_0.001percent_MeJA_P Parameter: Organism Value: Zea mays
  misc_feature: MA Experiment 20000532 PARAMETER Experiment Name: Zm_0.001percent_MeJA_P Parameter: Plant Line Value: 35A19
  misc_feature: MA Experiment 20000532 PARAMETER Experiment Name: Zm_0.001percent_MeJA_P Parameter: Timepoint (hr) Value: 48
  misc_feature: MA Experiment 20000532 PARAMETER Experiment Name: Zm_0.001percent_MeJA_P Parameter: Tissue Value: Aerial
  misc_feature: MA Experiment 20000532 PARAMETER Experiment Name: Zm_0.001percent_MeJA_P Parameter: Treatment Value: 0.001percent MeJA vs. No Treatment
  misc_feature: MA Experiment ID: 20000533 Result: Up-regulated in Transcription
  misc_feature: MA Experiment 20000533 PARAMETER Experiment Name: Zm_0.001percent_MeJA_P Parameter: Age (day) Value: 11
  misc_feature: MA Experiment 20000533 PARAMETER Experiment Name: Zm_0.001percent_MeJA_P Parameter: Organism Value: Zea mays
  misc_feature: MA Experiment 20000533 PARAMETER Experiment Name: Zm_0.001percent_MeJA_P Parameter: Plant Line Value: 35A19
  misc_feature: MA Experiment 20000533 PARAMETER Experiment Name: Zm_0.001percent_MeJA_P Parameter: Timepoint (hr) Value: 72
  misc_feature: MA Experiment 20000533 PARAMETER Experiment Name: Zm_0.001percent_MeJA_P Parameter: Tissue Value: Aerial
  misc_feature: MA Experiment 20000533 PARAMETER Experiment Name: Zm_0.001percent_MeJA_P Parameter: Treatment Value: 0.001percent MeJA vs. No Treatment
  misc_feature: MA Experiment ID: 20000626 Result: Up-regulated in Transcription
  misc_feature: MA Experiment 20000626 PARAMETER Experiment Name: Zm_Herbicide-Treatments_P Parameter: Timepoint (hr) Value: 12
  misc_feature: MA Experiment 20000626 PARAMETER Experiment Name: Zm_Herbicide-Treatments_P Parameter: Tissue Value: Aerial
  misc_feature: MA Experiment 20000626 PARAMETER Experiment Name: Zm_Herbicide-Treatments_P Parameter: Treatment Value: Roundup vs. No Treatment
  misc_feature: MA Experiment ID: 20000627 Result: Up-regulated in Transcription
  misc_feature: MA Experiment 20000627 PARAMETER Experiment Name: Zm_Herbicide-Treatments_P Parameter: Timepoint (hr) Value: 12
  misc_feature: MA Experiment 20000627 PARAMETER Experiment Name: Zm_Herbicide-Treatments_P Parameter: Tissue Value: Aerial
  misc_feature: MA Experiment 20000627 PARAMETER Experiment Name: Zm_Herbicide-Treatments_P Parameter: Treatment Value: Finale vs. No Treatment
  misc_feature: MA Experiment ID: 20001608 Result: Down-regulated in Transcription
  misc_feature: MA Experiment 20001608 PARAMETER Experiment Name: Zm_50ppm_KNO3_L-to-H_P Parameter: Age (day) Value: 21
  misc_feature: MA Experiment 20001608 PARAMETER Experiment Name: Zm_50ppm_KNO3_L-to-H_P Parameter: Organism Value: Zea mays
  misc_feature: MA Experiment 20001608 PARAMETER Experiment Name: Zm_50ppm_KNO3_L-to-H_P Parameter: Plant Line Value: 35A19
  misc_feature: MA Experiment 20001608 PARAMETER Experiment Name: Zm_50ppm_KNO3_L-to-H_P Parameter: Timepoint (hr) Value: 48
  misc_feature: MA Experiment 20001608 PARAMETER Experiment Name: Zm_50ppm_KNO3_L-to-H_P Parameter: Tissue Value: Shoots
  misc_feature: MA Experiment 20001608 PARAMETER Experiment Name: Zm_50ppm_KNO3_L-to-H_P Parameter: Treatment Value: 50ppm KNO3 vs. 50ppm KCl
gtgactgtgatctatactataaggtgaacaagatctctttgtctactgtagttgcagcaccagcagcagcagcagaagagcagcgcctgagctccagcaataatggccgagaagggcgtgaaggtgttggggatgtgggcgagccccatggtgatcagggtggagtgggcgctgcggctgaagggcgtcgagtacgagtacgtcgacgaggacctcgccaacaagagcgccgacctgctccgccacaacccggtgaccaagaaggtgcccgtgctcgtccacgacggcaagccggtcgcggagtccaccatcatcgtggagtacatcgacgaggtctggaagggcggctaccccatcatgccgggcgacccctacgagcgcgcccaggcgaggttctgggccaggttcgcggaagacaagtgcaacgctgctctgtacccgatcttcaccgcgaccggcgaggcgcagcgcaaggcggtgcacgaggcccagcagtgcctcaagaccctggagacggccttggaggggaagaagttcttcggcggcgacgccgtgggctacctcgacatcgtcgtcgggtggttcgcgcactggctccccgtcatcgaggaggtgaccggcgccagcgtcgtcacccacgaggagctgccgctgatgaaggcctggttcggtcggttcctcgcccttgacgtggtgaaggcggccctgcccgacagggacaggctcctcgccgccaacaaggcccgccgtgagcagctcctctccgcgtagatatggctagtaattctggagcagctagtttcaccgccgacgctcatatattgctgaataaggactggttgcacttttgcacgttgtgcagtgcagcccgaggtttggatgacctctgcccctctgttccatttcagaatggtagtcccataataatgcatatacatcatgc

SEQ ID NO: 3671 - protein, 228 aa, Zea mays subsp. mays
  peptide (1)..(228): Ceres Seq. ID no. 13498279
  misc_feature (15)..(228): Homolog of NCBI NO: 23008548 NR Description: hypothetical protein [Magnetospirillum
DCDLYYKVNKISLSTVVAAPAAAAEEQRLSSSNNGREGREGVGDVGEPHGDQGGVGAAAEGRRVRVRRRGPRQQERRPAPPQPGDQEGARARPRRQAGRGVHHHRGVHRRGLEGRLPHHAGRPLRARPGEVLGQVRGRQVQRCSVPDLHRDRRGAAQGGARGPAVPQDPGDGLGGEEVLRRRRRGLPRHRRRVVRALAPRHRGGDRRQRRHPRGAAADEGLVRSVPRP

SEQ ID NO: 3672 - protein, 222 aa, Zea mays subsp. mays
  peptide (1)..(222): Ceres Seq. ID no. 13498280
  misc_feature (86)..(196): Pfam Name: Glutathione S-transferase, C-terminal domain Pfam Description: Glutathione S-transferase, C-terminal domain
  misc_feature (1)..(222): Homolog of NCBI NO: 10567808 NR Description: putative glutathione S-transferase T3
  misc_feature (2)..(222): Homolog of NCBI NO: 15430731 NR Description: putative glutathione S-transferase OsGSTU17
  misc_feature (9)..(222): Homolog of NCBI NO: 11385497 NR Description: glutathione S-transferase GST 23 [Zea mays]
  misc_feature (1)..(222): Homolog of NCBI NO: 11385523 NR Description: glutathione S-transferase GST 36 [Zea mays]
MAEKGVKVLGMWASPMVIRVEWALRLKGVEYEYVDEDLANKSADLLRHNPVTKKVPVLVHDGKPVAESTIIVEYIDEVWKGGYPIMPGDPYERAQARFWARFAEDKCNAALYPIFTATGEAQRKAVHEAQQCLKTLETALEGKKFFGGDAVGYLDIVVGWFAHWLPVIEEVTGASVVTHEELPLMKAWFGRFLALDVVKAALPDRDRLLAANKARREQLLSA

SEQ ID NO: 3673 - protein, 212 aa, Zea mays subsp. mays
  peptide (1)..(212): Ceres Seq. ID no. 13498281
  misc_feature (76)..(186): Pfam Name: Glutathione S-transferase, C-terminal domain Pfam Description: Glutathione S-transferase, C-terminal domain
  misc_feature (1)..(212): Homolog of NCBI NO: 10567808 NR Description: putative glutathione S-transferase T3
  misc_feature (1)..(212): Homolog of NCBI NO: 15430731 NR Description: putative glutathione S-transferase OsGSTU17
  misc_feature (1)..(212): Homolog of NCBI NO: 11385497 NR Description: glutathione S-transferase GST 23 [Zea mays]
  misc_feature (1)..(212): Homolog of NCBI NO: 11385523 NR Description: glutathione S-transferase GST 36 [Zea mays]
MWASPMVIRVEWALRLKGVEYEYVDEDLANKSADLLRHNPVTKKVPVLVHDGKPVAESTIIVEYIDEVWKGGYPIMPGDPYERAQARFWARFAEDKCNAALYPIFTATGEAQRKAVHEAQQCLKTLETALEGKKFFGGDAVGYLDIVVGWFAHWLPVIEEVTGASVVTHEELPLMKAWFGRFLALDVVKAALPDRDRLLAANKARREQLLSA

SEQ ID NO: 3674 - DNA, 642 bp, Zea mays subsp. mays
  misc_feature (1)..(642): Ceres Seq. ID no. 12403812
  misc_feature: MA Experiment ID: 108529 Result: Down-regulated in Transcription
  misc_feature: MA Experiment 108529 PARAMETER Experiment Name: Zm_Imbibed_Seeds_P Parameter: Age (day) Value: 5 vs. 2
  misc_feature: MA Experiment 108529 PARAMETER Experiment Name: Zm_Imbibed_Seeds_P Parameter: Organism Value: Zea mays
  misc_feature: MA Experiment 108529 PARAMETER Experiment Name: Zm_Imbibed_Seeds_P Parameter: Plant Line Value: 35A19
  misc_feature: MA Experiment 108529 PARAMETER Experiment Name: Zm_Imbibed_Seeds_P Parameter: Tissue Value: Roots vs. Embryo
  misc_feature: MA Experiment ID: 108536 Result: Down-regulated in Transcription
  misc_feature: MA Experiment 108536 PARAMETER Experiment Name: Zm_Meristem_P Parameter: Age (day) Value: 8
  misc_feature: MA Experiment 108536 PARAMETER Experiment Name: Zm_Meristem_P Parameter: Organism Value: Zea mays
  misc_feature: MA Experiment 108536 PARAMETER Experiment Name: Zm_Meristem_P Parameter: Plant Line Value: 35A19
  misc_feature: MA Experiment 108536 PARAMETER Experiment Name: Zm_Meristem_P Parameter: Tissue Value: Shoot Meristem vs. Above Shoot Meristem
  misc_feature: MA Experiment ID: 108543 Result: Up-regulated in Transcription
  misc_feature: MA Experiment ID: 108545 Result: Up-regulated in Transcription
  misc_feature: MA Experiment 108545 PARAMETER Experiment Name: Zm_Imbibed_Seeds_P Parameter: Age (day) Value: 3 vs. 2
  misc_feature: MA Experiment 108545 PARAMETER Experiment Name: Zm_Imbibed_Seeds_P Parameter: Organism Value: Zea mays
  misc_feature: MA Experiment 108545 PARAMETER Experiment Name: Zm_Imbibed_Seeds_P Parameter: Plant Line Value: 35A19
  misc_feature: MA Experiment 108545 PARAMETER Experiment Name: Zm_Imbibed_Seeds_P Parameter: Tissue Value: Aerial vs. Embryo
  misc_feature: MA Experiment ID: 20000480 Result: Down-regulated in Transcription
  misc_feature: MA Experiment 20000480 PARAMETER Experiment Name: Zm_Drought_P Parameter: Age (day) Value: 11
  misc_feature: MA Experiment 20000480 PARAMETER Experiment Name: Zm_Drought_P Parameter: Organism Value: Zea mays
  misc_feature: MA Experiment 20000480 PARAMETER Experiment Name: Zm_Drought_P Parameter: Plant Line Value: 35A19
  misc_feature: MA Experiment 20000480 PARAMETER Experiment Name: Zm_Drought_P Parameter: Timepoint (hr) Value: 72
  misc_feature: MA Experiment 20000480 PARAMETER Experiment Name: Zm_Drought_P Parameter: Tissue Value: Aerial
  misc_feature: MA Experiment 20000480 PARAMETER Experiment Name: Zm_Drought_P Parameter: Treatment Value: Drought vs. No Drought
  misc_feature: MA Experiment ID: 20000629 Result: Up-regulated in Transcription
  misc_feature: MA Experiment 20000629 PARAMETER Experiment Name: Zm_Herbicide-Treatments_P Parameter: Timepoint (hr) Value: 12
  misc_feature: MA Experiment 20000629 PARAMETER Experiment Name: Zm_Herbicide-Treatments_P Parameter: Tissue Value: Aerial
  misc_feature: MA Experiment 20000629 PARAMETER Experiment Name: Zm_Herbicide-Treatments_P Parameter: Treatment Value: Trimec vs. No Treatment
  misc_feature: MA Experiment ID: 20000630 Result: Down-regulated in Transcription
  misc_feature: MA Experiment 20000630 PARAMETER Experiment Name: Zm_Herbicide-Treatments_P Parameter: Timepoint (hr) Value: 4
  misc_feature: MA Experiment 20000630 PARAMETER Experiment Name: Zm_Herbicide-Treatments_P Parameter: Tissue Value: Aerial
  misc_feature: MA Experiment 20000630 PARAMETER Experiment Name: Zm_Herbicide-Treatments_P Parameter: Treatment Value: Roundup vs. No Treatment
  misc_feature: MA Experiment ID: 20000633 Result: Up-regulated in Transcription
  misc_feature: MA Experiment 20000633 PARAMETER Experiment Name: Zm_Herbicide-Treatments_P Parameter: Timepoint (hr) Value: 4
  misc_feature: MA Experiment 20000633 PARAMETER Experiment Name: Zm_Herbicide-Treatments_P Parameter: Tissue Value: Aerial
  misc_feature: MA Experiment 20000633 PARAMETER Experiment Name: Zm_Herbicide-Treatments_P Parameter: Treatment Value: Trimec vs. No Treatment
aacacctcatcagcctatcaccagcgacctaaaaagcacagcacctagtagctgaacagcaccatatacaatccgaatctctgaatattcagttgagccaaaaaggcaggaagaaggaggaaccatgatcagttccaagaggcttgttcagatggcgaagaagtggcaggcaacggctgccatggctaggaggcggctcacggcgacgctggcgaaagaggccgacggttcgtgcggcacgtcgatgccggtggccgtcaggggccactgcgtcgtgtactcctccgacgggacgaggttcgaggtcccgctggcgtacctcggcacggcggtgttcggcgagctcctgagcatgtcgcgggaggagttcggatttaccggcgacgatggcggcaggatcacgctgccctgcgatgccgcggtgatggagtacgcgatgtgtttgctcaggcgagacgcctccgaagaggttgtgagggcgttcttgagctccatggtcagaccctgccaccacagcgtcggtggctcggtgccaccgatgggactcgggcgccaaccagccatctgtgtatagctagctatatgattagctccatgatgtacaatattattaggtgtgtatgtatgtagccggatggaatc

SEQ ID NO: 3675 - protein, 149 aa, Zea mays subsp. mays
  peptide (1)..(149): Ceres Seq. ID no. 12403813
  misc_feature (1)..(109): Pfam Name: Auxin responsive protein Pfam Description: Auxin responsive protein
  misc_feature (10)..(124): Homolog of NCBI NO: 25403067 NR Description: probable auxin-induced protein, 48806-48408
  misc_feature (1)..(124): Homolog of NCBI NO: 38603942 NR Description: At1g29420 [Arabidopsis thaliana]
  misc_feature (1)..(124): Homolog of NCBI NO: 21593671 NR Description: auxin-induced protein, putative [Arabidopsis
  misc_feature (1)..(124): Homolog of NCBI NO: 15218924 NR Description: auxin-induced protein, putative
  misc_feature (1)..(124): Homolog of NCBI NO: 18397103 NR Description: auxin-induced protein, putative
  misc_feature (1)..(124): Homolog of NCBI NO: 26452075 NR Description: putative auxin-induced protein [Arabidopsis
  misc_feature (1)..(124): Homolog of NCBI NO: 21553494 NR Description: auxin-induced protein, putative [Arabidopsis
  misc_feature (1)..(124): Homolog of NCBI NO: 18397101 NR Description: auxin-induced protein, putative
  misc_feature (1)..(124): Homolog of NCBI NO: 21592571 NR Description: auxin-induced protein, putative [Arabidopsis
  misc_feature (1)..(128): Homolog of NCBI NO: 20149052 NR Description: auxin-induced SAUR-like protein [Capsicum annuum]
MISSKRLVQMAKKWQATAAMARRRLTATLAKEADGSCGTSMPVAVRGHCVVYSSDGTRFEVPLAYLGTAVFGELLSMSREEFGFTGDDGGRITLPCDAAVMEYAMCLLRRDASEEVVRAFLSSMVRPCHHSVGGSVPPMGLGRQPAICV

SEQ ID NO: 3676 - protein, 140 aa, Zea mays subsp. mays
  peptide (1)..(140): Ceres Seq. ID no. 12403814
  misc_feature (1)..(100): Pfam Name: Auxin responsive protein Pfam Description: Auxin responsive protein
  misc_feature (1)..(115): Homolog of NCBI NO: 25403067 NR Description: probable auxin-induced protein, 48806-48408
  misc_feature (1)..(115): Homolog of NCBI NO: 38603942 NR Description: At1g29420 [Arabidopsis thaliana]
  misc_feature (1)..(115): Homolog of NCBI NO: 21593671 NR Description: auxin-induced protein, putative [Arabidopsis
  misc_feature (1)..(115): Homolog of NCBI NO: 15218924 NR Description: auxin-induced protein, putative
  misc_feature (1)..(115): Homolog of NCBI NO: 18397103 NR Description: auxin-induced protein, putative
  misc_feature (1)..(115): Homolog of NCBI NO: 26452075 NR Description: putative auxin-induced protein [Arabidopsis
  misc_feature (1)..(115): Homolog of NCBI NO: 21553494 NR Description: auxin-induced protein, putative [Arabidopsis
  misc_feature (1)..(115): Homolog of NCBI NO: 18397101 NR Description: auxin-induced protein, putative
  misc_feature (1)..(115): Homolog of NCBI NO: 21592571 NR Description: auxin-induced protein, putative [Arabidopsis
  misc_feature (1)..(119): Homolog of NCBI NO: 20149052 NR Description: auxin-induced SAUR-like protein [Capsicum annuum]
MAKKWQATAAMARRRLTATLAKEADGSCGTSMPVAVRGHCVVYSSDGTRFEVPLAYLGTAVFGELLSMSREEFGFTGDDGGRITLPCDAAVMEYAMCLLRRDASEEVVRAFLSSMVRPCHHSVGGSVPPMGLGRQPAICV

SEQ ID NO: 3677 - protein, 130 aa, Zea mays subsp. mays
  peptide (1)..(130): Ceres Seq. ID no. 12403815
  misc_feature (1)..(90): Pfam Name: Auxin responsive protein Pfam Description: Auxin responsive protein
  misc_feature (1)..(105): Homolog of NCBI NO: 25403067 NR Description: probable auxin-induced protein, 48806-48408
  misc_feature (1)..(105): Homolog of NCBI NO: 38603942 NR Description: At1g29420 [Arabidopsis thaliana]
  misc_feature (1)..(105): Homolog of NCBI NO: 21593671 NR Description: auxin-induced protein, putative [Arabidopsis
  misc_feature (1)..(105): Homolog of NCBI NO: 15218924 NR Description: auxin-induced protein, putative
  misc_feature (1)..(105): Homolog of NCBI NO: 18397103 NR Description: auxin-induced protein, putative
  misc_feature (1)..(105): Homolog of NCBI NO: 26452075 NR Description: putative auxin-induced protein [Arabidopsis
  misc_feature (1)..(105): Homolog of NCBI NO: 21553494 NR Description: auxin-induced protein, putative [Arabidopsis
  misc_feature (1)..(105): Homolog of NCBI NO: 18397101 NR Description: auxin-induced protein, putative
  misc_feature (1)..(105): Homolog of NCBI NO: 21592571 NR Description: auxin-induced protein, putative [Arabidopsis
  misc_feature (1)..(109): Homolog of NCBI NO: 20149052 NR Description: auxin-induced SAUR-like protein [Capsicum annuum]
MARRRLTATLAKEADGSCGTSMPVAVRGHCVVYSSDGTRFEVPLAYLGTAVFGELLSMSREEFGFTGDDGGRITLPCDAAVMEYAMCLLRRDASEEVVRAFLSSMVRPCHHSVGGSVPPMGLGRQPAICV

SEQ ID NO: 3678 - DNA, 1057 bp, Zea mays subsp. mays
  misc_feature (1)..(1057): Ceres Seq. ID no. 12401795
  misc_feature: MA Experiment ID: 108528 Result: Down-regulated in Transcription
  misc_feature: MA Experiment 108528 PARAMETER Experiment Name: Zm_Imbibed_Seeds_P Parameter: Age (day) Value: 5 vs. 2
  misc_feature: MA Experiment 108528 PARAMETER Experiment Name: Zm_Imbibed_Seeds_P Parameter: Organism Value: Zea mays
  misc_feature: MA Experiment 108528 PARAMETER Experiment Name: Zm_Imbibed_Seeds_P Parameter: Plant Line Value: 35A19
  misc_feature: MA Experiment 108528 PARAMETER Experiment Name: Zm_Imbibed_Seeds_P Parameter: Tissue Value: Aerial vs. Embryo
  misc_feature: MA Experiment ID: 108546 Result: Up-regulated in Transcription
  misc_feature: MA Experiment 108546 PARAMETER Experiment Name: Zm_Imbibed_Seeds_P Parameter: Age (day) Value: 3 vs. 2
  misc_feature: MA Experiment 108546 PARAMETER Experiment Name: Zm_Imbibed_Seeds_P Parameter: Organism Value: Zea mays
  misc_feature: MA Experiment 108546 PARAMETER Experiment Name: Zm_Imbibed_Seeds_P Parameter: Plant Line Value: 35A19
  misc_feature: MA Experiment 108546 PARAMETER Experiment Name: Zm_Imbibed_Seeds_P Parameter: Tissue Value: Roots vs. Embryo
atatatgcgttataacagcagagcagaggtcaacaagacgagacaagagaatgcctgtgagcaggatcgccgtgggtgctccgggcgagctgtcccaccccgacaccgccaaggccgccgtcgccgagttcatctccacgctcatcttcgtcttcgccggctcaggatcggggatggccttcagtaagctcacggacggtggcgccgccactcctgccggcctcatcgccgcgtctctggcgcacgccctcgccctcttcgtggccgtctccgtgggtgccaacatctccggcggccacgtgaaccctgccgtgaccttcggcgcctttgtgggcggcaacatcagcctcctcaaggccctggtctactgggtggcccagctcctgggctccgtcgtcgcctgcctcctcctcaagatcgccacgggcggcgcggcccttggcgccttctcgctgtcggcgggcgtcggcgccatgaacgccgtggtgctggagatggtcatgaccttcggcctcgtgtacacggtgtacgccacggccgtggaccccaagaagggcgacctcggcgtcatcgcgcccatcgccatcggcttcatcgtcggcgccaacatcctggcggggggcgccttcgacggcgcctccatgaaccccgccgtctccttcggcccggccgtcgtcaccggcgtctgggagaaccactgggtgtactgggtcggcccactcgcgggcgcggccatcgcggcgctcgtctacgacatcatcttcatcgggcagcgcccacaccagcagctgccaaccacggcagcagactactgatgaccatcatcatcatgcactgaataattaagaccagaccactcaatatatatacatatgaagaataacatgccaaatctcatctcctagagctagcaacttgattctccatatatttcttaaatacaaactaaactcgattgagtatagcttggtatgaaaccacatgtgtgtgatgttattttgtccttgtggtaatttgtacatctctatctctaccatattaaagcatcaatttcgac

SEQ ID NO: 3679 - protein, 270 aa, Zea mays subsp. mays
  peptide (1)..(270): Ceres Seq. ID no. 12401796
  misc_feature (29)..(250): Pfam Name: Major intrinsic protein Pfam Description: Major intrinsic protein
  misc_feature (17)..(270): Homolog of NCBI NO: 1514977 NR Description: VM23 [Raphanus sativus]
  misc_feature (17)..(270): Homolog of NCBI NO: 15228041 NR Description: putative aquaporin (tonoplast intrinsic protein
  misc_feature (17)..(270): Homolog of NCBI NO: 21593151 NR Description: putative aquaporin (tonoplast intrinsic protein
  misc_feature (17)..(270): Homolog of NCBI NO: 475048 NR Description: tonoplast intrinsic protein gamma (gamma-TIP)
  misc_feature (17)..(270): Homolog of NCBI NO: 21284370 NR Description: tonoplast intrinsic protein bobTIP26-1
  misc_feature (17)..(265): Homolog of NCBI NO: 15234189 NR Description: putative water channel protein; protein id:
  misc_feature (17)..(266): Homolog of NCBI NO: 541951 NR Description: SPCP2 protein - soybean
  misc_feature (17)..(270): Homolog of NCBI NO: 8699604 NR Description: putative aquaporin TIP3 [Vitis berlandieri x
  misc_feature (17)..(270): Homolog of NCBI NO: 34906078 NR Description: putative tonoplast membrane integral protein
  misc_feature (17)..(270): Homolog of NCBI NO: 13447819 NR Description: tonoplast membrane integral protein ZmTIP1-2 [Zea
ICVITAEQRSTRRDKRMPVSRIAVGAPGELSHPDTAKAAVAEFISTLIFVFAGSGSGMAFSKLTDGGAATPAGLIAASLAHALALFVAVSVGANISGGHVNPAVTFGAFVGGNISLLKALVYWVAQLLGSVVACLLLKIATGGAALGAFSLSAGVGAMNAVVLEMVMTFGLVYTVYATAVDPKKGDLGVIAPIAIGFIVGANILAGGAFDGASMNPAVSFGPAVVTGVWENHWVYWVGPLAGAAIAALVYDIIFIGQRPHQQLPTTAADY

SEQ ID NO: 3680 - protein, 254 aa, Zea mays subsp. mays
  peptide (1)..(254): Ceres Seq. ID no. 12401797
  misc_feature (13)..(234): Pfam Name: Major intrinsic protein Pfam Description: Major intrinsic protein
  misc_feature (1)..(254): Homolog of NCBI NO: 1514977 NR Description: VM23 [Raphanus sativus]
  misc_feature (1)..(254): Homolog of NCBI NO: 15228041 NR Description: putative aquaporin (tonoplast intrinsic protein
  misc_feature (1)..(254): Homolog of NCBI NO: 21593151 NR Description: putative aquaporin (tonoplast intrinsic protein
  misc_feature (1)..(254): Homolog of NCBI NO: 475048 NR Description: tonoplast intrinsic protein gamma (gamma-TIP)
  misc_feature (1)..(254): Homolog of NCBI NO: 21284370 NR Description: tonoplast intrinsic protein bobTIP26-1
  misc_feature (1)..(249): Homolog of NCBI NO: 15234189 NR Description: putative water channel protein; protein id:
  misc_feature (1)..(250): Homolog of NCBI NO: 541951 NR Description: SPCP2 protein - soybean
  misc_feature (1)..(254): Homolog of NCBI NO: 8699604 NR Description: putative aquaporin TIP3 [Vitis berlandieri x
  misc_feature (1)..(254): Homolog of NCBI NO: 34906078 NR Description: putative tonoplast membrane integral protein
  misc_feature (1)..(254): Homolog of NCBI NO: 13447819 NR Description: tonoplast membrane integral protein ZmTIP1-2 [Zea
MPVSRIAVGAPGELSHPDTAKAAVAEFISTLIFVFAGSGSGMAFSKLTDGGAATPAGLIAASLAHALALFVAVSVGANISGGHVNPAVTFGAFVGGNISLLKALVYWVAQLLGSVVACLLLKIATGGAALGAFSLSAGVGAMNAVVLEMVMTFGLVYTVYATAVDPKKGDLGVIAPIAIGFIVGANILAGGAFDGASMNPAVSFGPAVVTGVWENHWVYWVGPLAGAAIAALVYDIIFIGQRPHQQLPTTAADY

SEQ ID NO: 3681 - protein, 213 aa, Zea mays subsp. mays
  peptide (1)..(213): Ceres Seq. ID no. 12401798
  misc_feature (1)..(193): Pfam Name: Major intrinsic protein Pfam Description: Major intrinsic protein
  misc_feature (1)..(213): Homolog of NCBI NO: 34906078 NR Description: putative tonoplast membrane integral protein
  misc_feature (1)..(213): Homolog of NCBI NO: 1514977 NR Description: VM23 [Raphanus sativus]
  misc_feature (1)..(213): Homolog of NCBI NO: 21593151 NR Description: putative aquaporin (tonoplast intrinsic protein
  misc_feature (1)..(213): Homolog of NCBI NO: 21284370 NR Description: tonoplast intrinsic protein bobTIP26-1
  misc_feature (1)..(209): Homolog of NCBI NO: 541951 NR Description: SPCP2 protein - soybean
  misc_feature (1)..(213): Homolog of NCBI NO: 8699604 NR Description: putative aquaporin TIP3 [Vitis berlandieri x
  misc_feature (1)..(208): Homolog of NCBI NO: 15234189 NR Description: putative water channel protein; protein id:
  misc_feature (1)..(213): Homolog of NCBI NO: 475048 NR Description: tonoplast intrinsic protein gamma (gamma-TIP)
  misc_feature (1)..(213): Homolog of NCBI NO: 15228041 NR Description: putative aquaporin (tonoplast intrinsic protein
  misc_feature (1)..(213): Homolog of NCBI NO: 13447819 NR Description: tonoplast membrane integral protein ZmTIP1-2 [Zea
MAFSKLTDGGAATPAGLIAASLAHALALFVAVSVGANISGGHVNPAVTFGAFVGGNISLLKALVYWVAQLLGSVVACLLLKIATGGAALGAFSLSAGVGAMNAVVLEMVMTFGLVYTVYATAVDPKKGDLGVIAPIAIGFIVGANILAGGAFDGASMNPAVSFGPAVVTGVWENHWVYWVGPLAGAAIAALVYDIIFIGQRPHQQLPTTAADY

SEQ ID NO: 3682 - DNA, 1041 bp, Zea mays subsp. mays
  misc_feature (1)..(1041): Ceres Seq. ID no. 12402831
  misc_feature: MA Experiment ID: 108528 Result: Up-regulated in Transcription
  misc_feature: MA Experiment 108528 PARAMETER Experiment Name: Zm_Imbibed_Seeds_P Parameter: Age (day) Value: 5 vs. 2
  misc_feature: MA Experiment 108528 PARAMETER Experiment Name: Zm_Imbibed_Seeds_P Parameter: Organism Value: Zea mays
  misc_feature: MA Experiment 108528 PARAMETER Experiment Name: Zm_Imbibed_Seeds_P Parameter: Plant Line Value: 35A19
  misc_feature: MA Experiment 108528 PARAMETER Experiment Name: Zm_Imbibed_Seeds_P Parameter: Tissue Value: Aerial vs. Embryo
aattcctatcgatacttccacacggcacaactatcggcggcggcaacgagccaggaccctgttgtgatgctaccgtcgccgccggtgctactacgcccttgcgctgcccgggcctccccgcttccgccccctagacctagagctgcaaatcctaacaccgagtcggcgacgacgacaaccgtcgccacttcagcggacagagcggccaccatgggcgcggcagcgtggtggcggcgcgccctggggcagcggttcaacccagccggtgtggccgcggtggcggccgtcgcggcgtccaagccgcgcctggcgctgccgcacgtgtcggtgcaagacatcaggtgtctcgactgggctgagctccgccgcgccgggttccgcggcgtcgttttcgacaaggacaacacgctcacggccccctacgcgcncgcgctctggccgccgctcgctgcagcattcgaccagtgccgcgcgacgttcccgcccggtgcgctcgccatctacagcaactccgcagggttgacggagtatgatccggacggggtggatgcgagggcgatcgaagcggtcatcgagggggttcatgtgatcaggcatgatataaagaaaccaggtggactagctactgaaatagagagttactttggttgttcagcctcaaatcttgtgttggttggtgaccgttacttcactgatgtggtttatggaaacaagaatggctttcttacagtactgacagagcctttaaacatcactgatgaatcatacattgtcaaaagggttaggaaactggaggcgtacatcatcagttattggtacaagaaagggcacaaaccaatagagcatcctttgctcccagatgcaagaagaatagtgaagtttgactcatatgacgactcagtttcaaccagaatataatgtaatgatgtatcttgcacctgctcatcagagagtgagatctactgtttgtagcttagggtgtgtttgtttccttctaaattatataaactggattatggtggaatggtaagaccgtaagag

SEQ ID NO: 3683 - protein, 305 aa, Zea mays subsp. mays
  peptide (1)..(305): Ceres Seq. ID no. 12402832
  misc_feature (105)..(276): Homolog of NCBI NO: 23099444 NR Description: hypothetical protein [Oceanobacillus iheyensis
  misc_feature (105)..(276): Homolog of NCBI NO: 15613885 NR Description: BH1322~unknown conserved protein [Bacillus
  misc_feature (127)..(240): Homolog of NCBI NO: 6321892 NR Description: Hypothetical ORF; Yhr100cp [Saccharomyces
  misc_feature (99)..(240): Homolog of NCBI NO: 11282546 NR Description: hypothetical protein 15E6.20 [imported] -
  misc_feature (66)..(296): Homolog of NCBI NO: 28466953 NR Description: At3g58830 [Arabidopsis thaliana]
  misc_feature (66)..(296): Homolog of NCBI NO: 15231583 NR Description: putative protein; protein id: At3g58830.1
  misc_feature (200)..(302): Homolog of NCBI NO: 34908890 NR Description: P0699H05.17 [Oryza sativa (japonica
  misc_feature (48)..(189): Homolog of NCBI NO: 34908890 NR Description: P0699H05.17 [Oryza sativa (japonica
  misc_feature (143)..(143): Xaa is any aa, unknown or other
NSYRYFHTAQLSAAATSQDPVVMLPSPPVLLRPCAARASPLPPPRPRAANPNTESATTTTVATSADRAATMGAAAWWRRALGQRFNPAGVAAVAAVAASKPRLALPHVSVQDIRCLDWAELRRAGFRGVVFDKDNTLTAPYAXALWPPLAAAFDQCRATFPPGALAIYSNSAGLTEYDPDGVDARAIEAVIEGVHVIRHDIKKPGGLATEIESYFGCSASNLVLVGDRYFTDVVYGNKNGFLTVLTEPLNITDESYIVKRVRKLEAYIISYWYKKGHKPIEHPLLPDARRIVKFDSYDDSVSTRI

SEQ ID NO: 3684 - protein, 283 aa, Zea mays subsp. mays
  peptide (1)..(283): Ceres Seq. ID no. 12402833
  misc_feature (83)..(254): Homolog of NCBI NO: 23099444 NR Description: hypothetical protein [Oceanobacillus iheyensis
  misc_feature (83)..(254): Homolog of NCBI NO: 15613885 NR Description: BH1322~unknown conserved protein [Bacillus
  misc_feature (105)..(218): Homolog of NCBI NO: 6321892 NR Description: Hypothetical ORF; Yhr100cp [Saccharomyces
  misc_feature (77)..(218): Homolog of NCBI NO: 11282546 NR Description: hypothetical protein 15E6.20 [imported] -
  misc_feature (44)..(274): Homolog of NCBI NO: 28466953 NR Description: At3g58830 [Arabidopsis thaliana]
  misc_feature (44)..(274): Homolog of NCBI NO: 15231583 NR Description: putative protein; protein id: At3g58830.1
  misc_feature (178)..(280): Homolog of NCBI NO: 34908890 NR Description: P0699H05.17 [Oryza sativa (japonica
  misc_feature (26)..(167): Homolog of NCBI NO: 34908890 NR Description: P0699H05.17 [Oryza sativa (japonica
  misc_feature (121)..(121): Xaa is any aa, unknown or other
MLPSPPVLLRPCAARASPLPPPRPRAANPNTESATTTTVATSADRAATMGAAAWWRRALGQRFNPAGVAAVAAVAASKPRLALPHVSVQDIRCLDWAELRRAGFRGVVFDKDNTLTAPYAXALWPPLAAAFDQCRATFPPGALAIYSNSAGLTEYDPDGVDARAIEAVIEGVHVIRHDIKKPGGLATEIESYFGCSASNLVLVGDRYFTDVVYGNKNGFLTVLTEPLNITDESYIVKRVRKLEAYIISYWYKKGHKPIEHPLLPDARRIVKFDSYDDSVSTRI

SEQ ID NO: 3685 - protein, 235 aa, Zea mays subsp. mays
  peptide (1)..(235): Ceres Seq. ID no. 12402834
  misc_feature (35)..(206): Homolog of NCBI NO: 23099444 NR Description: hypothetical protein [Oceanobacillus iheyensis
  misc_feature (35)..(206): Homolog of NCBI NO: 15613885 NR Description: BH1322~unknown conserved protein [Bacillus
  misc_feature (57)..(170): Homolog of NCBI NO: 6321892 NR Description: Hypothetical ORF; Yhr100cp [Saccharomyces
  misc_feature (29)..(170): Homolog of NCBI NO: 11282546 NR Description: hypothetical protein 15E6.20 [imported] -
  misc_feature (1)..(226): Homolog of NCBI NO: 28466953 NR Description: At3g58830 [Arabidopsis thaliana]
  misc_feature (1)..(226): Homolog of NCBI NO: 15231583 NR Description: putative protein; protein id: At3g58830.1
  misc_feature (130)..(232): Homolog of NCBI NO: 34908890 NR Description: P0699H05.17 [Oryza sativa (japonica
  misc_feature (1)..(119): Homolog of NCBI NO: 34908890 NR Description: P0699H05.17 [Oryza sativa (japonica
  misc_feature (73)..(73): Xaa is any aa, unknown or other
MGAAAWWRRALGQRFNPAGVAAVAAVAASKPRLALPHVSVQDIRCLDWAELRRAGFRGVVFDKDNTLTAPYAXALWPPLAAAFDQCRATFPPGALAIYSNSAGLTEYDPDGVDARAIEAVIEGVHVIRHDIKKPGGLATEIESYFGCSASNLVLVGDRYFTDVVYGNKNGFLTVLTEPLNITDESYIVKRVRKLEAYIISYWYKKGHKPIEHPLLPDARRIVKFDSYDDSVSTRI

SEQ ID NO: 3686 - DNA, 909 bp, Zea mays subsp. mays
  misc_feature (1)..(909): Ceres Seq. ID no. 12356120
  misc_feature: MA Experiment ID: 108522 Result: Down-regulated in Transcription
  misc_feature: MA Experiment 108522 PARAMETER Experiment Name: Zm_42deg_Heat_P Parameter: Age (day) Value: 8
  misc_feature: MA Experiment 108522 PARAMETER Experiment Name: Zm_42deg_Heat_P Parameter: Organism Value: Zea mays
  misc_feature: MA Experiment 108522 PARAMETER Experiment Name: Zm_42deg_Heat_P Parameter: Plant Line Value: 35A19
  misc_feature: MA Experiment 108522 PARAMETER Experiment Name: Zm_42deg_Heat_P Parameter: Temperature (deg C) Value: 42 vs. 22
  misc_feature: MA Experiment 108522 PARAMETER Experiment Name: Zm_42deg_Heat_P Parameter: Timepoint (hr) Value: 1
  misc_feature: MA Experiment 108522 PARAMETER Experiment Name: Zm_42deg_Heat_P Parameter: Tissue Value: Aerial
  misc_feature: MA Experiment ID: 108543 Result: Down-regulated in Transcription
  misc_feature: MA Experiment ID: 108689 Result: Up-regulated in Transcription
  misc_feature: MA Experiment 108689 PARAMETER Experiment Name: Zm_Drought_Roots_P Parameter: Age (day) Value: 9
  misc_feature: MA Experiment 108689 PARAMETER Experiment Name: Zm_Drought_Roots_P Parameter: Organism Value: Zea mays
  misc_feature: MA Experiment 108689 PARAMETER Experiment Name: Zm_Drought_Roots_P Parameter: Plant Line Value: 35A19
  misc_feature: MA Experiment 108689 PARAMETER Experiment Name: Zm_Drought_Roots_P Parameter: Timepoint (hr) Value: 24
  misc_feature: MA Experiment 108689 PARAMETER Experiment Name: Zm_Drought_Roots_P Parameter: Tissue Value: Roots
  misc_feature: MA Experiment 108689 PARAMETER Experiment Name: Zm_Drought_Roots_P Parameter: Treatment Value: Drought vs. No Drought
  misc_feature: MA Experiment ID: 20000479 Result: Up-regulated in Transcription
  misc_feature: MA Experiment 20000479 PARAMETER Experiment Name: Zm_Drought_P Parameter: Age (day) Value: 10
  misc_feature: MA Experiment 20000479 PARAMETER Experiment Name: Zm_Drought_P Parameter: Organism Value: Zea mays
  misc_feature: MA Experiment 20000479 PARAMETER Experiment Name: Zm_Drought_P Parameter: Plant Line Value: 35A19
  misc_feature: MA Experiment 20000479 PARAMETER Experiment Name: Zm_Drought_P Parameter: Timepoint (hr) Value: 48
  misc_feature: MA Experiment 20000479 PARAMETER Experiment Name: Zm_Drought_P Parameter: Tissue Value: Aerial
  misc_feature: MA Experiment 20000479 PARAMETER Experiment Name: Zm_Drought_P Parameter: Treatment Value: Drought vs. No Drought
  misc_feature: MA Experiment ID: 20000480 Result: Up-regulated in Transcription
  misc_feature: MA Experiment 20000480 PARAMETER Experiment Name: Zm_Drought_P Parameter: Age (day) Value: 11
  misc_feature: MA Experiment 20000480 PARAMETER Experiment Name: Zm_Drought_P Parameter: Organism Value: Zea mays
  misc_feature: MA Experiment 20000480 PARAMETER Experiment Name: Zm_Drought_P Parameter: Plant Line Value: 35A19
  misc_feature: MA Experiment 20000480 PARAMETER Experiment Name: Zm_Drought_P Parameter: Timepoint (hr) Value: 72
  misc_feature: MA Experiment 20000480 PARAMETER Experiment Name: Zm_Drought_P Parameter: Tissue Value: Aerial
  misc_feature: MA Experiment 20000480 PARAMETER Experiment Name: Zm_Drought_P Parameter: Treatment Value: Drought vs. No Drought
  misc_feature: MA Experiment ID: 20000534 Result: Down-regulated in Transcription
  misc_feature: MA Experiment 20000534 PARAMETER Experiment Name: Zm_Hybrid_Pollen_P Parameter: Age (day) Value: 8
  misc_feature: MA Experiment 20000534 PARAMETER Experiment Name: Zm_Hybrid_Pollen_P Parameter: Organism Value: Zea mays
  misc_feature: MA Experiment 20000534 PARAMETER Experiment Name: Zm_Hybrid_Pollen_P Parameter: Plant Line Value: 35A19
  misc_feature: MA Experiment 20000534 PARAMETER Experiment Name: Zm_Hybrid_Pollen_P Parameter: Tissue Value: Pollen vs. Aerial
  misc_feature: MA Experiment ID: 20000535 Result: Down-regulated in Transcription
  misc_feature: MA Experiment 20000535 PARAMETER Experiment Name: Zm_Hybrid_Seed_Dev_P Parameter: DAP Value: 30 vs. 12
  misc_feature: MA Experiment 20000535 PARAMETER Experiment Name: Zm_Hybrid_Seed_Dev_P Parameter: Organism Value: Zea mays
  misc_feature: MA Experiment 20000535 PARAMETER Experiment Name: Zm_Hybrid_Seed_Dev_P Parameter: Plant Line Value: 35A19
  misc_feature: MA Experiment 20000535 PARAMETER Experiment Name: Zm_Hybrid_Seed_Dev_P Parameter: Tissue Value: Embryo vs. Unfert Floret
accaaagcaaaccgaagccgcactctaccgcgctcctcccgaaccacagctatgctcgcccaccgcctcctcctcctcctcgccgtcgccgcggcgagcggcaccgccttcgctaagccgacggcgtacgaagccctcgctgactacgacttcccgccggggatcctccccaagggcgtggtcgcctacacgctcgacaacgccacgggcgccttcacggccacgctcgacgcctccgcgtccggcagcgggtcctccgtctgcgagttctccatccagggctcctactcgctccgctaccagaccaagatcaccggaaagatcgcccccgaccacctcaccgacctcgagggcgtctccgtcaaggtcctcttcttctggctcaacatcgtcgaggtcacccggcgcggcgacaacctcgagttctccgtcggcatcgtctccgcggacttcgggattgaaaacttcctcgagtgccccacctgtggctgcgggttcgactgcaacaacctgctcatgctgcagaagcccggcgccgccaccgccaagctgcgcctgcggggtgccttctagaactccacttctgcagatttggtgactgctgctgtaagctgcctcgactagtagtgctgtatgtctagtagatgtgggttaataaagagggcaaacttgaaagatcccagcttttagatgtgggatggggtaaccaagttcaggactcgatgtcatgtttcaccaattgtttcagacagttctaggaacagtcagagaagcaattaagacctttcaaatattttaatttatacgtctctatggaaattgtcttatttccattgagatgtttgcccctcatgtgaattagtttgtgaagtggtgatagttgaatcccatggatatggatggttgcct

SEQ ID NO: 3687 - protein, 198 aa, Zea mays subsp. mays
  peptide (1)..(198): Ceres Seq. ID no. 12356121
  misc_feature (19)..(178): Pfam Name: Equine herpesvirus glycoprotein gp2 Pfam Description: Equine herpesvirus glycoprotein gp2
  misc_feature (11)..(190): Homolog of NCBI NO: 11359723 NR Description: proteophosphoglycan, membrane-associated - Leishmania major (fragment) >gi|5420389|emb|CAB46680.1|
  misc_feature (19)..(193): Homolog of NCBI NO: 32699068 NR Description: hypothetical protein FLJ35107 [Homo sapiens]
  misc_feature (1)..(193): Homolog of NCBI NO: 2429362 NR Description: proline rich protein [Santalum album]
  misc_feature (13)..(190): Homolog of NCBI NO: 11359723 NR Description: proteophosphoglycan, membrane-associated - Leishmania major (fragment) >gi|5420389|emb|CAB46680.1|
  misc_feature (19)..(193): Homolog of NCBI NO: 32699068 NR Description: hypothetical protein FLJ35107 [Homo sapiens]
  misc_feature (17)..(183): Homolog of NCBI NO: 32699068 NR Description: hypothetical protein FLJ35107 [Homo sapiens]
  misc_feature (11)..(192): Homolog of NCBI NO: 11359723 NR Description: proteophosphoglycan, membrane-associated - Leishmania major (fragment) >gi|5420389|emb|CAB46680.1|
  misc_feature (11)..(193): Homolog of NCBI NO: 13592175 NR Description: ppg3 [Leishmania major]
  misc_feature (11)..(190): Homolog of NCBI NO: 13592175 NR Description: ppg3 [Leishmania major]
  misc_feature (11)..(190): Homolog of NCBI NO: 13592175 NR Description: ppg3 [Leishmania major]
PKQTEAALYRAPPEPQLCSPTASSSSSPSPRRAAPPSLSRRRTKPSLTTTSRRGSSPRAWSPTRSTTPRAPSRPRSTPPRPAAGPPSASSPSRAPTRSATRPRSPERSPPTTSPTSRASPSRSSSSGSTSSRSPGAATTSSSPSASSPRTSGLKTSSSAPPVAAGSTATTCSCCRSPAPPPPSCACGVPSRTPLLQIW

SEQ ID NO: 3688 - protein, 190 aa, Zea mays subsp. mays
  peptide (1)..(190): Ceres Seq. ID no. 12356122
  misc_feature (29)..(168): Pfam Name: Protein of unknown function, DUF538 Pfam Description: Protein of unknown function, DUF538
  misc_feature (39)..(173): Homolog of NCBI NO: 15235335 NR Description: putative protein; protein id: At4g02360.1
  misc_feature (23)..(168): Homolog of NCBI NO: 18379012 NR Description: Expressed protein; protein id: At1g02813.1,
  misc_feature (13)..(170): Homolog of NCBI NO: 21554037 NR Description: unknown [Arabidopsis thaliana]
  misc_feature (29)..(168): Homolog of NCBI NO: 18379014 NR Description: Expressed protein; protein id: At1g02816.1, by cDNA: 28445., supported by cDNA: gi_14423479, supported by
  misc_feature (13)..(170): Homolog of NCBI NO: 18411923 NR Description: coded for by A. thaliana cDNA R64991; protein id: supported by cDNA: 19543., supported by cDNA: gi_13430841, by cDNA: gi_15810602 [Arabidopsis thaliana]
  misc_feature (23)..(168): Homolog of NCBI NO: 21553750 NR Description: unknown [Arabidopsis thaliana]
TKANRSRTLPRSSRTTAMLAHRLLLLLAVAAASGTAFAKPTAYEALADYDFPPGILPKGVVAYTLDNATGAFTATLDASASGSGSSVCEFSIQGSYSLRYQTKITGKIAPDHLTDLEGVSVKVLFFWLNIVEVTRRGDNLEFSVGIVSADFGIENFLECPTCGCGFDCNNLLMLQKPGAATAKLRLRGAF

SEQ ID NO: 3689 - protein, 173 aa, Zea mays subsp. mays
  peptide (1)..(173): Ceres Seq. ID no. 12356123
  misc_feature (12)..(151): Pfam Name: Protein of unknown function, DUF538 Pfam Description: Protein of unknown function, DUF538
  misc_feature (1)..(153): Homolog of NCBI NO: 18411923 NR Description: coded for by A. thaliana cDNA R64991; protein id: supported by cDNA: 19543., supported by cDNA: gi_13430841, by cDNA: gi_15810602 [Arabidopsis thaliana]
  misc_feature (1)..(153): Homolog of NCBI NO: 21554037 NR Description: unknown [Arabidopsis thaliana]
  misc_feature (12)..(151): Homolog of NCBI NO: 18379014 NR Description: Expressed protein; protein id: At1g02816.1, by cDNA: 28445., supported by cDNA: gi_14423479, supported by
  misc_feature (22)..(156): Homolog of NCBI NO: 15235335 NR Description: putative protein; protein id: At4g02360.1
  misc_feature (6)..(151): Homolog of NCBI NO: 18379012 NR Description: Expressed protein; protein id: At1g02813.1,
  misc_feature (6)..(151): Homolog of NCBI NO: 21553750 NR Description: unknown [Arabidopsis thaliana]
MLAHRLLLLLAVAAASGTAFAKPTAYEALADYDFPPGILPKGVVAYTLDNATGAFTATLDASASGSGSSVCEFSIQGSYSLRYQTKITGKIAPDHLTDLEGVSVKVLFFWLNIVEVTRRGDNLEFSVGIVSADFGIENFLECPTCGCGFDCNNLLMLQKPGAATAKLRLRGAF

SEQ ID NO: 3690 - DNA, 998 bp, Zea mays subsp. mays
  misc_feature (1)..(998): Ceres Seq. ID no. 13494376
  misc_feature: MA Experiment ID: 108522 Result: Down-regulated in Transcription
  misc_feature: MA Experiment 108522 PARAMETER Experiment Name: Zm_42deg_Heat_P Parameter: Age (day) Value: 8
  misc_feature: MA Experiment 108522 PARAMETER Experiment Name: Zm_42deg_Heat_P Parameter: Organism Value: Zea mays
  misc_feature: MA Experiment 108522 PARAMETER Experiment Name: Zm_42deg_Heat_P Parameter: Plant Line Value: 35A19
  misc_feature: MA Experiment 108522 PARAMETER Experiment Name: Zm_42deg_Heat_P Parameter: Temperature (deg C) Value: 42 vs. 22
  misc_feature: MA Experiment 108522 PARAMETER Experiment Name: Zm_42deg_Heat_P Parameter: Timepoint (hr) Value: 1
  misc_feature: MA Experiment 108522 PARAMETER Experiment Name: Zm_42deg_Heat_P Parameter: Tissue Value: Aerial
  misc_feature: MA Experiment ID: 108523 Result: Down-regulated in Transcription
  misc_feature: MA Experiment 108523 PARAMETER Experiment Name: Zm_42deg_Heat_P Parameter: Age (day) Value: 8
  misc_feature: MA Experiment 108523 PARAMETER Experiment Name: Zm_42deg_Heat_P Parameter: Organism Value: Zea mays
  misc_feature: MA Experiment 108523 PARAMETER Experiment Name: Zm_42deg_Heat_P Parameter: Plant Line Value: 35A19
  misc_feature: MA Experiment 108523 PARAMETER Experiment Name: Zm_42deg_Heat_P Parameter: Temperature (deg C) Value: 42 vs. 22
  misc_feature: MA Experiment 108523 PARAMETER Experiment Name: Zm_42deg_Heat_P Parameter: Timepoint (hr) Value: 6
  misc_feature: MA Experiment 108523 PARAMETER Experiment Name: Zm_42deg_Heat_P Parameter: Tissue Value: Aerial
  misc_feature: MA Experiment ID: 108527 Result: Down-regulated in Transcription
  misc_feature: MA Experiment 108527 PARAMETER Experiment Name: Zm_5mM_NO_P Parameter: Age (day) Value: 8
  misc_feature: MA Experiment 108527 PARAMETER Experiment Name: Zm_5mM_NO_P Parameter: Organism Value: Zea mays
  misc_feature: MA Experiment 108527 PARAMETER Experiment Name: Zm_5mM_NO_P Parameter: Plant Line Value: 35A19
  misc_feature: MA Experiment 108527 PARAMETER Experiment Name: Zm_5mM_NO_P Parameter: Timepoint (hr) Value: 6
  misc_feature: MA Experiment 108527 PARAMETER Experiment Name: Zm_5mM_NO_P Parameter: Tissue Value: Aerial
  misc_feature: MA Experiment 108527 PARAMETER Experiment Name: Zm_5mM_NO_P Parameter: Treatment Value: 5mM NO vs. No Treatment
  misc_feature: MA Experiment ID: 108529 Result: Up-regulated in Transcription
  misc_feature: MA Experiment 108529 PARAMETER Experiment Name: Zm_Imbibed_Seeds_P Parameter: Age (day) Value: 5 vs. 2
  misc_feature: MA Experiment 108529 PARAMETER Experiment Name: Zm_Imbibed_Seeds_P Parameter: Organism Value: Zea mays
  misc_feature: MA Experiment 108529 PARAMETER Experiment Name: Zm_Imbibed_Seeds_P Parameter: Plant Line Value: 35A19
  misc_feature: MA Experiment 108529 PARAMETER Experiment Name: Zm_Imbibed_Seeds_P Parameter: Tissue Value: Roots vs. Embryo
  misc_feature: MA Experiment ID: 108535 Result: Down-regulated in Transcription
  misc_feature: MA Experiment 108535 PARAMETER Experiment Name: Zm_Meristem_P Parameter: Age (day) Value: 8
  misc_feature: MA Experiment 108535 PARAMETER Experiment Name: Zm_Meristem_P Parameter: Organism Value: Zea mays
  misc_feature: MA Experiment 108535 PARAMETER Experiment Name: Zm_Meristem_P Parameter: Plant Line Value: 35A19
  misc_feature: MA Experiment 108535 PARAMETER Experiment Name: Zm_Meristem_P Parameter: Tissue Value: Root Meristem vs. Above Root Meristem
  misc_feature: MA Experiment ID: 108536 Result: Down-regulated in Transcription
  misc_feature: MA Experiment 108536 PARAMETER Experiment Name: Zm_Meristem_P Parameter: Age (day) Value: 8
  misc_feature: MA Experiment 108536 PARAMETER Experiment Name: Zm_Meristem_P Parameter: Organism Value: Zea mays
  misc_feature: MA Experiment 108536 PARAMETER Experiment Name: Zm_Meristem_P Parameter: Plant Line Value: 35A19
  misc_feature: MA Experiment 108536 PARAMETER Experiment Name: Zm_Meristem_P Parameter: Tissue Value: Shoot Meristem vs. Above Shoot Meristem
  misc_feature: MA Experiment ID: 108543 Result: Up-regulated in Transcription
  misc_feature: MA Experiment ID: 108545 Result: Down-regulated in Transcription
  misc_feature: MA Experiment 108545 PARAMETER Experiment Name: Zm_Imbibed_Seeds_P Parameter: Age (day) Value: 3 vs. 2
  misc_feature: MA Experiment 108545 PARAMETER Experiment Name: Zm_Imbibed_Seeds_P Parameter: Organism Value: Zea mays
  misc_feature: MA Experiment 108545 PARAMETER Experiment Name: Zm_Imbibed_Seeds_P Parameter: Plant Line Value: 35A19
  misc_feature: MA Experiment 108545 PARAMETER Experiment Name: Zm_Imbibed_Seeds_P Parameter: Tissue Value: Aerial vs. Embryo
  misc_feature: MA Experiment ID: 108546 Result: Up-regulated in Transcription
  misc_feature: MA Experiment 108546 PARAMETER Experiment Name: Zm_Imbibed_Seeds_P Parameter: Age (day) Value: 3 vs. 2
  misc_feature: MA Experiment 108546 PARAMETER Experiment Name: Zm_Imbibed_Seeds_P Parameter: Organism Value: Zea mays
  misc_feature: MA Experiment 108546 PARAMETER Experiment Name: Zm_Imbibed_Seeds_P Parameter: Plant Line Value: 35A19
  misc_feature: MA Experiment 108546 PARAMETER Experiment Name: Zm_Imbibed_Seeds_P Parameter: Tissue Value: Roots vs. Embryo
  misc_feature: MA Experiment ID: 108556 Result: Down-regulated in Transcription
  misc_feature: MA Experiment 108556 PARAMETER Experiment Name: Zm_Drought_P Parameter: Age (day) Value: 9
  misc_feature: MA Experiment 108556 PARAMETER Experiment Name: Zm_Drought_P Parameter: Organism Value: Zea mays
  misc_feature: MA Experiment 108556 PARAMETER Experiment Name: Zm_Drought_P Parameter: Plant Line Value: 35A19
  misc_feature: MA Experiment 108556 PARAMETER Experiment Name: Zm_Drought_P Parameter: Timepoint (hr) Value: 24
  misc_feature: MA Experiment 108556 PARAMETER Experiment Name: Zm_Drought_P Parameter: Tissue Value: Aerial
  misc_feature: MA Experiment 108556 PARAMETER Experiment Name: Zm_Drought_P Parameter: Treatment Value: Drought vs. No Drought
  misc_feature: MA Experiment ID: 108599 Result: Down-regulated in Transcription
  misc_feature: MA Experiment 108599 PARAMETER Experiment Name: Zm_RT1_P Parameter: Age (day) Value: 11
  misc_feature: MA Experiment 108599 PARAMETER Experiment Name: Zm_RT1_P Parameter: Organism Value: Zea mays
  misc_feature: MA Experiment 108599 PARAMETER Experiment Name: Zm_RT1_P Parameter: Plant Line Value: rt1 mut vs. rt1 wt
  misc_feature: MA Experiment 108599 PARAMETER Experiment Name: Zm_RT1_P Parameter: Tissue Value: Roots
  misc_feature: MA Experiment ID: 108687 Result: Down-regulated in Transcription
  misc_feature: MA Experiment 108687 PARAMETER Experiment Name: Zm_Embryos-Flowers__P Parameter: Tissue Value: Embryo vs. Aerial+
  misc_feature: MA Experiment ID: 108688 Result: Down-regulated in Transcription
  misc_feature: MA Experiment 108688 PARAMETER Experiment Name: Zm_Embryos-Flowers__P Parameter: Tissue Value: Immature Flowers vs. Aerial+
  misc_feature: MA Experiment ID: 108689 Result: Up-regulated in Transcription
  misc_feature: MA Experiment 108689 PARAMETER Experiment Name: Zm_Drought_Roots_P Parameter: Age (day) Value: 9
  misc_feature: MA Experiment 108689 PARAMETER Experiment Name: Zm_Drought_Roots_P Parameter: Organism Value: Zea mays
  misc_feature: MA Experiment 108689 PARAMETER Experiment Name: Zm_Drought_Roots_P Parameter: Plant Line Value: 35A19
  misc_feature: MA Experiment 108689 PARAMETER Experiment Name: Zm_Drought_Roots_P Parameter: Timepoint (hr) Value: 24
  misc_feature: MA Experiment 108689 PARAMETER Experiment Name: Zm_Drought_Roots_P Parameter: Tissue Value: Roots
  misc_feature: MA Experiment 108689 PARAMETER Experiment Name: Zm_Drought_Roots_P Parameter: Treatment Value: Drought vs. No Drought
  misc_feature: MA Experiment ID: 20000477 Result: Down-regulated in Transcription
  misc_feature: MA Experiment 20000477 PARAMETER Experiment Name: Zm_5mM_SA_P Parameter: Age (day) Value: 10
  misc_feature: MA Experiment 20000477 PARAMETER Experiment Name: Zm_5mM_SA_P Parameter: Organism Value: Zea mays
  misc_feature: MA Experiment 20000477 PARAMETER Experiment Name: Zm_5mM_SA_P Parameter: Plant Line Value: 35A19
  misc_feature: MA Experiment 20000477 PARAMETER Experiment Name: Zm_5mM_SA_P Parameter: Timepoint (hr) Value: 48
  misc_feature: MA Experiment 20000477 PARAMETER Experiment Name: Zm_5mM_SA_P Parameter: Tissue Value: Aerial
  misc_feature: MA Experiment 20000477 PARAMETER Experiment Name: Zm_5mM_SA_P Parameter: Treatment Value: 5mM SA vs. No Treatment
  misc_feature: MA Experiment ID: 20000478 Result: Down-regulated in Transcription
  misc_feature: MA Experiment 20000478 PARAMETER Experiment Name: Zm_5mM_SA_P Parameter: Age (day) Value: 11
  misc_feature: MA Experiment 20000478 PARAMETER Experiment Name: Zm_5mM_SA_P Parameter: Organism Value: Zea mays
  misc_feature: MA Experiment 20000478 PARAMETER Experiment Name: Zm_5mM_SA_P Parameter: Plant Line Value: 35A19
  misc_feature: MA Experiment 20000478 PARAMETER Experiment Name: Zm_5mM_SA_P Parameter: Timepoint (hr) Value: 72
  misc_feature: MA Experiment 20000478 PARAMETER Experiment Name: Zm_5mM_SA_P Parameter: Tissue Value: Aerial
  misc_feature: MA Experiment 20000478 PARAMETER Experiment Name: Zm_5mM_SA_P Parameter: Treatment Value: 5mM SA vs. No Treatment
  misc_feature: MA Experiment ID: 20000479 Result: Down-regulated in Transcription
  misc_feature: MA Experiment 20000479 PARAMETER Experiment Name: Zm_Drought_P Parameter: Age (day) Value: 10
  misc_feature: MA Experiment 20000479 PARAMETER Experiment Name: Zm_Drought_P Parameter: Organism Value: Zea mays
  misc_feature: MA Experiment 20000479 PARAMETER Experiment Name: Zm_Drought_P Parameter: Plant Line Value: 35A19
  misc_feature: MA Experiment 20000479 PARAMETER Experiment Name: Zm_Drought_P Parameter: Timepoint (hr) Value: 48
  misc_feature: MA Experiment 20000479 PARAMETER Experiment Name: Zm_Drought_P Parameter: Tissue Value: Aerial
  misc_feature: MA Experiment 20000479 PARAMETER Experiment Name: Zm_Drought_P Parameter: Treatment Value: Drought vs. No Drought
  misc_feature: MA Experiment ID: 20000533 Result: Down-regulated in Transcription
  misc_feature: MA Experiment 20000533 PARAMETER Experiment Name: Zm_0.001percent_MeJA_P Parameter: Age (day) Value: 11
  misc_feature: MA Experiment 20000533 PARAMETER Experiment Name: Zm_0.001percent_MeJA_P Parameter: Organism Value: Zea mays
  misc_feature: MA Experiment 20000533 PARAMETER Experiment Name: Zm_0.001percent_MeJA_P Parameter: Plant Line Value: 35A19
  misc_feature: MA Experiment 20000533 PARAMETER Experiment Name: Zm_0.001percent_MeJA_P Parameter: Timepoint (hr) Value: 72
  misc_feature: MA Experiment 20000533 PARAMETER Experiment Name: Zm_0.001percent_MeJA_P Parameter: Tissue Value: Aerial
  misc_feature: MA Experiment 20000533 PARAMETER Experiment Name: Zm_0.001percent_MeJA_P Parameter: Treatment Value: 0.001percent MeJA vs. No Treatment
  misc_feature: MA Experiment ID: 20000534 Result: Down-regulated in Transcription
  misc_feature: MA Experiment 20000534 PARAMETER Experiment Name: Zm_Hybrid_Pollen_P Parameter: Age (day) Value: 8
  misc_feature: MA Experiment 20000534 PARAMETER Experiment Name: Zm_Hybrid_Pollen_P Parameter: Organism Value: Zea mays
  misc_feature: MA Experiment 20000534 PARAMETER Experiment Name: Zm_Hybrid_Pollen_P Parameter: Plant Line Value: 35A19
  misc_feature: MA Experiment 20000534 PARAMETER Experiment Name: Zm_Hybrid_Pollen_P Parameter: Tissue Value: Pollen vs. Aerial
  misc_feature: MA Experiment ID: 20000535 Result: Down-regulated in Transcription
  misc_feature: MA Experiment 20000535 PARAMETER Experiment Name: Zm_Hybrid_Seed_Dev_P Parameter: DAP Value: 30 vs. 12
  misc_feature: MA Experiment 20000535 PARAMETER Experiment Name: Zm_Hybrid_Seed_Dev_P Parameter: Organism Value: Zea mays
  misc_feature: MA Experiment 20000535 PARAMETER Experiment Name: Zm_Hybrid_Seed_Dev_P Parameter: Plant Line Value: 35A19
  misc_feature: MA Experiment 20000535 PARAMETER Experiment Name: Zm_Hybrid_Seed_Dev_P Parameter: Tissue Value: Embryo vs. Unfert Floret
  misc_feature: MA Experiment ID: 20000626 Result: Down-regulated in Transcription
  misc_feature: MA Experiment 20000626 PARAMETER Experiment Name: Zm_Herbicide-Treatments_P Parameter: Timepoint (hr) Value: 12
  misc_feature: MA Experiment 20000626 PARAMETER Experiment Name: Zm_Herbicide-Treatments_P Parameter: Tissue Value: Aerial
  misc_feature: MA Experiment 20000626 PARAMETER Experiment Name: Zm_Herbicide-Treatments_P Parameter: Treatment Value: Roundup vs. No Treatment
ataaaggggcattggcttgggatcacctctgcatcttacctgggatctgctagcttgatctctcctagtcctagcccattcgcttctcctgttcgtcgctcttaatttgcttgctcgatccctggcagtggcagctgctgcaatggcttccggtggcgcgtcgtcactggccttggccttggccgcgctgctcctcgtgagctgcgcctcggcggcggtggcgaccaagtacaccgtcggggacgcgtccggctggacgaccaccggcgactacgccacctgggccagcggcaagaagttcaaagtcggcgacagtctcgagttcaaatacgccggcggggcgcacacggtggacgaggtgagcgcggcggactacgccgcctgctcctccagcaacgcgctcagcaccgacagcgccggcgccacgaccgtgaccctcaagacggccggcaagcactacttcatctgcggcgtggcgggccattgcagcagcggcatgaagctcgtggtggacgtggccaaggcggtgaccgccccggngccggccccagccgcggccccggccccggccgcggacaccgcnccagacgcccccgacaccacgccgtcgaccccgacgtccccctcgagctccggcggccgcacgcccaagagcccagacacgacggtcctctcgccgccggacaagaagtccacctcctctggcgccaccgggctcagcgccgcagtgtgggccggcttgggccttgccgggctcgtggccgtgcacctcggcgcgttctaggccagcccgctggcctggccagggaggagacagtgccgtgtgttgttgttaggctgcacgtcatgaattggattggtgtattggttgagggacttgactgcttaccagagagagatctctttttggttcagggaacttattgacgatgctttggctgtgctgtagacatgtagttggataccttggatgttatgctatcagttttgctgttgct

SEQ ID NO: 3691 - protein, 213 aa, Zea mays subsp. mays
  peptide (1)..(213): Ceres Seq. ID no. 13494377
  misc_feature (38)..(119): Pfam Name: Plastocyanin-like domain Pfam Description: Plastocyanin-like domain
  misc_feature (10)..(205): Homolog of NCBI NO: 34915492 NR Description: contains ESTs
  misc_feature (11)..(167): Homolog of NCBI NO: 38636761 NR Description: putative blue copper binding protein
  misc_feature (11)..(188): Homolog of NCBI NO: 15232289 NR Description: uclacyanin 3 [Arabidopsis thaliana]
  misc_feature (6)..(168): Homolog of NCBI NO: 38346158 NR Description: OSJNBa0079A21.5 [Oryza sativa (japonica
  misc_feature (1)..(202): Homolog of NCBI NO: 25453521 NR Description: blue copper-binding protein II [imported] -
  misc_feature (1)..(202): Homolog of NCBI NO: 25453522 NR Description: blue copper-binding protein II [imported] -
  misc_feature (1)..(202): Homolog of NCBI NO: 15224960 NR Description: uclacyanin II [Arabidopsis thaliana]
  misc_feature (1)..(202): Homolog of NCBI NO: 21554060 NR Description: phytocyanin [Arabidopsis thaliana]
  misc_feature (5)..(208): Homolog of NCBI NO: 14140127 NR Description: uclacyanin 3-like protein [Oryza sativa]
  misc_feature (6)..(172): Homolog of NCBI NO: 2493318 NR Description: Blue copper protein precursor
  misc_feature (133)..(133): Xaa is any aa, unknown or other
  misc_feature (147)..(147): Xaa is any aa, unknown or other
MASGGASSLALALAALLLVSCASAAVATKYTVGDASGWTTTGDYATWASGKKFKVGDSLEFKYAGGAHTVDEVSAADYAACSSSNALSTDSAGATTVTLKTAGKHYFICGVAGHCSSGMKLVVDVAKAVTAPXPAPAAAPAPAADTXPDAPDTTPSTPTSPSSSGGRTPKSPDTTVLSPPDKKSTSSGATGLSAAVWAGLGLAGLVAVHLGAF

SEQ ID NO: 3692 - DNA, 1272 bp, Zea mays subsp. mays
  misc_feature (1)..(1272): Ceres Seq. ID no. 12402634
  misc_feature: MA Experiment ID: 108527 Result: Down-regulated in Transcription
  misc_feature: MA Experiment 108527 PARAMETER Experiment Name: Zm_5mM_NO_P Parameter: Age (day) Value: 8
  misc_feature: MA Experiment 108527 PARAMETER Experiment Name: Zm_5mM_NO_P Parameter: Organism Value: Zea mays
  misc_feature: MA Experiment 108527 PARAMETER Experiment Name: Zm_5mM_NO_P Parameter: Plant Line Value: 35A19
  misc_feature: MA Experiment 108527 PARAMETER Experiment Name: Zm_5mM_NO_P Parameter: Timepoint (hr) Value: 6
  misc_feature: MA Experiment 108527 PARAMETER Experiment Name: Zm_5mM_NO_P Parameter: Tissue Value: Aerial
  misc_feature: MA Experiment 108527 PARAMETER Experiment Name: Zm_5mM_NO_P Parameter: Treatment Value: 5mM NO vs. No Treatment
  misc_feature: MA Experiment ID: 108535 Result: Down-regulated in Transcription
  misc_feature: MA Experiment 108535 PARAMETER Experiment Name: Zm_Meristem_P Parameter: Age (day) Value: 8
  misc_feature: MA Experiment 108535 PARAMETER Experiment Name: Zm_Meristem_P Parameter: Organism Value: Zea mays
  misc_feature: MA Experiment 108535 PARAMETER Experiment Name: Zm_Meristem_P Parameter: Plant Line Value: 35A19
  misc_feature: MA Experiment 108535 PARAMETER Experiment Name: Zm_Meristem_P Parameter: Tissue Value: Root Meristem vs. Above Root Meristem
  misc_feature: MA Experiment ID: 108547 Result: Up-regulated in Transcription
  misc_feature: MA Experiment 108547 PARAMETER Experiment Name: Zm_Imbibed_Seeds_P Parameter: Age (day) Value: 4 vs. 2
  misc_feature: MA Experiment 108547 PARAMETER Experiment Name: Zm_Imbibed_Seeds_P Parameter: Organism Value: Zea mays
  misc_feature: MA Experiment 108547 PARAMETER Experiment Name: Zm_Imbibed_Seeds_P Parameter: Plant Line Value: 35A19
  misc_feature: MA Experiment 108547 PARAMETER Experiment Name: Zm_Imbibed_Seeds_P Parameter: Tissue Value: Aerial vs. Embryo
  misc_feature: MA Experiment ID: 108556 Result: Down-regulated in Transcription
  misc_feature: MA Experiment 108556 PARAMETER Experiment Name: Zm_Drought_P Parameter: Age (day) Value: 9
  misc_feature: MA Experiment 108556 PARAMETER Experiment Name: Zm_Drought_P Parameter: Organism Value: Zea mays
  misc_feature: MA Experiment 108556 PARAMETER Experiment Name: Zm_Drought_P Parameter: Plant Line Value: 35A19
  misc_feature: MA Experiment 108556 PARAMETER Experiment Name: Zm_Drought_P Parameter: Timepoint (hr) Value: 24
  misc_feature: MA Experiment 108556 PARAMETER Experiment Name: Zm_Drought_P Parameter: Tissue Value: Aerial
  misc_feature: MA Experiment 108556 PARAMETER Experiment Name: Zm_Drought_P Parameter: Treatment Value: Drought vs. No Drought
actccaatctccacagtccacaccctccgggcgccggcctccactcctccattcttgtcccggaaccatgtcgatgcttctctcgcgaaggttctcctgcgccctcgcccgcgccccgtcgctcgtacggggccggccccttcctccctgcgccgcccgcaccacccctccggctcccagctctccgccccgccgcctcatgtcgtcctcctctgccgggtggcagcactcctcgcaccgtcccccgccgccgccgccgcctcctcctcatcccggtgctgacaaggaccagctgttcagggggctggaggcggcgctgggcaccgcgttcagctccgagccgctggcgccgccaccgcagcctatgatcctcgtcatcagcgggcccagcggtgtcggcaaggacgccgtcatcaagaggctgcaggaggagagggaagggatccatttcgttgtcaccgcgacaagcagggcgatgaggccaggtgaagttgaagggaaagactattactttgtcagtaaggaggaatttctgacgatgattgagagggaggagttgctcgagtatgctcttgtttatggggagtacaaggggatccccaaacagcagattcgtgactacatggctaaaggctgtgacattgttctgagagtggacattcaaggagcagcgacgttaagacagatacttggtgaatctgcggttttcatatttttagttgctgagagtgaagaggcacttgttaaaaggctaatccaccgtaaaacagaaacatcagatatgcttcttgtcagagttgcaacagccagggaggaggtgaaacacatgaagaatttcgactatgtggttgtaaacgctcaagggaaacttgaggaggctgttaaacaagtggaatctatcattgatgctgagaagtctaaaattcacaagcggcatgtcaatatctaagctaaggatcatgtgatttatgcctagtgtcttcatctctataaaggaaaattatctgtccaagtctactgaagcgtgatgaaatgactcaggtttcagtagccagaaagttcaatggattgctgagttacaagaatatggcatgttctgtttaagaaatttccctcaccacaaccggggcagcacaatctctgggatatatacacgactctcttgttatttgtctctttttttccctttgattttttagctctgcctggaggaatctggaaggctgtaccaaactagttctgggtgaatcttaagtgatgttctatccttcg

SEQ ID NO: 3693 - protein, 315 aa, Zea mays subsp. mays
  peptide (1)..(315): Ceres Seq. ID no. 12402635
  misc_feature (156)..(260): Pfam Name: Guanylate kinase Pfam Description: Guanylate kinase
  misc_feature (122)..(315): Homolog of NCBI NO: 15894995 NR Description: Guanylate kinase, YLOD B.subtilis ortholog
  misc_feature (122)..(315): Homolog of NCBI NO: 23098957 NR Description: guanylate kinase [Oceanobacillus iheyensis
  misc_feature (120)..(310): Homolog of NCBI NO: 20807954 NR Description: Guanylate kinase [Thermoanaerobacter
  misc_feature (122)..(315): Homolog of NCBI NO: 22095797 NR Description: Guanylate kinase (GMP kinase)
  misc_feature (122)..(315): Homolog of NCBI NO: 18310730 NR Description: guanylate kinase [Clostridium perfringens]
  misc_feature (122)..(307): Homolog of NCBI NO: 15615075 NR Description: guanylate kinase [Bacillus halodurans]
  misc_feature (122)..(310): Homolog of NCBI NO: 28210904 NR Description: guanylate kinase [Clostridium tetani E88]
  misc_feature (32)..(315): Homolog of NCBI NO: 22969911 NR Description: hypothetical protein [Chloroflexus aurantiacus]
  misc_feature (82)..(315): Homolog of NCBI NO: 6862924 NR Description: putative guanylate kinase [Arabidopsis thaliana]
  misc_feature (59)..(315): Homolog of NCBI NO: 18397500 NR Description: putative guanylate kinase
LQSPQSTPSGRRPPLLHSCPGTMSMLLSRRFSCALARAPSLVRGRPLPPCAARTTPPAPSSPPRRLMSSSSAGWQHSSHRPPPPPPPPPHPGADKDQLFRGLEAALGTAFSSEPLAPPPQPMILVISGPSGVGKDAVIKRLQEEREGIHFVVTATSRAMRPGEVEGKDYYFVSKEEFLTMIEREELLEYALVYGEYKGIPKQQIRDYMAKGCDIVLRVDIQGAATLRQILGESAVFIFLVAESEEALVKRLIHRKTETSDMLLVRVATAREEVKHMKNFDYVVVNAQGKLEEAVKQVESIIDAEKSKIHKRHVNI

SEQ ID NO: 3694 - protein, 293 aa, Zea mays subsp. mays
  peptide (1)..(293): Ceres Seq. ID no. 12402636
  misc_feature (134)..(238): Pfam Name: Guanylate kinase Pfam Description: Guanylate kinase
  misc_feature (100)..(293): Homolog of NCBI NO: 23098957 NR Description: guanylate kinase [Oceanobacillus iheyensis
  misc_feature (98)..(288): Homolog of NCBI NO: 20807954 NR Description: Guanylate kinase [Thermoanaerobacter
  misc_feature (100)..(293): Homolog of NCBI NO: 22095797 NR Description: Guanylate kinase (GMP kinase)
  misc_feature (100)..(293): Homolog of NCBI NO: 18310730 NR Description: guanylate kinase [Clostridium perfringens]
  misc_feature (100)..(285): Homolog of NCBI NO: 15615075 NR Description: guanylate kinase [Bacillus halodurans]
  misc_feature (100)..(293): Homolog of NCBI NO: 15894995 NR Description: Guanylate kinase, YLOD B.subtilis ortholog
  misc_feature (100)..(288): Homolog of NCBI NO: 28210904 NR Description: guanylate kinase [Clostridium tetani E88]
  misc_feature (10)..(293): Homolog of NCBI NO: 22969911 NR Description: hypothetical protein [Chloroflexus aurantiacus]
  misc_feature (60)..(293): Homolog of NCBI NO: 6862924 NR Description: putative guanylate kinase [Arabidopsis thaliana]
  misc_feature (37)..(293): Homolog of NCBI NO: 18397500 NR Description: putative guanylate kinase
MSMLLSRRFSCALARAPSLVRGRPLPPCAARTTPPAPSSPPRRLMSSSSAGWQHSSHRPPPPPPPPPHPGADKDQLFRGLEAALGTAFSSEPLAPPPQPMILVISGPSGVGKDAVIKRLQEEREGIHFVVTATSRAMRPGEVEGKDYYFVSKEEFLTMIEREELLEYALVYGEYKGIPKQQIRDYMAKGCDIVLRVDIQGAATLRQILGESAVFIFLVAESEEALVKRLIHRKTETSDMLLVRVATAREEVKHMKNFDYVVVNAQGKLEEAVKQVESIIDAEKSKIHKRHVNI

SEQ ID NO: 3695 - protein, 291 aa, Zea mays subsp. mays
  peptide (1)..(291): Ceres Seq. ID no. 12402637
  misc_feature (132)..(236): Pfam Name: Guanylate kinase Pfam Description: Guanylate kinase
  misc_feature (98)..(291): Homolog of NCBI NO: 15894995 NR Description: Guanylate kinase, YLOD B.subtilis ortholog
  misc_feature (98)..(291): Homolog of NCBI NO: 23098957 NR Description: guanylate kinase [Oceanobacillus iheyensis
  misc_feature (96)..(286): Homolog of NCBI NO: 20807954 NR Description: Guanylate kinase [Thermoanaerobacter
  misc_feature (98)..(291): Homolog of NCBI NO: 22095797 NR Description: Guanylate kinase (GMP kinase)
  misc_feature (98)..(291): Homolog of NCBI NO: 18310730 NR Description: guanylate kinase [Clostridium perfringens]
  misc_feature (98)..(283): Homolog of NCBI NO: 15615075 NR Description: guanylate kinase [Bacillus halodurans]
  misc_feature (98)..(286): Homolog of NCBI NO: 28210904 NR Description: guanylate kinase [Clostridium tetani E88]
  misc_feature (8)..(291): Homolog of NCBI NO: 22969911 NR Description: hypothetical protein [Chloroflexus aurantiacus]
  misc_feature (58)..(291): Homolog of NCBI NO: 6862924 NR Description: putative guanylate kinase [Arabidopsis thaliana]
  misc_feature (35)..(291): Homolog of NCBI NO: 18397500 NR Description: putative guanylate kinase
MLLSRRFSCALARAPSLVRGRPLPPCAARTTPPAPSSPPRRLMSSSSAGWQHSSHRPPPPPPPPPHPGADKDQLFRGLEAALGTAFSSEPLAPPPQPMILVISGPSGVGKDAVIKRLQEEREGIHFVVTATSRAMRPGEVEGKDYYFVSKEEFLTMIEREELLEYALVYGEYKGIPKQQIRDYMAKGCDIVLRVDIQGAATLRQILGESAVFIFLVAESEEALVKRLIHRKTETSDMLLVRVATAREEVKHMKNFDYVVVNAQGKLEEAVKQVESIIDAEKSKIHKRHVNI

SEQ ID NO: 3696 - DNA, 1168 bp, Zea mays subsp. mays
  misc_feature (1)..(1168): Ceres Seq. ID no. 12356054
  misc_feature: MA Experiment ID: 108528 Result: Up-regulated in Transcription
  misc_feature: MA Experiment 108528 PARAMETER Experiment Name: Zm_Imbibed_Seeds_P Parameter: Age (day) Value: 5 vs. 2
  misc_feature: MA Experiment 108528 PARAMETER Experiment Name: Zm_Imbibed_Seeds_P Parameter: Organism Value: Zea mays
  misc_feature: MA Experiment 108528 PARAMETER Experiment Name: Zm_Imbibed_Seeds_P Parameter: Plant Line Value: 35A19
  misc_feature: MA Experiment 108528 PARAMETER Experiment Name: Zm_Imbibed_Seeds_P Parameter: Tissue Value: Aerial vs. Embryo
  misc_feature: MA Experiment ID: 108543 Result: Down-regulated in Transcription
  misc_feature: MA Experiment ID: 108544 Result: Up-regulated in Transcription
  misc_feature: MA Experiment ID: 20000478 Result: Up-regulated in Transcription
  misc_feature: MA Experiment 20000478 PARAMETER Experiment Name: Zm_5mM_SA_P Parameter: Age (day) Value: 11
  misc_feature: MA Experiment 20000478 PARAMETER Experiment Name: Zm_5mM_SA_P Parameter: Organism Value: Zea mays
  misc_feature: MA Experiment 20000478 PARAMETER Experiment Name: Zm_5mM_SA_P Parameter: Plant Line Value: 35A19
  misc_feature: MA Experiment 20000478 PARAMETER Experiment Name: Zm_5mM_SA_P Parameter: Timepoint (hr) Value: 72
  misc_feature: MA Experiment 20000478 PARAMETER Experiment Name: Zm_5mM_SA_P Parameter: Tissue Value: Aerial
  misc_feature: MA Experiment 20000478 PARAMETER Experiment Name: Zm_5mM_SA_P Parameter: Treatment Value: 5mM SA vs. No Treatment
agcactcagaccaccaccagcagttctgagctagctatggcgatgatgatgagagcattggcagcagcggccatcctggccacggcgtttgccgtgtcggcacgagccgagcccccgcagtgcggcgccaactccaccacggcgctctgcccctactgcctgtgctgcagcaaatggggcttctgcggcagcaccgaagcctactgcggcaacggctgccagagccagtgcgaccgctgcaacgccaccgtcgcgtccatcgtcacgcgggagctcttcgacgagctgctgctgcaccgcaacgacctcaggtgccccgcccagggcttctacacctacgactcgttcatcgccgcggcgggcgccgacgcttccgacggcttcggcaccacgggcgccgtcgacatccggaagcgcgaggtcgccgcgttcctggcggagccggcgcaccggacctcgggcggctgggacggcgcgcccaacggcacctacgcctggggcttctgctacaagccggccggcgcccagaacgtcacggaccccgtcgccttcttcgagacggccatcgcgagctggatgacggcgtcggcgcgcccgcccaagccgtcgtgccacgacgtcgtcaccgagcagtggaccccctcggacgccgacaaggccgcggggaggctgcggggcttcggcgtcatcgccaacatcatcaacggcgacgccgagtgcggccgcggccccgacgccggtggccaggaccggatcggcttctacaagcgcttctgcgacatccttggcgtcagctacggcgacaacttggactgcttcgaccagaagcccttcggcgctgcccaccgccgccgccttagctgaaactaccagcggcccgcgtcacgctgacgcgtaaaagaataatgcatgcatgggcaccgcacagggcacaaatcaataacagctctcttttaaataatctgcatgcttattcgcttgcataagcatgcacacgtagtagatcgtgcatgtgtagggcgagcatgtttactttcatcccgggcggccggggttgtgtcgtcgtgcgagttgccgtgaagatgtactatgcctcatgcatgttttctatgccatatattatataaataaatgcataaaaaaactgagctgcaacgatggcagcgcc

SEQ ID NO: 3697 - protein, 287 aa, Zea mays subsp. mays
  peptide (1)..(287): Ceres Seq. ID no. 12356055
  misc_feature (38)..(77): Pfam Name: Chitin recognition protein Pfam Description: Chitin recognition protein
  misc_feature (17)..(170): Homolog of NCBI NO: 481478 NR Description: chitinase (EC 3.2.1.14) - wheat
  misc_feature (179)..(278): Homolog of NCBI NO: 12407647 NR Description: 31.7 kDa class I endochitinase-antifreeze protein
  misc_feature (17)..(170): Homolog of NCBI NO: 12407647 NR Description: 31.7 kDa class I endochitinase-antifreeze protein
  misc_feature (185)..(287): Homolog of NCBI NO: 6164585 NR Description: chitinase [Poa pratensis]
  misc_feature (17)..(171): Homolog of NCBI NO: 6164585 NR Description: chitinase [Poa pratensis]
  misc_feature (179)..(280): Homolog of NCBI NO: 6164588 NR Description: chitinase [Poa pratensis]
  misc_feature (17)..(171): Homolog of NCBI NO: 6164588 NR Description: chitinase [Poa pratensis]
  misc_feature (17)..(80): Homolog of NCBI NO: 38371990 NR Description: chitinase; BoCHI1 [Bambusa oldhamii]
  misc_feature (84)..(171): Homolog of NCBI NO: 38371990 NR Description: chitinase; BoCHI1 [Bambusa oldhamii]
  misc_feature (180)..(280): Homolog of NCBI NO: 38371990 NR Description: chitinase; BoCHI1 [Bambusa oldhamii]
STQTTTSSSELAMAMMMRALAAAAILATAFAVSARAEPPQCGANSTTALCPYCLCCSKWGFCGSTEAYCGNGCQSQCDRCNATVASIVTRELFDELLLHRNDLRCPAQGFYTYDSFIAAAGADASDGFGTTGAVDIRKREVAAFLAEPAHRTSGGWDGAPNGTYAWGFCYKPAGAQNVTDPVAFFETAIASWMTASARPPKPSCHDVVTEQWTPSDADKAAGRLRGFGVIANIINGDAECGRGPDAGGQDRIGFYKRFCDILGVSYGDNLDCFDQKPFGAAHRRRLS

SEQ ID NO: 3698 - protein, 275 aa, Zea mays subsp. mays
  peptide (1)..(275): Ceres Seq. ID no. 12356056
  misc_feature (26)..(65): Pfam Name: Chitin recognition protein Pfam Description: Chitin recognition protein
  misc_feature (5)..(158): Homolog of NCBI NO: 481478 NR Description: chitinase (EC 3.2.1.14) - wheat
  misc_feature (167)..(266): Homolog of NCBI NO: 12407647 NR Description: 31.7 kDa class I endochitinase-antifreeze protein
  misc_feature (5)..(158): Homolog of NCBI NO: 12407647 NR Description: 31.7 kDa class I endochitinase-antifreeze protein
  misc_feature (173)..(275): Homolog of NCBI NO: 6164585 NR Description: chitinase [Poa pratensis]
  misc_feature (5)..(159): Homolog of NCBI NO: 6164585 NR Description: chitinase [Poa pratensis]
  misc_feature (167)..(268): Homolog of NCBI NO: 6164588 NR Description: chitinase [Poa pratensis]
  misc_feature (5)..(159): Homolog of NCBI NO: 6164588 NR Description: chitinase [Poa pratensis]
  misc_feature (5)..(68): Homolog of NCBI NO: 38371990 NR Description: chitinase; BoCHI1 [Bambusa oldhamii]
  misc_feature (72)..(159): Homolog of NCBI NO: 38371990 NR Description: chitinase; BoCHI1 [Bambusa oldhamii]
  misc_feature (168)..(268): Homolog of NCBI NO: 38371990 NR Description: chitinase; BoCHI1 [Bambusa oldhamii]
MAMMMRALAAAAILATAFAVSARAEPPQCGANSTTALCPYCLCCSKWGFCGSTEAYCGNGCQSQCDRCNATVASIVTRELFDELLLHRNDLRCPAQGFYTYDSFIAAAGADASDGFGTTGAVDIRKREVAAFLAEPAHRTSGGWDGAPNGTYAWGFCYKPAGAQNVTDPVAFFETAIASWMTASARPPKPSCHDVVTEQWTPSDADKAAGRLRGFGVIANIINGDAECGRGPDAGGQDRIGFYKRFCDILGVSYGDNLDCFDQKPFGAAHRRRLS

SEQ ID NO: 3699 - protein, 273 aa, Zea mays subsp. mays
  peptide (1)..(273): Ceres Seq. ID no. 12356057
  misc_feature (24)..(63): Pfam Name: Chitin recognition protein Pfam Description: Chitin recognition protein
  misc_feature (3)..(156): Homolog of NCBI NO: 481478 NR Description: chitinase (EC 3.2.1.14) - wheat
  misc_feature (165)..(264): Homolog of NCBI NO: 12407647 NR Description: 31.7 kDa class I endochitinase-antifreeze protein
  misc_feature (3)..(156): Homolog of NCBI NO: 12407647 NR Description: 31.7 kDa class I endochitinase-antifreeze protein
  misc_feature (171)..(273): Homolog of NCBI NO: 6164585 NR Description: chitinase [Poa pratensis]
  misc_feature (3)..(157): Homolog of NCBI NO: 6164585 NR Description: chitinase [Poa pratensis]
  misc_feature (165)..(266): Homolog of NCBI NO: 6164588 NR Description: chitinase [Poa pratensis]
  misc_feature (3)..(157): Homolog of NCBI NO: 6164588 NR Description: chitinase [Poa pratensis]
  misc_feature (3)..(66): Homolog of NCBI NO: 38371990 NR Description: chitinase; BoCHI1 [Bambusa oldhamii]
  misc_feature (70)..(157): Homolog of NCBI NO: 38371990 NR Description: chitinase; BoCHI1 [Bambusa oldhamii]
  misc_feature (166)..(266): Homolog of NCBI NO: 38371990 NR Description: chitinase; BoCHI1 [Bambusa oldhamii]
MMMRALAAAAILATAFAVSARAEPPQCGANSTTALCPYCLCCSKWGFCGSTEAYCGNGCQSQCDRCNATVASIVTRELFDELLLHRNDLRCPAQGFYTYDSFIAAAGADASDGFGTTGAVDIRKREVAAFLAEPAHRTSGGWDGAPNGTYAWGFCYKPAGAQNVTDPVAFFETAIASWMTASARPPKPSCHDVVTEQWTPSDADKAAGRLRGFGVIANIINGDAECGRGPDAGGQDRIGFYKRFCDILGVSYGDNLDCFDQKPFGAAHRRRLS

SEQ ID NO: 3700 - DNA, 1071 bp, Zea mays subsp. mays
  misc_feature (1)..(1071): Ceres Seq. ID no. 13624136
  misc_feature: MA Experiment ID: 108522 Result: Down-regulated in Transcription
  misc_feature: MA Experiment 108522 PARAMETER Experiment Name: Zm_42deg_Heat_P Parameter: Age (day) Value: 8
  misc_feature: MA Experiment 108522 PARAMETER Experiment Name: Zm_42deg_Heat_P Parameter: Organism Value: Zea mays
  misc_feature: MA Experiment 108522 PARAMETER Experiment Name: Zm_42deg_Heat_P Parameter: Plant Line Value: 35A19
  misc_feature: MA Experiment 108522 PARAMETER Experiment Name: Zm_42deg_Heat_P Parameter: Temperature (deg C) Value: 42 vs. 22
  misc_feature: MA Experiment 108522 PARAMETER Experiment Name: Zm_42deg_Heat_P Parameter: Timepoint (hr) Value: 1
  misc_feature: MA Experiment 108522 PARAMETER Experiment Name: Zm_42deg_Heat_P Parameter: Tissue Value: Aerial
agtcaactaccaattttctcgctcagacatacagaattacagagtcgaagtgcgctgtggcctgtggactctcccctccccaactccggcgaagggagcagaaacgttggcgtgttggttgggtggcgtcggcatggacgaggcaacgaagaagaatgtggaggctacggtgctggagatcctccggggctccgatatggagtccgtgacggagtacaaggtccgcgccgctgccagcgaccgcctcggcatcgacctctccatacccgaccgcaagctcttcgtccgcggcgtcgttgaggaatacctactttcactctcctccaaggaggaggcgaaggcggaggaggagggcgtcactggcagggagagcaagggcaaggaacacgaagaggaggacgaagaggatgacgatgaggaggaggatgaaggtaagggtggcgggaagagagagtacgatgaccaaggtgaccttatcctgtgccgcctttcgagcaagaggagggtgactttatcggagtttaagggcaggtcgttggtgtccatccgcgagttctacgtgaaggacggcaaggagatgccctccgccaaaggtatcagtatgactttggagcagtgggaagcattttgcaatgctgtacctgcaatagaggatgccatcaaaaagcttgaagattcagactgaactggttttaagagcctcttcttatgcccgtgtcaaatgaaaaagcctgggaagcatttcgcaatgctgtatctgcaatagatgatgcatgaaaaagcttgaagattcagacagaactggtttaggagcctcttattttgcctgtatcaaataaaaaagcctatttctgacccttaacgagggccatatatgtgtcttgcaagagctaagttctgtaaaagatttctacatgtaccatgtgtaggagttaggatagagtgatagacgtactgctgcatacagttcggaatatttgctagtaacaagtaatctaccattaggtggcctggagttcacatgctatgctatggatgatcggggatgtgtcctagcaatagcaagctcag

SEQ ID NO: 3701 - protein, 227 aa, Zea mays subsp. mays
  peptide (1)..(227): Ceres Seq. ID no. 13624137
  misc_feature (130)..(220): Pfam Name: Transcriptional Coactivator p15 (PC4) Pfam Description: Transcriptional Coactivator p15 (PC4)
  misc_feature (45)..(227): Homolog of NCBI NO: 34910378 NR Description: P0684B02.23 [Oryza sativa (japonica
  misc_feature (95)..(224): Homolog of NCBI NO: 13699910 NR Description: putative transcriptional coactivator [Brassica
  misc_feature (66)..(224): Homolog of NCBI NO: 15236980 NR Description: transcriptional co-activator (KELP) -related
  misc_feature (45)..(224): Homolog of NCBI NO: 16610191 NR Description: PBF68 protein [Nicotiana tabacum]
  misc_feature (45)..(138): Homolog of NCBI NO: 13699910 NR Description: putative transcriptional coactivator [Brassica
  misc_feature (124)..(223): Homolog of NCBI NO: 15242365 NR Description: transcriptional co-activator (KIWI) -related
  misc_feature (45)..(137): Homolog of NCBI NO: 15236980 NR Description: transcriptional co-activator (KELP) -related
  misc_feature (150)..(222): Homolog of NCBI NO: 40739125 NR Description: hypothetical protein AN5806.2 [Aspergillus
  misc_feature (126)..(225): Homolog of NCBI NO: 15242363 NR Description: transcriptional co-activator-related protein
  misc_feature (100)..(217): Homolog of NCBI NO: 17542398 NR Description: Transcriptional Coactivator p15 (PC4) (14.4 kD)
VNYQFSRSDIQNYRVEVRCGLWTLPSPTPAKGAETLACWLGGVGMDEATKKNVEATVLEILRGSDMESVTEYKVRAAASDRLGIDLSIPDRKLFVRGVVEEYLLSLSSKEEAKAEEEGVTGRESKGKEHEEEDEEDDDEEEDEGKGGGKREYDDQGDLILCRLSSKRRVTLSEFKGRSLVSIREFYVKDGKEMPSAKGISMTLEQWEAFCNAVPAIEDAIKKLEDSD

SEQ ID NO: 3702 - protein, 183 aa, Zea mays subsp. mays
  peptide (1)..(183): Ceres Seq. ID no. 13624138
  misc_feature (86)..(176): Pfam Name: Transcriptional Coactivator p15 (PC4) Pfam Description: Transcriptional Coactivator p15 (PC4)
  misc_feature (1)..(183): Homolog of NCBI NO: 34910378 NR Description: P0684B02.23 [Oryza sativa (japonica
  misc_feature (51)..(180): Homolog of NCBI NO: 13699910 NR Description: putative transcriptional coactivator [Brassica
  misc_feature (22)..(180): Homolog of NCBI NO: 15236980 NR Description: transcriptional co-activator (KELP) -related
  misc_feature (1)..(180): Homolog of NCBI NO: 16610191 NR Description: PBF68 protein [Nicotiana tabacum]
  misc_feature (1)..(94): Homolog of NCBI NO: 13699910 NR Description: putative transcriptional coactivator [Brassica
  misc_feature (80)..(179): Homolog of NCBI NO: 15242365 NR Description: transcriptional co-activator (KIWI) -related
  misc_feature (1)..(93): Homolog of NCBI NO: 15236980 NR Description: transcriptional co-activator (KELP) -related
  misc_feature (106)..(178): Homolog of NCBI NO: 40739125 NR Description: hypothetical protein AN5806.2 [Aspergillus
  misc_feature (82)..(181): Homolog of NCBI NO: 15242363 NR Description: transcriptional co-activator-related protein
  misc_feature (56)..(173): Homolog of NCBI NO: 17542398 NR Description: Transcriptional Coactivator p15 (PC4) (14.4 kD)
MDEATKKNVEATVLEILRGSDMESVTEYKVRAAASDRLGIDLSIPDRKLFVRGVVEEYLLSLSSKEEAKAEEEGVTGRESKGKEHEEEDEEDDDEEEDEGKGGGKREYDDQGDLILCRLSSKRRVTLSEFKGRSLVSIREFYVKDGKEMPSAKGISMTLEQWEAFCNAVPAIEDAIKKLEDSD

SEQ ID NO: 3703 - protein, 162 aa, Zea mays subsp. mays
  peptide (1)..(162): Ceres Seq. ID no. 13624139
  misc_feature (65)..(155): Pfam Name: Transcriptional Coactivator p15 (PC4) Pfam Description: Transcriptional Coactivator p15 (PC4)
  misc_feature (1)..(162): Homolog of NCBI NO: 34910378 NR Description: P0684B02.23 [Oryza sativa (japonica
  misc_feature (30)..(159): Homolog of NCBI NO: 13699910 NR Description: putative transcriptional coactivator [Brassica
  misc_feature (1)..(159): Homolog of NCBI NO: 15236980 NR Description: transcriptional co-activator (KELP) -related
  misc_feature (1)..(159): Homolog of NCBI NO: 16610191 NR Description: PBF68 protein [Nicotiana tabacum]
  misc_feature (1)..(73): Homolog of NCBI NO: 13699910 NR Description: putative transcriptional coactivator [Brassica
  misc_feature (59)..(158): Homolog of NCBI NO: 15242365 NR Description: transcriptional co-activator (KIWI) -related
  misc_feature (1)..(72): Homolog of NCBI NO: 15236980 NR Description: transcriptional co-activator (KELP) -related
  misc_feature (85)..(157): Homolog of NCBI NO: 40739125 NR Description: hypothetical protein AN5806.2 [Aspergillus
  misc_feature (61)..(160): Homolog of NCBI NO: 15242363 NR Description: transcriptional co-activator-related protein
  misc_feature (35)..(152): Homolog of NCBI NO: 17542398 NR Description: Transcriptional Coactivator p15 (PC4) (14.4 kD)
MESVTEYKVRAAASDRLGIDLSIPDRKLFVRGVVEEYLLSLSSKEEAKAEEEGVTGRESKGKEHEEEDEEDDDEEEDEGKGGGKREYDDQGDLILCRLSSKRRVTLSEFKGRSLVSIREFYVKDGKEMPSAKGISMTLEQWEAFCNAVPAIEDAIKKLEDSD

SEQ ID NO: 3704 - DNA, 1125 bp, Zea mays subsp. mays
  misc_feature (1)..(1125): Ceres Seq. ID no. 12353686
  misc_feature: MA Experiment ID: 108527 Result: Down-regulated in Transcription
  misc_feature: MA Experiment 108527 PARAMETER Experiment Name: Zm_5mM_NO_P Parameter: Age (day) Value: 8
  misc_feature: MA Experiment 108527 PARAMETER Experiment Name: Zm_5mM_NO_P Parameter: Organism Value: Zea mays
  misc_feature: MA Experiment 108527 PARAMETER Experiment Name: Zm_5mM_NO_P Parameter: Plant Line Value: 35A19
  misc_feature: MA Experiment 108527 PARAMETER Experiment Name: Zm_5mM_NO_P Parameter: Timepoint (hr) Value: 6
  misc_feature: MA Experiment 108527 PARAMETER Experiment Name: Zm_5mM_NO_P Parameter: Tissue Value: Aerial
  misc_feature: MA Experiment 108527 PARAMETER Experiment Name: Zm_5mM_NO_P Parameter: Treatment Value: 5mM NO vs. No Treatment
  misc_feature: MA Experiment ID: 108530 Result: Up-regulated in Transcription
  misc_feature: MA Experiment 108530 PARAMETER Experiment Name: Zm_Imbibed_Seeds_P Parameter: Age (day) Value: 6 vs. 2
  misc_feature: MA Experiment 108530 PARAMETER Experiment Name: Zm_Imbibed_Seeds_P Parameter: Organism Value: Zea mays
  misc_feature: MA Experiment 108530 PARAMETER Experiment Name: Zm_Imbibed_Seeds_P Parameter: Plant Line Value: 35A19
  misc_feature: MA Experiment 108530 PARAMETER Experiment Name: Zm_Imbibed_Seeds_P Parameter: Tissue Value: Aerial vs. Embryo
  misc_feature: MA Experiment ID: 108534 Result: Up-regulated in Transcription
  misc_feature: MA Experiment 108534 PARAMETER Experiment Name: Zm_4deg_Cold_P Parameter: Age (hr) Value: 8
  misc_feature: MA Experiment 108534 PARAMETER Experiment Name: Zm_4deg_Cold_P Parameter: Organism Value: Zea mays
  misc_feature: MA Experiment 108534 PARAMETER Experiment Name: Zm_4deg_Cold_P Parameter: Plant Line Value: 35A19
  misc_feature: MA Experiment 108534 PARAMETER Experiment Name: Zm_4deg_Cold_P Parameter: Temperature (deg C) Value: 4 vs. 22
  misc_feature: MA Experiment 108534 PARAMETER Experiment Name: Zm_4deg_Cold_P Parameter: Timepoint (hr) Value: 6
  misc_feature: MA Experiment 108534 PARAMETER Experiment Name: Zm_4deg_Cold_P Parameter: Tissue Value: Aerial
  misc_feature: MA Experiment ID: 108542 Result: Down-regulated in Transcription
  misc_feature: MA Experiment 108542 PARAMETER Experiment Name: Zm_150mM_NaCl_P Parameter: Age (day) Value: 8
  misc_feature: MA Experiment 108542 PARAMETER Experiment Name: Zm_150mM_NaCl_P Parameter: Organism Value: Zea mays
  misc_feature: MA Experiment 108542 PARAMETER Experiment Name: Zm_150mM_NaCl_P Parameter: Plant Line Value: 35A19
  misc_feature: MA Experiment 108542 PARAMETER Experiment Name: Zm_150mM_NaCl_P Parameter: Timepoint (hr) Value: 6
  misc_feature: MA Experiment 108542 PARAMETER Experiment Name: Zm_150mM_NaCl_P Parameter: Tissue Value: Aerial
  misc_feature: MA Experiment 108542 PARAMETER Experiment Name: Zm_150mM_NaCl_P Parameter: Treatment Value: 150mM NaCl vs. No Treatment
  misc_feature: MA Experiment ID: 20000480 Result: Down-regulated in Transcription
  misc_feature: MA Experiment 20000480 PARAMETER Experiment Name: Zm_Drought_P Parameter: Age (day) Value: 11
  misc_feature: MA Experiment 20000480 PARAMETER Experiment Name: Zm_Drought_P Parameter: Organism Value: Zea mays
  misc_feature: MA Experiment 20000480 PARAMETER Experiment Name: Zm_Drought_P Parameter: Plant Line Value: 35A19
  misc_feature: MA Experiment 20000480 PARAMETER Experiment Name: Zm_Drought_P Parameter: Timepoint (hr) Value: 72
  misc_feature: MA Experiment 20000480 PARAMETER Experiment Name: Zm_Drought_P Parameter: Tissue Value: Aerial
  misc_feature: MA Experiment 20000480 PARAMETER Experiment Name: Zm_Drought_P Parameter: Treatment Value: Drought vs. No Drought
  misc_feature: MA Experiment ID: 20000626 Result: Down-regulated in Transcription
  misc_feature: MA Experiment 20000626 PARAMETER Experiment Name: Zm_Herbicide-Treatments_P Parameter: Timepoint (hr) Value: 12
  misc_feature: MA Experiment 20000626 PARAMETER Experiment Name: Zm_Herbicide-Treatments_P Parameter: Tissue Value: Aerial
  misc_feature: MA Experiment 20000626 PARAMETER Experiment Name: Zm_Herbicide-Treatments_P Parameter: Treatment Value: Roundup vs. No Treatment
  misc_feature: MA Experiment ID: 20001608 Result: Up-regulated in Transcription
  misc_feature: MA Experiment 20001608 PARAMETER Experiment Name: Zm_50ppm_KNO3_L-to-H_P Parameter: Age (day) Value: 21
  misc_feature: MA Experiment 20001608 PARAMETER Experiment Name: Zm_50ppm_KNO3_L-to-H_P Parameter: Organism Value: Zea mays
  misc_feature: MA Experiment 20001608 PARAMETER Experiment Name: Zm_50ppm_KNO3_L-to-H_P Parameter: Plant Line Value: 35A19
  misc_feature: MA Experiment 20001608 PARAMETER Experiment Name: Zm_50ppm_KNO3_L-to-H_P Parameter: Timepoint (hr) Value: 48
  misc_feature: MA Experiment 20001608 PARAMETER Experiment Name: Zm_50ppm_KNO3_L-to-H_P Parameter: Tissue Value: Shoots
  misc_feature: MA Experiment 20001608 PARAMETER Experiment Name: Zm_50ppm_KNO3_L-to-H_P Parameter: Treatment Value: 50ppm KNO3 vs. 50ppm KCl
actcagacgccacctgttcttccttcctctcctctctgcaacgcgtcgggaagcagctgccagccatggcaatggcgtcgtcgtcgagcgggctgaggagctgcagcgcattgggcgtgcccagcctgctggcgccgtcgacgtcgtcgtcgtcccggtccggccgcctgccgttctgcgcccacgccaccacctccggccgcgtcaccatgtccgcggagtggatgcccgggcagccccgccccgcccacctcgacggctcctcgccaggtgacttcggcttcgaccccctgggcctggccacggtgccggagaacttcgagcggttcaaggagtcggaggtgtaccactgccggtgggccatgctggccgtgccgggggtgctggtgccggaggcgctggggctgggcaactgggtgaaggcgcaggagtgggcggccgtccccggcgggcaggccacgtacctgggcgccccggtgccgtggggcacgctgccgaccatcctggcggtcgagttcgtggccatcgccttcgccgagcaccagcgcaccatggagaaggaccccgagaagaagaagtaccccggcggcgccttcgacccgctcggcttctccagggaccccgccaagctcgaggagtacaagctcaaggagatcaagaacggccgcctcgccatgctggccttcgtcggcttctgcgtccagcagtcggcgtacccgggcaccggtccgctcgagaaccttgccgcccacctcgccgacccctggcacaacaacatcggagacatcatcatccctagatcgatctccccttgacaattatattggttgattattacgactaggcactaggcactgcctgcctgcgtgcaggagcagtacaacgacgacgacggcgagtcggcgacttccctcccgcccggaaagctctcgtaatctaaaggaaaaggaaattggtaccatgttgtgcacttctagcatgcatgacagcaatcgcaagcttcttcctcagccactaacctctatgtacattttcagcgcaagatcattgtcgacagtagtatacataaaagtgtacacaatatactgaacaaacaaccaagacacaagtgaatgtaatttggcg

SEQ ID NO: 3705 - protein, 270 aa, Zea mays subsp. mays
  peptide (1)..(270): Ceres Seq. ID no. 12353687
  misc_feature (79)..(236): Pfam Name: Chlorophyll A-B binding protein Pfam Description: Chlorophyll A-B binding protein
  misc_feature (67)..(270): Homolog of NCBI NO: 99485 NR Description: chlorophyll a/b-binding protein type 1 precursor,
  misc_feature (27)..(270): Homolog of NCBI NO: 115764 NR Description: Chlorophyll A-B binding protein 6A, chloroplast
  misc_feature (27)..(270): Homolog of NCBI NO: 82079 NR Description: chlorophyll a/b-binding protein type I precursor
  misc_feature (24)..(265): Homolog of NCBI NO: 15233115 NR Description: light-harvesting chlorophyll a/b binding protein
  misc_feature (24)..(265): Homolog of NCBI NO: 13265501 NR Description: AT3g54890 [Arabidopsis thaliana]
  misc_feature (27)..(270): Homolog of NCBI NO: 82078 NR Description: chlorophyll a/b-binding protein type I precursor
  misc_feature (27)..(270): Homolog of NCBI NO: 625547 NR Description: chlorophyll a/b-binding protein type I - common
  misc_feature (52)..(268): Homolog of NCBI NO: 542128 NR Description: chlorophyll a/b-binding protein type Ib, 21K
  misc_feature (26)..(268): Homolog of NCBI NO: 6685157 NR Description: chlorophyll a/b binding protein precursor
  misc_feature (27)..(270): Homolog of NCBI NO: 3789954 NR Description: chlorophyll a/b-binding protein precursor [Oryza
SDATCSSFLSSLQRVGKQLPAMAMASSSSGLRSCSALGVPSLLAPSTSSSSRSGRLPFCAHATTSGRVTMSAEWMPGQPRPAHLDGSSPGDFGFDPLGLATVPENFERFKESEVYHCRWAMLAVPGVLVPEALGLGNWVKAQEWAAVPGGQATYLGAPVPWGTLPTILAVEFVAIAFAEHQRTMEKDPEKKKYPGGAFDPLGFSRDPAKLEEYKLKEIKNGRLAMLAFVGFCVQQSAYPGTGPLENLAAHLADPWHNNIGDIIIPRSISP

SEQ ID NO: 3706 - protein, 249 aa, Zea mays subsp. mays
  peptide (1)..(249): Ceres Seq. ID no. 12353688
  misc_feature (58)..(215): Pfam Name: Chlorophyll A-B binding protein Pfam Description: Chlorophyll A-B binding protein
  misc_feature (46)..(249): Homolog of NCBI NO: 99485 NR Description: chlorophyll a/b-binding protein type 1 precursor,
  misc_feature (6)..(249): Homolog of NCBI NO: 115764 NR Description: Chlorophyll A-B binding protein 6A, chloroplast
  misc_feature (6)..(249): Homolog of NCBI NO: 82079 NR Description: chlorophyll a/b-binding protein type I precursor
  misc_feature (3)..(244): Homolog of NCBI NO: 15233115 NR Description: light-harvesting chlorophyll a/b binding protein
  misc_feature (3)..(244): Homolog of NCBI NO: 13265501 NR Description: AT3g54890 [Arabidopsis thaliana]
  misc_feature (6)..(249): Homolog of NCBI NO: 82078 NR Description: chlorophyll a/b-binding protein type I precursor
  misc_feature (6)..(249): Homolog of NCBI NO: 625547 NR Description: chlorophyll a/b-binding protein type I - common
  misc_feature (31)..(247): Homolog of NCBI NO: 542128 NR Description: chlorophyll a/b-binding protein type Ib, 21K
  misc_feature (5)..(247): Homolog of NCBI NO: 6685157 NR Description: chlorophyll a/b binding protein precursor
  misc_feature (6)..(249): Homolog of NCBI NO: 3789954 NR Description: chlorophyll a/b-binding protein precursor [Oryza
MAMASSSSGLRSCSALGVPSLLAPSTSSSSRSGRLPFCAHATTSGRVTMSAEWMPGQPRPAHLDGSSPGDFGFDPLGLATVPENFERFKESEVYHCRWAMLAVPGVLVPEALGLGNWVKAQEWAAVPGGQATYLGAPVPWGTLPTILAVEFVAIAFAEHQRTMEKDPEKKKYPGGAFDPLGFSRDPAKLEEYKLKEIKNGRLAMLAFVGFCVQQSAYPGTGPLENLAAHLADPWHNNIGDIIIPRSISP

SEQ ID NO: 3707 - protein, 247 aa, Zea mays subsp. mays
  peptide (1)..(247): Ceres Seq. ID no. 12353689
  misc_feature (56)..(213): Pfam Name: Chlorophyll A-B binding protein Pfam Description: Chlorophyll A-B binding protein
  misc_feature (44)..(247): Homolog of NCBI NO: 99485 NR Description: chlorophyll a/b-binding protein type 1 precursor,
  misc_feature (4)..(247): Homolog of NCBI NO: 115764 NR Description: Chlorophyll A-B binding protein 6A, chloroplast
  misc_feature (4)..(247): Homolog of NCBI NO: 82079 NR Description: chlorophyll a/b-binding protein type I precursor
  misc_feature (1)..(242): Homolog of NCBI NO: 15233115 NR Description: light-harvesting chlorophyll a/b binding protein
  misc_feature (1)..(242): Homolog of NCBI NO: 13265501 NR Description: AT3g54890 [Arabidopsis thaliana]
  misc_feature (4)..(247): Homolog of NCBI NO: 82078 NR Description: chlorophyll a/b-binding protein type I precursor
  misc_feature (4)..(247): Homolog of NCBI NO: 625547 NR Description: chlorophyll a/b-binding protein type I - common
  misc_feature (29)..(245): Homolog of NCBI NO: 542128 NR Description: chlorophyll a/b-binding protein type Ib, 21K
  misc_feature (3)..(245): Homolog of NCBI NO: 6685157 NR Description: chlorophyll a/b binding protein precursor
  misc_feature (4)..(247): Homolog of NCBI NO: 3789954 NR Description: chlorophyll a/b-binding protein precursor [Oryza
MASSSSGLRSCSALGVPSLLAPSTSSSSRSGRLPFCAHATTSGRVTMSAEWMPGQPRPAHLDGSSPGDFGFDPLGLATVPENFERFKESEVYHCRWAMLAVPGVLVPEALGLGNWVKAQEWAAVPGGQATYLGAPVPWGTLPTILAVEFVAIAFAEHQRTMEKDPEKKKYPGGAFDPLGFSRDPAKLEEYKLKEIKNGRLAMLAFVGFCVQQSAYPGTGPLENLAAHLADPWHNNIGDIIIPRSISP

SEQ ID NO: 3708 - DNA, 997 bp, Zea mays subsp. mays
  misc_feature (1)..(997): Ceres Seq. ID no. 12403223
  misc_feature: MA Experiment ID: 108543 Result: Down-regulated in Transcription
aaaaatagaaagaaaaaggaaaaaaagaaaaaccagacagccgccctaacggccaaacctccttggacacgactcgccgcacccatcccaatccgccgccgctgccatggccgacgagattgacacgaggccggctcccgcgggctcccgcggccgtcctgcgcacgctaccgaggacgacgacagggaggagggcgagatcgccaccgacgccccctcgcccgccctccccgccgcgcacccgctcgagcactcgtggaccttctggttcgacaacccgcacggcaagaacaagatggccgcctgggggagctccatacgacccatccacaccttctccaccgtagaggacttctggggcctctacaataatatccatcaccctagcaagttgatcggcggagctgacttccattgcttcaagaacaagattgagccaaaatgggaagatcctatttgtgctaatggcggtaaatggaccatcagctgtggaagaggaaaatctgacacgctttggctgcacaccctgttggctatgatcggcgaacaattcgactatggtgatgaaatttgtggagcagtggtcagcgtgcgtagcaagcaggaaagaatagctatctggacaaaaaatgctgctaatgaagctgctcagataagcatcgggaagcagtggaaggaatttctggattacaaggactccattggattcattgttcatgacgatgcaaagaagatggacaagggactgaagaaccgttacacggtttgatcccagagagtagtagcatgtagggtggttctttccgattctgtagcaccttgcagagtgtgttgaaggttctctatttgctgaggagttgcttaagcataatctaacatgatgtcgaatgtattcctgtatgttccataggtcagtcacctaggtgttgtttttgtctcagctttgtgtatttggagccctggtttctaataactaaataactagataaggcatgtc

SEQ ID NO: 3709 - protein, 220 aa, Zea mays subsp. mays
  peptide (1)..(220): Ceres Seq. ID no. 12403224
  misc_feature (1)..(220): Pfam Name: Eukaryotic initiation factor 4E Pfam Description: Eukaryotic initiation factor 4E
  misc_feature (20)..(220): Homolog of NCBI NO: 38565051 NR Description: eukaryotic translation initiation factor 4E
  misc_feature (20)..(220): Homolog of NCBI NO: 38565045 NR Description: eukaryotic translation initiation factor 4E
  misc_feature (20)..(220): Homolog of NCBI NO: 25176246 NR Description: eucaryotic initiation factor 4E [Capsicum annuum]
  misc_feature (20)..(220): Homolog of NCBI NO: 25176244 NR Description: eucaryotic initiation factor 4E [Capsicum annuum]
  misc_feature (20)..(220): Homolog of NCBI NO: 25176242 NR Description: eucaryotic initiation factor 4E [Capsicum annuum]
  misc_feature (24)..(220): Homolog of NCBI NO: 7862169 NR Description: eIF4E [Lycopersicon esculentum]
  misc_feature (29)..(220): Homolog of NCBI NO: 283021 NR Description: translation initiation factor eIF-4F chain p26 -
  misc_feature (1)..(220): Homolog of NCBI NO: 30923212 NR Description: Eukaryotic translation initiation factor 4E (eIF4E) (mRNA cap-binding protein) (eIF-4F 25 kDa subunit)
  misc_feature (1)..(220): Homolog of NCBI NO: 34905982 NR Description: eukaryotic translation initiation factor 4E
  misc_feature (1)..(220): Homolog of NCBI NO: 6016334 NR Description: EUKARYOTIC TRANSLATION INITIATION FACTOR 4E (EIF4E) (MRNA CAP-BINDING PROTEIN) (EIF-4F 25 KD SUBUNIT) (EIF-4F
MADEIDTRPAPAGSRGRPAHATEDDDREEGEIATDAPSPALPAAHPLEHSWTFWFDNPHGKNKMAAWGSSIRPIHTFSTVEDFWGLYNNIHHPSKLIGGADFHCFKNKIEPKWEDPICANGGKWTISCGRGKSDTLWLHTLLAMIGEQFDYGDEICGAVVSVRSKQERIAIWTKNAANEAAQISIGKQWKEFLDYKDSIGFIVHDDAKKMDKGLKNRYTV

SEQ ID NO: 3710 - protein, 157 aa, Zea mays subsp. mays
  peptide (1)..(157): Ceres Seq. ID no. 12403225
  misc_feature (1)..(157): Pfam Name: Eukaryotic initiation factor 4E Pfam Description: Eukaryotic initiation factor 4E
  misc_feature (1)..(157): Homolog of NCBI NO: 38565051 NR Description: eukaryotic translation initiation factor 4E
  misc_feature (1)..(157): Homolog of NCBI NO: 38565045 NR Description: eukaryotic translation initiation factor 4E
  misc_feature (1)..(157): Homolog of NCBI NO: 25176246 NR Description: eucaryotic initiation factor 4E [Capsicum annuum]
  misc_feature (1)..(157): Homolog of NCBI NO: 25176244 NR Description: eucaryotic initiation factor 4E [Capsicum annuum]
  misc_feature (1)..(157): Homolog of NCBI NO: 25176242 NR Description: eucaryotic initiation factor 4E [Capsicum annuum]
  misc_feature (1)..(157): Homolog of NCBI NO: 7862169 NR Description: eIF4E [Lycopersicon esculentum]
  misc_feature (1)..(157): Homolog of NCBI NO: 283021 NR Description: translation initiation factor eIF-4F chain p26 -
  misc_feature (1)..(157): Homolog of NCBI NO: 30923212 NR Description: Eukaryotic translation initiation factor 4E (eIF4E) (mRNA cap-binding protein) (eIF-4F 25 kDa subunit)
  misc_feature (1)..(157): Homolog of NCBI NO: 34905982 NR Description: eukaryotic translation initiation factor 4E
  misc_feature (1)..(157): Homolog of NCBI NO: 6016334 NR Description: EUKARYOTIC TRANSLATION INITIATION FACTOR 4E (EIF4E) (MRNA CAP-BINDING PROTEIN) (EIF-4F 25 KD SUBUNIT) (EIF-4F
MAAWGSSIRPIHTFSTVEDFWGLYNNIHHPSKLIGGADFHCFKNKIEPKWEDPICANGGKWTISCGRGKSDTLWLHTLLAMIGEQFDYGDEICGAVVSVRSKQERIAIWTKNAANEAAQISIGKQWKEFLDYKDSIGFIVHDDAKKMDKGLKNRYTV

SEQ ID NO: 3711 - DNA, 1047 bp, Zea mays subsp. mays
  misc_feature (1)..(1047): Ceres Seq. ID no. 12633518
  misc_feature: MA Experiment ID: 108535 Result: Up-regulated in Transcription
  misc_feature: MA Experiment 108535 PARAMETER Experiment Name: Zm_Meristem_P Parameter: Age (day) Value: 8
  misc_feature: MA Experiment 108535 PARAMETER Experiment Name: Zm_Meristem_P Parameter: Organism Value: Zea mays
  misc_feature: MA Experiment 108535 PARAMETER Experiment Name: Zm_Meristem_P Parameter: Plant Line Value: 35A19
  misc_feature: MA Experiment 108535 PARAMETER Experiment Name: Zm_Meristem_P Parameter: Tissue Value: Root Meristem vs. Above Root Meristem
attaacgcccctttccttccccagcggcaatcaaagagacggggagattcagatccacacacatccgcatccctctctcctcggtttcctctcccaccaccaacccccagatcgcagcgatctccgccgccgccctctctgggattccgcgcgacaaagtcaggcgtagaggctccaggaggaggagggaggcgcagcagggcgggtgggggagatgttcctctgggactggttctacggggtgctggcctccctcggcctgtggcagaaggaggccaagatcctcttccttggcctcgacaacgccggcaagaccacgctgctccacatgctcaaggacgagcggttggtgcagcaccagccgacgcagcacccgacgtcggaggagctcagcatcggcaagatcaagttcaaggcgttcgacctcggcggccaccagatcgcgcgccgcgtgtggaaggattactacgcaaaggttgatgctgtagtatacctggtagatgcatatgataaggagcgatttgctgaatcaaagaaggagctcgatgctctcctgtctgatgattctttggccaatgttccatttctcatccttggcaacaagattgatatcccatatgctgcctctgaagaggagctacggtatcacctaggccttagcaacttcacaaccgggaagggcaaggtcaaccttggcgactccaatgtccgtccacttgaggtcttcatgtgcagtgttgttcgcaagatgggctacggtgatggtttcaagtgggtctcccagtacatcaagtagggccctcgccgaggcgcatgctcagcccggcgaatttttttgccttgttcgttccggttggttcgtgacgagaacgaacgatggtcgctaggaaagtatcatggagggtatgaagaggaaaaacagtgcttaacattgttgaacatgttgagtctttagcgtcaaaacaatttatgtcgaactctattctttcgcttttccatacaacgtttactaagtacttgcgatgcattataaaattattactcttt

SEQ ID NO: 3712 - protein, 193 aa, Zea mays subsp. mays
  peptide (1)..(193): Ceres Seq. ID no. 12633519
  misc_feature (5)..(192): Pfam Name: ADP-ribosylation factor family Pfam Description: ADP-ribosylation factor family
  misc_feature (1)..(192): Homolog of NCBI NO: 3334322 NR Description: GTP-binding protein SAR1B
  misc_feature (1)..(193): Homolog of NCBI NO: 7438457 NR Description: GTP-binding protein - curled-leaved tobacco
  misc_feature (1)..(193): Homolog of NCBI NO: 34902852 NR Description: unnamed protein product [Oryza sativa (japonica
  misc_feature (1)..(193): Homolog of NCBI NO: 1549222 NR Description: NtSar1 protein [Nicotiana tabacum]
  misc_feature (1)..(193): Homolog of NCBI NO: 3334321 NR Description: GTP-binding protein SAR1A
  misc_feature (1)..(192): Homolog of NCBI NO: 15228793 NR Description: Sar1-like GTP binding protein
  misc_feature (1)..(192): Homolog of NCBI NO: 15223516 NR Description: GTP-binding protein (SAR1B)
  misc_feature (1)..(193): Homolog of NCBI NO: 15235226 NR Description: SAR1/GTP-binding secretory factor
  misc_feature (1)..(192): Homolog of NCBI NO: 25294172 NR Description: ras-like small monomeric GTP-binding protein
  misc_feature (1)..(193): Homolog of NCBI NO: 34894960 NR Description: putative GTP-binding protein
MFLWDWFYGVLASLGLWQKEAKILFLGLDNAGKTTLLHMLKDERLVQHQPTQHPTSEELSIGKIKFKAFDLGGHQIARRVWKDYYAKVDAVVYLVDAYDKERFAESKKELDALLSDDSLANVPFLILGNKIDIPYAASEEELRYHLGLSNFTTGKGKVNLGDSNVRPLEVFMCSVVRKMGYGDGFKWVSQYIK

SEQ ID NO: 3713 - protein, 159 aa, Zea mays subsp. mays
  peptide (1)..(159): Ceres Seq. ID no. 12633520
INAPFLPQRQSKRRGDSDPHTSASLSPRFPLPPPTPRSQRSPPPPSLGFRATKSGVEAPGGGGRRSRAGGGDVPLGLVLRGAGLPRPVAEGGQDPLPWPRQRRQDHAAPHAQGRAVGAAPADAAPDVGGAQHRQDQVQGVRPRRPPDRAPRVEGLLRKG

SEQ ID NO: 3714 - protein, 155 aa, Zea mays subsp. mays
  peptide (1)..(155): Ceres Seq. ID no. 12633521
  misc_feature (1)..(154): Pfam Name: ADP-ribosylation factor family Pfam Description: ADP-ribosylation factor family
  misc_feature (1)..(154): Homolog of NCBI NO: 3334322 NR Description: GTP-binding protein SAR1B
  misc_feature (1)..(155): Homolog of NCBI NO: 7438457 NR Description: GTP-binding protein - curled-leaved tobacco
  misc_feature (1)..(155): Homolog of NCBI NO: 34902852 NR Description: unnamed protein product [Oryza sativa (japonica
  misc_feature (1)..(155): Homolog of NCBI NO: 1549222 NR Description: NtSar1 protein [Nicotiana tabacum]
  misc_feature (1)..(155): Homolog of NCBI NO: 3334321 NR Description: GTP-binding protein SAR1A
  misc_feature (1)..(154): Homolog of NCBI NO: 15228793 NR Description: Sar1-like GTP binding protein
  misc_feature (1)..(154): Homolog of NCBI NO: 15223516 NR Description: GTP-binding protein (SAR1B)
  misc_feature (1)..(155): Homolog of NCBI NO: 15235226 NR Description: SAR1/GTP-binding secretory factor
  misc_feature (1)..(154): Homolog of NCBI NO: 25294172 NR Description: ras-like small monomeric GTP-binding protein
  misc_feature (1)..(155): Homolog of NCBI NO: 34894960 NR Description: putative GTP-binding protein
MLKDERLVQHQPTQHPTSEELSIGKIKFKAFDLGGHQIARRVWKDYYAKVDAVVYLVDAYDKERFAESKKELDALLSDDSLANVPFLILGNKIDIPYAASEEELRYHLGLSNFTTGKGKVNLGDSNVRPLEVFMCSVVRKMGYGDGFKWVSQYIK

SEQ ID NO: 3715 - DNA, 811 bp, Zea mays subsp. mays
  misc_feature (1)..(811): Ceres Seq. ID no. 12402622
  misc_feature: MA Experiment ID: 108528 Result: Up-regulated in Transcription
  misc_feature: MA Experiment 108528 PARAMETER Experiment Name: Zm_Imbibed_Seeds_P Parameter: Age (day) Value: 5 vs. 2
  misc_feature: MA Experiment 108528 PARAMETER Experiment Name: Zm_Imbibed_Seeds_P Parameter: Organism Value: Zea mays
  misc_feature: MA Experiment 108528 PARAMETER Experiment Name: Zm_Imbibed_Seeds_P Parameter: Plant Line Value: 35A19
  misc_feature: MA Experiment 108528 PARAMETER Experiment Name: Zm_Imbibed_Seeds_P Parameter: Tissue Value: Aerial vs. Embryo
  misc_feature: MA Experiment ID: 108529 Result: Up-regulated in Transcription
  misc_feature: MA Experiment 108529 PARAMETER Experiment Name: Zm_Imbibed_Seeds_P Parameter: Age (day) Value: 5 vs. 2
  misc_feature: MA Experiment 108529 PARAMETER Experiment Name: Zm_Imbibed_Seeds_P Parameter: Organism Value: Zea mays
  misc_feature: MA Experiment 108529 PARAMETER Experiment Name: Zm_Imbibed_Seeds_P Parameter: Plant Line Value: 35A19
  misc_feature: MA Experiment 108529 PARAMETER Experiment Name: Zm_Imbibed_Seeds_P Parameter: Tissue Value: Roots vs. Embryo
  misc_feature: MA Experiment ID: 108530 Result: Up-regulated in Transcription
  misc_feature: MA Experiment 108530 PARAMETER Experiment Name: Zm_Imbibed_Seeds_P Parameter: Age (day) Value: 6 vs. 2
  misc_feature: MA Experiment 108530 PARAMETER Experiment Name: Zm_Imbibed_Seeds_P Parameter: Organism Value: Zea mays
  misc_feature: MA Experiment 108530 PARAMETER Experiment Name: Zm_Imbibed_Seeds_P Parameter: Plant Line Value: 35A19
  misc_feature: MA Experiment 108530 PARAMETER Experiment Name: Zm_Imbibed_Seeds_P Parameter: Tissue Value: Aerial vs. Embryo
  misc_feature: MA Experiment ID: 108535 Result: Down-regulated in Transcription
  misc_feature: MA Experiment 108535 PARAMETER Experiment Name: Zm_Meristem_P Parameter: Age (day) Value: 8
  misc_feature: MA Experiment 108535 PARAMETER Experiment Name: Zm_Meristem_P Parameter: Organism Value: Zea mays
  misc_feature: MA Experiment 108535 PARAMETER Experiment Name: Zm_Meristem_P Parameter: Plant Line Value: 35A19
  misc_feature: MA Experiment 108535 PARAMETER Experiment Name: Zm_Meristem_P Parameter: Tissue Value: Root Meristem vs. Above Root Meristem
  misc_feature: MA Experiment ID: 108536 Result: Down-regulated in Transcription
  misc_feature: MA Experiment 108536 PARAMETER Experiment Name: Zm_Meristem_P Parameter: Age (day) Value: 8
  misc_feature: MA Experiment 108536 PARAMETER Experiment Name: Zm_Meristem_P Parameter: Organism Value: Zea mays
  misc_feature: MA Experiment 108536 PARAMETER Experiment Name: Zm_Meristem_P Parameter: Plant Line Value: 35A19
  misc_feature: MA Experiment 108536 PARAMETER Experiment Name: Zm_Meristem_P Parameter: Tissue Value: Shoot Meristem vs. Above Shoot Meristem
  misc_feature: MA Experiment ID: 108546 Result: Up-regulated in Transcription
  misc_feature: MA Experiment 108546 PARAMETER Experiment Name: Zm_Imbibed_Seeds_P Parameter: Age (day) Value: 3 vs. 2
  misc_feature: MA Experiment 108546 PARAMETER Experiment Name: Zm_Imbibed_Seeds_P Parameter: Organism Value: Zea mays
  misc_feature: MA Experiment 108546 PARAMETER Experiment Name: Zm_Imbibed_Seeds_P Parameter: Plant Line Value: 35A19
  misc_feature: MA Experiment 108546 PARAMETER Experiment Name: Zm_Imbibed_Seeds_P Parameter: Tissue Value: Roots vs. Embryo
  misc_feature: MA Experiment ID: 108547 Result: Up-regulated in Transcription
  misc_feature: MA Experiment 108547 PARAMETER Experiment Name: Zm_Imbibed_Seeds_P Parameter: Age (day) Value: 4 vs. 2
  misc_feature: MA Experiment 108547 PARAMETER Experiment Name: Zm_Imbibed_Seeds_P Parameter: Organism Value: Zea mays
  misc_feature: MA Experiment 108547 PARAMETER Experiment Name: Zm_Imbibed_Seeds_P Parameter: Plant Line Value: 35A19
  misc_feature: MA Experiment 108547 PARAMETER Experiment Name: Zm_Imbibed_Seeds_P Parameter: Tissue Value: Aerial vs. Embryo
  misc_feature: MA Experiment ID: 20000477 Result: Up-regulated in Transcription
  misc_feature: MA Experiment 20000477 PARAMETER Experiment Name: Zm_5mM_SA_P Parameter: Age (day) Value: 10
  misc_feature: MA Experiment 20000477 PARAMETER Experiment Name: Zm_5mM_SA_P Parameter: Organism Value: Zea mays
  misc_feature: MA Experiment 20000477 PARAMETER Experiment Name: Zm_5mM_SA_P Parameter: Plant Line Value: 35A19
  misc_feature: MA Experiment 20000477 PARAMETER Experiment Name: Zm_5mM_SA_P Parameter: Timepoint (hr) Value: 48
  misc_feature: MA Experiment 20000477 PARAMETER Experiment Name: Zm_5mM_SA_P Parameter: Tissue Value: Aerial
  misc_feature: MA Experiment 20000477 PARAMETER Experiment Name: Zm_5mM_SA_P Parameter: Treatment Value: 5mM SA vs. No Treatment
  misc_feature: MA Experiment ID: 20000492 Result: Down-regulated in Transcription
  misc_feature: MA Experiment 20000492 PARAMETER Experiment Name: Zm_Hybrid_Seed_Dev_P Parameter: DAP Value: 12
  misc_feature: MA Experiment 20000492 PARAMETER Experiment Name: Zm_Hybrid_Seed_Dev_P Parameter: Organism Value: Zea mays
  misc_feature: MA Experiment 20000492 PARAMETER Experiment Name: Zm_Hybrid_Seed_Dev_P Parameter: Plant Line Value: 35A19
  misc_feature: MA Experiment 20000492 PARAMETER Experiment Name: Zm_Hybrid_Seed_Dev_P Parameter: Tissue Value: Fert Kernel vs. Unfert Floret
  misc_feature: MA Experiment ID: 20000535 Result: Down-regulated in Transcription
  misc_feature: MA Experiment 20000535 PARAMETER Experiment Name: Zm_Hybrid_Seed_Dev_P Parameter: DAP Value: 30 vs. 12
  misc_feature: MA Experiment 20000535 PARAMETER Experiment Name: Zm_Hybrid_Seed_Dev_P Parameter: Organism Value: Zea mays
  misc_feature: MA Experiment 20000535 PARAMETER Experiment Name: Zm_Hybrid_Seed_Dev_P Parameter: Plant Line Value: 35A19
  misc_feature: MA Experiment 20000535 PARAMETER Experiment Name: Zm_Hybrid_Seed_Dev_P Parameter: Tissue Value: Embryo vs. Unfert Floret
  misc_feature: MA Experiment ID: 20001608 Result: Down-regulated in Transcription
  misc_feature: MA Experiment 20001608 PARAMETER Experiment Name: Zm_50ppm_KNO3_L-to-H_P Parameter: Age (day) Value: 21
  misc_feature: MA Experiment 20001608 PARAMETER Experiment Name: Zm_50ppm_KNO3_L-to-H_P Parameter: Organism Value: Zea mays
  misc_feature: MA Experiment 20001608 PARAMETER Experiment Name: Zm_50ppm_KNO3_L-to-H_P Parameter: Plant Line Value: 35A19
  misc_feature: MA Experiment 20001608 PARAMETER Experiment Name: Zm_50ppm_KNO3_L-to-H_P Parameter: Timepoint (hr) Value: 48
  misc_feature: MA Experiment 20001608 PARAMETER Experiment Name: Zm_50ppm_KNO3_L-to-H_P Parameter: Tissue Value: Shoots
  misc_feature: MA Experiment 20001608 PARAMETER Experiment Name: Zm_50ppm_KNO3_L-to-H_P Parameter: Treatment Value: 50ppm KNO3 vs. 50ppm KCl
aacaccgtccagtccatcactgccctttgttctcctccacagtcgcagacaaagctggttcgtctcgcggagaggggaagccgggaaggtggataggcggcacccacccatcacccatggctgggttgcaaagatcggcgaccacgttcagacggtccggctcgtcgggcctggtctgggacgagcgtttcctgaccgaggccgacgccgaggcgaaggccggcgccgcggaggatgccgagcagccggagctccggcactcgaggagcgtcggcatgctgcgccgtgcgggcggcggtggagacagccgcagcaagaagggcaaggagagtaggcagaagcaggcggagtcggcgcggcgcagcaaccagcaggtgttccggaccaaggacgtggccccggacatggatcccccctcgccgagggtgtccggctgcgccttctgcgccgtcttccgcgggggctctggcggtactggccgcagggcacaggcacgccgccggtccaagcccaggaagaagtgacggcgtagcaacacgtacgtacgtgcggtacgttgttgtttgtgccatctgtaaagtccgggccatggttgttcgtgcgtgtacatgtttactatactaaatactagggtcatatatagatgagcttgctactcggtaatcggtatacgtacgccattatttagttcaggatagttcctccttttttgggtcggtcggttggtttcttgatccagatccatgcttttgaggtttgggcgacggttagatgttacttgtctactatatatgcagcagctatttatgag

SEQ ID NO: 3716 - protein, 173 aa, Zea mays subsp. mays
  peptide (1)..(173): Ceres Seq. ID no. 12402623
  misc_feature (39)..(172): Homolog of NCBI NO: 30684361 NR Description: expressed protein [Arabidopsis thaliana]
  misc_feature (39)..(172): Homolog of NCBI NO: 30684356 NR Description: expressed protein [Arabidopsis thaliana]
  misc_feature (39)..(172): Homolog of NCBI NO: 18412687 NR Description: expressed protein
HRPVHHCPLFSSTVADKAGSSRGEGKPGRWIGGTHPSPMAGLQRSATTFRRSGSSGLVWDERFLTEADAEAKAGAAEDAEQPELRHSRSVGMLRRAGGGGDSRSKKGKESRQKQAESARRSNQQVFRTKDVAPDMDPPSPRVSGCAFCAVFRGGSGGTGRRAQARRRSKPRKK

SEQ ID NO: 3717 - protein, 135 aa, Zea mays subsp. mays
  peptide (1)..(135): Ceres Seq. ID no. 12402624
  misc_feature (1)..(134): Homolog of NCBI NO: 30684361 NR Description: expressed protein [Arabidopsis thaliana]
  misc_feature (1)..(134): Homolog of NCBI NO: 30684356 NR Description: expressed protein [Arabidopsis thaliana]
  misc_feature (1)..(134): Homolog of NCBI NO: 18412687 NR Description: expressed protein
MAGLQRSATTFRRSGSSGLVWDERFLTEADAEAKAGAAEDAEQPELRHSRSVGMLRRAGGGGDSRSKKGKESRQKQAESARRSNQQVFRTKDVAPDMDPPSPRVSGCAFCAVFRGGSGGTGRRAQARRRSKPRKK

SEQ ID NO: 3718 - protein, 129 aa, Zea mays subsp. mays
  peptide (1)..(129): Ceres Seq. ID no. 12402625
  misc_feature (44)..(109): Homolog of NCBI NO: 27960757 NR Description: AP2 domain protein [Hordeum vulgare]
MPSSRSSGTRGASACCAVRAAVETAAARRARRVGRSRRSRRGAATSRCSGPRTWPRTWIPPRRGCPAAPSAPSSAGALAVLAAGHRHAAGPSPGRSDGVATRTYVRYVVVCAICKVRAMVVRACTCLLY

SEQ ID NO: 3719 - DNA, 1116 bp, Zea mays subsp. mays
  misc_feature (1)..(1116): Ceres Seq. ID no. 12381029
  misc_feature: MA Experiment ID: 108515 Result: Down-regulated in Transcription
  misc_feature: MA Experiment 108515 PARAMETER Experiment Name: Zm_2mM_SA_P Parameter: Age (day) Value: 8
  misc_feature: MA Experiment 108515 PARAMETER Experiment Name: Zm_2mM_SA_P Parameter: Organism Value: Zea mays
  misc_feature: MA Experiment 108515 PARAMETER Experiment Name: Zm_2mM_SA_P Parameter: Plant Line Value: 35A19
  misc_feature: MA Experiment 108515 PARAMETER Experiment Name: Zm_2mM_SA_P Parameter: Timepoint (hr) Value: 12
  misc_feature: MA Experiment 108515 PARAMETER Experiment Name: Zm_2mM_SA_P Parameter: Tissue Value: Aerial
  misc_feature: MA Experiment 108515 PARAMETER Experiment Name: Zm_2mM_SA_P Parameter: Treatment Value: 2mM SA vs. No Treatment
  misc_feature: MA Experiment ID: 108522 Result: Up-regulated in Transcription
  misc_feature: MA Experiment 108522 PARAMETER Experiment Name: Zm_42deg_Heat_P Parameter: Age (day) Value: 8
  misc_feature: MA Experiment 108522 PARAMETER Experiment Name: Zm_42deg_Heat_P Parameter: Organism Value: Zea mays
  misc_feature: MA Experiment 108522 PARAMETER Experiment Name: Zm_42deg_Heat_P Parameter: Plant Line Value: 35A19
  misc_feature: MA Experiment 108522 PARAMETER Experiment Name: Zm_42deg_Heat_P Parameter: Temperature (deg C) Value: 42 vs. 22
  misc_feature: MA Experiment 108522 PARAMETER Experiment Name: Zm_42deg_Heat_P Parameter: Timepoint (hr) Value: 1
  misc_feature: MA Experiment 108522 PARAMETER Experiment Name: Zm_42deg_Heat_P Parameter: Tissue Value: Aerial
  misc_feature: MA Experiment ID: 108528 Result: Up-regulated in Transcription
  misc_feature: MA Experiment 108528 PARAMETER Experiment Name: Zm_Imbibed_Seeds_P Parameter: Age (day) Value: 5 vs. 2
  misc_feature: MA Experiment 108528 PARAMETER Experiment Name: Zm_Imbibed_Seeds_P Parameter: Organism Value: Zea mays
  misc_feature: MA Experiment 108528 PARAMETER Experiment Name: Zm_Imbibed_Seeds_P Parameter: Plant Line Value: 35A19
  misc_feature: MA Experiment 108528 PARAMETER Experiment Name: Zm_Imbibed_Seeds_P Parameter: Tissue Value: Aerial vs. Embryo
  misc_feature: MA Experiment ID: 108530 Result: Up-regulated in Transcription
  misc_feature: MA Experiment 108530 PARAMETER Experiment Name: Zm_Imbibed_Seeds_P Parameter: Age (day) Value: 6 vs. 2
  misc_feature: MA Experiment 108530 PARAMETER Experiment Name: Zm_Imbibed_Seeds_P Parameter: Organism Value: Zea mays
  misc_feature: MA Experiment 108530 PARAMETER Experiment Name: Zm_Imbibed_Seeds_P Parameter: Plant Line Value: 35A19
  misc_feature: MA Experiment 108530 PARAMETER Experiment Name: Zm_Imbibed_Seeds_P Parameter: Tissue Value: Aerial vs. Embryo
  misc_feature: MA Experiment ID: 108536 Result: Down-regulated in Transcription
  misc_feature: MA Experiment 108536 PARAMETER Experiment Name: Zm_Meristem_P Parameter: Age (day) Value: 8
  misc_feature: MA Experiment 108536 PARAMETER Experiment Name: Zm_Meristem_P Parameter: Organism Value: Zea mays
  misc_feature: MA Experiment 108536 PARAMETER Experiment Name: Zm_Meristem_P Parameter: Plant Line Value: 35A19
  misc_feature: MA Experiment 108536 PARAMETER Experiment Name: Zm_Meristem_P Parameter: Tissue Value: Shoot Meristem vs. Above Shoot Meristem
  misc_feature: MA Experiment ID: 108543 Result: Up-regulated in Transcription
  misc_feature: MA Experiment ID: 108545 Result: Up-regulated in Transcription
  misc_feature: MA Experiment 108545 PARAMETER Experiment Name: Zm_Imbibed_Seeds_P Parameter: Age (day) Value: 3 vs. 2
  misc_feature: MA Experiment 108545 PARAMETER Experiment Name: Zm_Imbibed_Seeds_P Parameter: Organism Value: Zea mays
  misc_feature: MA Experiment 108545 PARAMETER Experiment Name: Zm_Imbibed_Seeds_P Parameter: Plant Line Value: 35A19
  misc_feature: MA Experiment 108545 PARAMETER Experiment Name: Zm_Imbibed_Seeds_P Parameter: Tissue Value: Aerial vs. Embryo
  misc_feature: MA Experiment ID: 108546 Result: Down-regulated in Transcription
  misc_feature: MA Experiment 108546 PARAMETER Experiment Name: Zm_Imbibed_Seeds_P Parameter: Age (day) Value: 3 vs. 2
  misc_feature: MA Experiment 108546 PARAMETER Experiment Name: Zm_Imbibed_Seeds_P Parameter: Organism Value: Zea mays
  misc_feature: MA Experiment 108546 PARAMETER Experiment Name: Zm_Imbibed_Seeds_P Parameter: Plant Line Value: 35A19
  misc_feature: MA Experiment 108546 PARAMETER Experiment Name: Zm_Imbibed_Seeds_P Parameter: Tissue Value: Roots vs. Embryo
  misc_feature: MA Experiment ID: 108547 Result: Up-regulated in Transcription
  misc_feature: MA Experiment 108547 PARAMETER Experiment Name: Zm_Imbibed_Seeds_P Parameter: Age (day) Value: 4 vs. 2
  misc_feature: MA Experiment 108547 PARAMETER Experiment Name: Zm_Imbibed_Seeds_P Parameter: Organism Value: Zea mays
  misc_feature: MA Experiment 108547 PARAMETER Experiment Name: Zm_Imbibed_Seeds_P Parameter: Plant Line Value: 35A19
  misc_feature: MA Experiment 108547 PARAMETER Experiment Name: Zm_Imbibed_Seeds_P Parameter: Tissue Value: Aerial vs. Embryo
  misc_feature: MA Experiment ID: 108687 Result: Down-regulated in Transcription
  misc_feature: MA Experiment 108687 PARAMETER Experiment Name: Zm_Embryos-Flowers__P Parameter: Tissue Value: Embryo vs. Aerial+
  misc_feature: MA Experiment ID: 20000492 Result: Down-regulated in Transcription
  misc_feature: MA Experiment 20000492 PARAMETER Experiment Name: Zm_Hybrid_Seed_Dev_P Parameter: DAP Value: 12
  misc_feature: MA Experiment 20000492 PARAMETER Experiment Name: Zm_Hybrid_Seed_Dev_P Parameter: Organism Value: Zea mays
  misc_feature: MA Experiment 20000492 PARAMETER Experiment Name: Zm_Hybrid_Seed_Dev_P Parameter: Plant Line Value: 35A19
  misc_feature: MA Experiment 20000492 PARAMETER Experiment Name: Zm_Hybrid_Seed_Dev_P Parameter: Tissue Value: Fert Kernel vs. Unfert Floret
  misc_feature: MA Experiment ID: 20000535 Result: Down-regulated in Transcription
  misc_feature: MA Experiment 20000535 PARAMETER Experiment Name: Zm_Hybrid_Seed_Dev_P Parameter: DAP Value: 30 vs. 12
  misc_feature: MA Experiment 20000535 PARAMETER Experiment Name: Zm_Hybrid_Seed_Dev_P Parameter: Organism Value: Zea mays
  misc_feature: MA Experiment 20000535 PARAMETER Experiment Name: Zm_Hybrid_Seed_Dev_P Parameter: Plant Line Value: 35A19
  misc_feature: MA Experiment 20000535 PARAMETER Experiment Name: Zm_Hybrid_Seed_Dev_P Parameter: Tissue Value: Embryo vs. Unfert Floret
aatacaaaccaggcttgctcgtggcggcaaaaaccaacgtgctcgatctccctccgccactccatccatctcctcgctcccagtccccgggaagctacgaagcatggcgtccgtcaccgcccgcgccccggtcgcggcccttcgcccgtcgtcggcatcgctcaagtcgtcgtcggccttccttggccactctagccgcctcggccgcaccgcgtcgcccacgaggcgcagcctcaaggcggaggccaagggcgagtggctccccggccttccctccccctcctacctcgacggcagcctggcgggtgacaatggcttcgacccgttgggcctggcggaggaccccgagaacctgcggtggttcgtgcaggcggagctggtgaacggccggtgggccatgcttggcgtggccgggatgctcatcccggaggtgctgaccaaagccgggctgatcaacgcgccgcagtggtacgacgccggcaagtcggagtacttcgcgtcgtcgtccacgctgttcgtggtcgagttcatcctgttccactacgtggagatccggcggtggcaggacatcaagaaccccggcagcgtcaaccaggaccccatcttcaagagctacagcctgccgccgcacgagtgcggctacccgggcagcgtcttcaacccgctcaacttcgcgcccacgctcgaggccaaggagaaggagctcgccaacgggaggctggcgatgctggcgttcctgggcttcctgatccagcacaacgtcaccggcaaggggcccttcgacaacctgctgcagcacctgtctgacccatggcacaacaccatcatccagaccttctccggttgagtcgaggtcgaggagggatacgatccatcgctggtgagctgatatggactggaaggcaaacattgaaaccttaaattcctttctggatcagtttgtgtgtgttaatctatctggagggtacagattcgggccgtgttgcaatgcatgcatggtctgaagggagcgagggctgaggagtgactggtatgtacattagctgaaggggaggttaagggtagagatcgtttgatcagtatcatctgtatatccccatgcatggggtttcgttt

SEQ ID NO: 3720 - protein, 281 aa, Zea mays subsp. mays
  peptide (1)..(281): Ceres Seq. ID no. 12381030
  misc_feature (92)..(253): Pfam Name: Chlorophyll A-B binding protein Pfam Description: Chlorophyll A-B binding protein
  misc_feature (35)..(281): Homolog of NCBI NO: 11277626 NR Description: chlorophyll a/b-binding protein [imported] -
  misc_feature (35)..(281): Homolog of NCBI NO: 20218813 NR Description: putative chlorophyll a/b-binding protein type 4
  misc_feature (35)..(280): Homolog of NCBI NO: 30692874 NR Description: light-harvesting chlorophyll a/b binding protein
  misc_feature (45)..(281): Homolog of NCBI NO: 322393 NR Description: chlorophyll a/b-binding protein type 4,
  misc_feature (35)..(281): Homolog of NCBI NO: 322392 NR Description: chlorophyll a/b-binding protein type 4,
  misc_feature (35)..(281): Homolog of NCBI NO: 13385204 NR Description: cDNA sequence BC002118; hypothetical protein,
  misc_feature (35)..(280): Homolog of NCBI NO: 100196 NR Description: chlorophyll a/b-binding protein (cab-11) - tomato
  misc_feature (35)..(280): Homolog of NCBI NO: 100197 NR Description: chlorophyll a/b-binding protein (cab-12) - tomato
  misc_feature (56)..(281): Homolog of NCBI NO: 9624495 NR Description: chlorophyll a/b-binding protein precursor
  misc_feature (35)..(281): Homolog of NCBI NO: 3789952 NR Description: chlorophyll a/b-binding protein presursor [Oryza
IQTRLARGGKNQRARSPSATPSISSLPVPGKLRSMASVTARAPVAALRPSSASLKSSSAFLGHSSRLGRTASPTRRSLKAEAKGEWLPGLPSPSYLDGSLAGDNGFDPLGLAEDPENLRWFVQAELVNGRWAMLGVAGMLIPEVLTKAGLINAPQWYDAGKSEYFASSSTLFVVEFILFHYVEIRRWQDIKNPGSVNQDPIFKSYSLPPHECGYPGSVFNPLNFAPTLEAKEKELANGRLAMLAFLGFLIQHNVTGKGPFDNLLQHLSDPWHNTIIQTFSG

SEQ ID NO: 3721 - protein, 247 aa, Zea mays subsp. mays
  peptide (1)..(247): Ceres Seq. ID no. 12381031
  misc_feature (58)..(219): Pfam Name: Chlorophyll A-B binding protein Pfam Description: Chlorophyll A-B binding protein
  misc_feature (1)..(247): Homolog of NCBI NO: 11277626 NR Description: chlorophyll a/b-binding protein [imported] -
  misc_feature (1)..(247): Homolog of NCBI NO: 20218813 NR Description: putative chlorophyll a/b-binding protein type 4
  misc_feature (1)..(246): Homolog of NCBI NO: 30692874 NR Description: light-harvesting chlorophyll a/b binding protein
  misc_feature (11)..(247): Homolog of NCBI NO: 322393 NR Description: chlorophyll a/b-binding protein type 4,
  misc_feature (1)..(247): Homolog of NCBI NO: 322392 NR Description: chlorophyll a/b-binding protein type 4,
  misc_feature (1)..(247): Homolog of NCBI NO: 13385204 NR Description: cDNA sequence BC002118; hypothetical protein,
  misc_feature (1)..(246): Homolog of NCBI NO: 100196 NR Description: chlorophyll a/b-binding protein (cab-11) - tomato
  misc_feature (1)..(246): Homolog of NCBI NO: 100197 NR Description: chlorophyll a/b-binding protein (cab-12) - tomato
  misc_feature (22)..(247): Homolog of NCBI NO: 9624495 NR Description: chlorophyll a/b-binding protein precursor
  misc_feature (1)..(247): Homolog of NCBI NO: 3789952 NR Description: chlorophyll a/b-binding protein presursor [Oryza
MASVTARAPVAALRPSSASLKSSSAFLGHSSRLGRTASPTRRSLKAEAKGEWLPGLPSPSYLDGSLAGDNGFDPLGLAEDPENLRWFVQAELVNGRWAMLGVAGMLIPEVLTKAGLINAPQWYDAGKSEYFASSSTLFVVEFILFHYVEIRRWQDIKNPGSVNQDPIFKSYSLPPHECGYPGSVFNPLNFAPTLEAKEKELANGRLAMLAFLGFLIQHNVTGKGPFDNLLQHLSDPWHNTIIQTFSG

SEQ ID NO: 3722 - protein, 149 aa, Zea mays subsp. mays
  peptide (1)..(149): Ceres Seq. ID no. 12381032
  misc_feature (1)..(121): Pfam Name: Chlorophyll A-B binding protein Pfam Description: Chlorophyll A-B binding protein
  misc_feature (1)..(149): Homolog of NCBI NO: 322392 NR Description: chlorophyll a/b-binding protein type 4,
  misc_feature (1)..(149): Homolog of NCBI NO: 13385204 NR Description: cDNA sequence BC002118; hypothetical protein,
  misc_feature (1)..(148): Homolog of NCBI NO: 100196 NR Description: chlorophyll a/b-binding protein (cab-11) - tomato
  misc_feature (1)..(149): Homolog of NCBI NO: 11277626 NR Description: chlorophyll a/b-binding protein [imported] -
  misc_feature (1)..(148): Homolog of NCBI NO: 30692874 NR Description: light-harvesting chlorophyll a/b binding protein
  misc_feature (1)..(149): Homolog of NCBI NO: 322393 NR Description: chlorophyll a/b-binding protein type 4,
  misc_feature (1)..(149): Homolog of NCBI NO: 20218813 NR Description: putative chlorophyll a/b-binding protein type 4
  misc_feature (1)..(148): Homolog of NCBI NO: 100197 NR Description: chlorophyll a/b-binding protein (cab-12) - tomato
  misc_feature (1)..(149): Homolog of NCBI NO: 9624495 NR Description: chlorophyll a/b-binding protein precursor
  misc_feature (1)..(149): Homolog of NCBI NO: 3789952 NR Description: chlorophyll a/b-binding protein presursor [Oryza
MLGVAGMLIPEVLTKAGLINAPQWYDAGKSEYFASSSTLFVVEFILFHYVEIRRWQDIKNPGSVNQDPIFKSYSLPPHECGYPGSVFNPLNFAPTLEAKEKELANGRLAMLAFLGFLIQHNVTGKGPFDNLLQHLSDPWHNTIIQTFSG

SEQ ID NO: 3723 - DNA, 823 bp, Zea mays subsp. mays
  misc_feature (1)..(823): Ceres Seq. ID no. 12579071
  misc_feature: MA Experiment ID: 108543 Result: Down-regulated in Transcription
  misc_feature: MA Experiment ID: 20000492 Result: Up-regulated in Transcription
  misc_feature: MA Experiment 20000492 PARAMETER Experiment Name: Zm_Hybrid_Seed_Dev_P Parameter: DAP Value: 12
  misc_feature: MA Experiment 20000492 PARAMETER Experiment Name: Zm_Hybrid_Seed_Dev_P Parameter: Organism Value: Zea mays
  misc_feature: MA Experiment 20000492 PARAMETER Experiment Name: Zm_Hybrid_Seed_Dev_P Parameter: Plant Line Value: 35A19
  misc_feature: MA Experiment 20000492 PARAMETER Experiment Name: Zm_Hybrid_Seed_Dev_P Parameter: Tissue Value: Fert Kernel vs. Unfert Floret
acaagtccacaaccgtaccagcaccaccgcgccatggcgtcctccgccgatcccgatgccgccacgccaccatccgcgccgcagccggagcccgcacgaaaggcagtccgcgtggtggtgaaggggcgcgtcacgggggtggggttccgcgactggactgcgtccacggccgagtcgctcggcctccgccggctgggtccgcaaccgccgtgacggcagtgtggaggccctcctctccggagaccccgcgaagatcgaagacatgataacccgccgcctcccggtcggccccccagccgccaccgtcaccgccgtcgtcccgtccacggccgagcccgtggatccgtccaccgggttcgagatcaagttcaccgtctgatcccccgtcccccccgtcccgcgacaggttcgcgtctcgccgcgcgttcttggacggtctattcgtgcactactactgcgaatctgcgattaaagatcagaggcgacatctaatgtaccggagtctgtttacctgaaaagctctgctatctgctttgggggggaattcatgccagattgtgggtgcaaacctatttccttactacctagtgtccaagtcggaatattaataagctatgccaggattcagatcgaaatatttctgtcactgagaaatgtgttgcgtgacaactttcgaagactgttgcctctctgtgtttatccctagatcctaatgtacaaacagagtcttatacagtactatgcattaacgtcaagtttcagagttcagacatgtgcctcgtgcctgctttctaattacaaatatagtcgagttgtgttttgc

SEQ ID NO: 3724 - protein, 87 aa, Zea mays subsp. mays
  peptide (1)..(87): Ceres Seq. ID no. 12579072
KSTTVPAPPRHGVLRRSRCRHATIRAAAGARTKGSPRGGEGARHGGGVPRLDCVHGRVARPPPAGSATAVTAVWRPSSPETPRRSKT

SEQ ID NO: 3725 - protein, 70 aa, Zea mays subsp. mays
  peptide (1)..(70): Ceres Seq. ID no. 12579073
  misc_feature (28)..(63): Homolog of NCBI NO: 21593449 NR Description: unknown [Arabidopsis thaliana]
  misc_feature (28)..(63): Homolog of NCBI NO: 29028786 NR Description: At5g03370 [Arabidopsis thaliana]
  misc_feature (28)..(63): Homolog of NCBI NO: 15242739 NR Description: putative protein
TSPQPYQHHRAMASSADPDAATPPSAPQPEPARKAVRVVVKGRVTGVGFRDWTASTAESLGLRRLGPQPP

SEQ ID NO: 3726 - protein, 59 aa, Zea mays subsp. mays
  peptide (1)..(59): Ceres Seq. ID no. 12579074
  misc_feature (17)..(52): Homolog of NCBI NO: 21593449 NR Description: unknown [Arabidopsis thaliana]
  misc_feature (17)..(52): Homolog of NCBI NO: 29028786 NR Description: At5g03370 [Arabidopsis thaliana]
  misc_feature (17)..(52): Homolog of NCBI NO: 15242739 NR Description: putative protein
MASSADPDAATPPSAPQPEPARKAVRVVVKGRVTGVGFRDWTASTAESLGLRRLGPQPP

SEQ ID NO: 3727 - DNA, 887 bp, Zea mays subsp. mays
  misc_feature (1)..(887): Ceres Seq. ID no. 12381033
  misc_feature: MA Experiment ID: 20000534 Result: Up-regulated in Transcription
  misc_feature: MA Experiment 20000534 PARAMETER Experiment Name: Zm_Hybrid_Pollen_P Parameter: Age (day) Value: 8
  misc_feature: MA Experiment 20000534 PARAMETER Experiment Name: Zm_Hybrid_Pollen_P Parameter: Organism Value: Zea mays
  misc_feature: MA Experiment 20000534 PARAMETER Experiment Name: Zm_Hybrid_Pollen_P Parameter: Plant Line Value: 35A19
  misc_feature: MA Experiment 20000534 PARAMETER Experiment Name: Zm_Hybrid_Pollen_P Parameter: Tissue Value: Pollen vs. Aerial
gaccattacctagaacatcctaatcgaaaaccctagttctctcgtgaccgccttccctcttctcctgcgtcccaactgggcaattccccaaacctaactaacctttgccaccgcgggagccaccatgggtggccagatgccggacgccgatgggaaggcccgctcggcggactcctcgtcctcttacgggtacccgccgtcggcgccgccgcagcaccagtacggcacctttggccccccatccggagcctccggggagtttccgcagccggcgggtcgggttcccccagccggcgccgccgcctgggatgcagcactacccgcagcctcctccggcgtcgtatgccgtctacccacccccgcagcaaccctactcggccgccgcgccgtactacgcccaaggctaccagatcgctcaaggttatattcctgttgttgaaggaaggcctgttagaatgcgtcctcttccatgttgtggccttggcatggggtggtttctgtttataattgggttcttctttgctgccattccatggtatcttggagcttttgtgctgatttgtgtccgagtacgtgatttacagggagaaaccaggatatgttgcttgcactattgctgcttcgcttgctgcaattgctgtgctgcttggcgccacaaaaggagcggaggtgtggtgagcattatgccttcaattaccagcagtctggttaatgtaaatgtccgttgctcggctactttgttacccgtgttgtacatgtgttgtgcgtacaaaggatagggtgtaacgaaaatgatgtatgctcctatttgtagttggacatatacatttgtcaaacggagtagcatgaatgcaccctcattaatcatttgatgtaaaattgcctgg

SEQ ID NO: 3728 - protein, 209 aa, Zea mays subsp. mays
  peptide (1)..(209): Ceres Seq. ID no. 12381034
  misc_feature (1)..(81): Pfam Name: Extensin-like region Pfam Description: Extensin-like region
  misc_feature (55)..(159): Homolog of NCBI NO: 21554784 NR Description: unknown [Arabidopsis thaliana]
  misc_feature (55)..(159): Homolog of NCBI NO: 18400450 NR Description: Expressed protein
  misc_feature (36)..(152): Homolog of NCBI NO: 25518134 NR Description: probable 60S ribosomal protein L18A - Arabidopsis
  misc_feature (32)..(152): Homolog of NCBI NO: 21554011 NR Description: unknown [Arabidopsis thaliana]
  misc_feature (32)..(152): Homolog of NCBI NO: 18404524 NR Description: expressed protein
  misc_feature (53)..(137): Homolog of NCBI NO: 18394436 NR Description: expressed protein
  misc_feature (36)..(152): Homolog of NCBI NO: 18397305 NR Description: 60S ribosomal protein L18A, putative
  misc_feature (36)..(152): Homolog of NCBI NO: 21593837 NR Description: 60S ribosomal protein L18A, putative [Arabidopsis
MGRPARRTPRPLTGTRRRRRRSTSTAPLAPHPEPPGSFRSRRVGFPQPAPPPGMQHYPQPPPASYAVYPPPQQPYSAAAPYYAQGYQIAQGYIPVVEGRPVRMRPLPCCGLGMGWFLFIIGFFFAAIPWYLGAFVLICVRVRDLQGETRICCLHYCCFACCNCCAAWRHKRSGGVVSIMPSITSSLVNVNVRCSATLLPVLYMCCAYKG

SEQ ID NO: 3729 - protein, 156 aa, Zea mays subsp. mays
  peptide (1)..(156): Ceres Seq. ID no. 12381035
  misc_feature (2)..(106): Homolog of NCBI NO: 21554784 NR Description: unknown [Arabidopsis thaliana]
  misc_feature (2)..(106): Homolog of NCBI NO: 18400450 NR Description: Expressed protein
  misc_feature (1)..(99): Homolog of NCBI NO: 25518134 NR Description: probable 60S ribosomal protein L18A - Arabidopsis
  misc_feature (1)..(99): Homolog of NCBI NO: 21554011 NR Description: unknown [Arabidopsis thaliana]
  misc_feature (1)..(99): Homolog of NCBI NO: 18404524 NR Description: expressed protein
  misc_feature (1)..(84): Homolog of NCBI NO: 18394436 NR Description: expressed protein
  misc_feature (1)..(99): Homolog of NCBI NO: 18397305 NR Description: 60S ribosomal protein L18A, putative
  misc_feature (1)..(99): Homolog of NCBI NO: 21593837 NR Description: 60S ribosomal protein L18A, putative [Arabidopsis
MQHYPQPPPASYAVYPPPQQPYSAAAPYYAQGYQIAQGYIPVVEGRPVRMRPLPCCGLGMGWFLFIIGFFFAAIPWYLGAFVLICVRVRDLQGETRICCLHYCCFACCNCCAAWRHKRSGGVVSIMPSITSSLVNVNVRCSATLLPVLYMCCAYKG

SEQ ID NO: 3730 - protein, 107 aa, Zea mays subsp. mays
  peptide (1)..(107): Ceres Seq. ID no. 12381036
  misc_feature (1)..(57): Homolog of NCBI NO: 21554784 NR Description: unknown [Arabidopsis thaliana]
  misc_feature (1)..(57): Homolog of NCBI NO: 18400450 NR Description: Expressed protein
  misc_feature (1)..(50): Homolog of NCBI NO: 25518134 NR Description: probable 60S ribosomal protein L18A - Arabidopsis
  misc_feature (1)..(50): Homolog of NCBI NO: 21554011 NR Description: unknown [Arabidopsis thaliana]
  misc_feature (1)..(50): Homolog of NCBI NO: 18404524 NR Description: expressed protein
  misc_feature (1)..(35): Homolog of NCBI NO: 18394436 NR Description: expressed protein
  misc_feature (1)..(50): Homolog of NCBI NO: 18397305 NR Description: 60S ribosomal protein L18A, putative
  misc_feature (1)..(50): Homolog of NCBI NO: 21593837 NR Description: 60S ribosomal protein L18A, putative [Arabidopsis
MRPLPCCGLGMGWFLFIIGFFFAAIPWYLGAFVLICVRVRDLQGETRICCLHYCCFACCNCCAAWRHKRSGGVVSIMPSITSSLVNVNVRCSATLLPVLYMCCAYKG

SEQ ID NO: 3731 - DNA, 874 bp, Zea mays subsp. mays
  misc_feature (1)..(874): Ceres Seq. ID no. 12342813
  misc_feature: MA Experiment ID: 108530 Result: Up-regulated in Transcription
  misc_feature: MA Experiment 108530 PARAMETER Experiment Name: Zm_Imbibed_Seeds_P Parameter: Age (day) Value: 6 vs. 2
  misc_feature: MA Experiment 108530 PARAMETER Experiment Name: Zm_Imbibed_Seeds_P Parameter: Organism Value: Zea mays
  misc_feature: MA Experiment 108530 PARAMETER Experiment Name: Zm_Imbibed_Seeds_P Parameter: Plant Line Value: 35A19
  misc_feature: MA Experiment 108530 PARAMETER Experiment Name: Zm_Imbibed_Seeds_P Parameter: Tissue Value: Aerial vs. Embryo
  misc_feature: MA Experiment ID: 108532 Result: Up-regulated in Transcription
  misc_feature: MA Experiment 108532 PARAMETER Experiment Name: Zm_20uM_KNO3_H-to-L_P Parameter: Age (day) Value: 11
  misc_feature: MA Experiment 108532 PARAMETER Experiment Name: Zm_20uM_KNO3_H-to-L_P Parameter: Organism Value: Zea mays
  misc_feature: MA Experiment 108532 PARAMETER Experiment Name: Zm_20uM_KNO3_H-to-L_P Parameter: Plant Line Value: 35A19
  misc_feature: MA Experiment 108532 PARAMETER Experiment Name: Zm_20uM_KNO3_H-to-L_P Parameter: Timepoint (hr) Value: 16
  misc_feature: MA Experiment 108532 PARAMETER Experiment Name: Zm_20uM_KNO3_H-to-L_P Parameter: Tissue Value: Roots
  misc_feature: MA Experiment 108532 PARAMETER Experiment Name: Zm_20uM_KNO3_H-to-L_P Parameter: Treatment Value: 20uM KNO3 vs. 60mM KNO3
  misc_feature: MA Experiment ID: 108547 Result: Up-regulated in Transcription
  misc_feature: MA Experiment 108547 PARAMETER Experiment Name: Zm_Imbibed_Seeds_P Parameter: Age (day) Value: 4 vs. 2
  misc_feature: MA Experiment 108547 PARAMETER Experiment Name: Zm_Imbibed_Seeds_P Parameter: Organism Value: Zea mays
  misc_feature: MA Experiment 108547 PARAMETER Experiment Name: Zm_Imbibed_Seeds_P Parameter: Plant Line Value: 35A19
  misc_feature: MA Experiment 108547 PARAMETER Experiment Name: Zm_Imbibed_Seeds_P Parameter: Tissue Value: Aerial vs. Embryo
  misc_feature: MA Experiment ID: 108689 Result: Down-regulated in Transcription
  misc_feature: MA Experiment 108689 PARAMETER Experiment Name: Zm_Drought_Roots_P Parameter: Age (day) Value: 9
  misc_feature: MA Experiment 108689 PARAMETER Experiment Name: Zm_Drought_Roots_P Parameter: Organism Value: Zea mays
  misc_feature: MA Experiment 108689 PARAMETER Experiment Name: Zm_Drought_Roots_P Parameter: Plant Line Value: 35A19
  misc_feature: MA Experiment 108689 PARAMETER Experiment Name: Zm_Drought_Roots_P Parameter: Timepoint (hr) Value: 24
  misc_feature: MA Experiment 108689 PARAMETER Experiment Name: Zm_Drought_Roots_P Parameter: Tissue Value: Roots
  misc_feature: MA Experiment 108689 PARAMETER Experiment Name: Zm_Drought_Roots_P Parameter: Treatment Value: Drought vs. No Drought
tccaactctgcgccgcaatccactcaagaaggttagccctcgtggtctcggatttggataatcctccgccgaggtatgaaacaggaggcggccaccagcatagtggtgacccaggaggacgtcctgcaccactacaaggagcctccaccccgccgcgaggacgatccgccagcactggctgcgtcgctgtcgttgccgtcgtcactgtcggaggacaatggcgacgccatgccgcagccatcttcatacgcggtcttgccgcgccgggatggcgagctggtgtctgcggaggagctgctgctggtgccgccgctcaacttcgccatggtggaccacggcgtgtaccgctccggattcccggacgcctccaacttgccgtttcttgagacgctccgactccgctccgtcctgtgcctgtgcccggagccatacccggaggctaatctggagttcctccgtgcccacgggatcaagctcttccagttcggaatcgacggctccaaggaaccatttgtgaacataccagaagatagaatccgtgaagctctagaagtcatcctagatgcaagcaaccatccggttcttattcactgcaagcgaggaaagcatcgaaccggctgtgtggttggatgctttaggaaattgcaacgctggtgtctaacttcaatatttgacgaataccagcgttttgctgctgccaaaacaagagtttctgacctacggttcatggagctatttgatgtatcgagcataaagcatttagcatttgagtcgtctgtatgatagtaacattggtgcatgataacaactcaatactggttccattacggtgtcatctttttcatttaagaaaaaaaatcatttctaaaaatgc

SEQ ID NO: 3732 - protein, 235 aa, Zea mays subsp. mays
  peptide (1)..(235): Ceres Seq. ID no. 12342814
  misc_feature (76)..(235): Pfam Name: Tyrosine phosphatase family Pfam Description: Tyrosine phosphatase family
  misc_feature (75)..(234): Homolog of NCBI NO: 7487406 NR Description: hypothetical protein T24M8.4 - Arabidopsis
  misc_feature (76)..(234): Homolog of NCBI NO: 6324296 NR Description: Synthetic interaction with Whi2; Siw14p
  misc_feature (75)..(231): Homolog of NCBI NO: 15237359 NR Description: putative protein
  misc_feature (75)..(231): Homolog of NCBI NO: 21553927 NR Description: unknown [Arabidopsis thaliana]
  misc_feature (75)..(235): Homolog of NCBI NO: 15232985 NR Description: unknown protein; protein id: At3g02800.1
  misc_feature (49)..(234): Homolog of NCBI NO: 18412419 NR Description: putative protein
  misc_feature (48)..(143): Homolog of NCBI NO: 30102538 NR Description: At2g32960 [Arabidopsis thaliana]
  misc_feature (138)..(234): Homolog of NCBI NO: 30102538 NR Description: At2g32960 [Arabidopsis thaliana]
  misc_feature (48)..(234): Homolog of NCBI NO: 15225761 NR Description: unknown protein; protein id: At2g32960.1
  misc_feature (44)..(235): Homolog of NCBI NO: 15220383 NR Description: unkown protein; protein id: At1g05000.1
MKQEAATSIVVTQEDVLHHYKEPPPRREDDPPALAASLSLPSSLSEDNGDAMPQPSSYAVLPRRDGELVSAEELLLVPPLNFAMVDHGVYRSGFPDASNLPFLETLRLRSVLCLCPEPYPEANLEFLRAHGIKLFQFGIDGSKEPFVNIPEDRIREALEVILDASNHPVLIHCKRGKHRTGCVVGCFRKLQRWCLTSIFDEYQRFAAAKTRVSDLRFMELFDVSSIKHLAFESSV

SEQ ID NO: 3733 - protein, 184 aa, Zea mays subsp. mays
  peptide (1)..(184): Ceres Seq. ID no. 12342815
  misc_feature (25)..(184): Pfam Name: Tyrosine phosphatase family Pfam Description: Tyrosine phosphatase family
  misc_feature (24)..(183): Homolog of NCBI NO: 7487406 NR Description: hypothetical protein T24M8.4 - Arabidopsis
  misc_feature (25)..(183): Homolog of NCBI NO: 6324296 NR Description: Synthetic interaction with Whi2; Siw14p
  misc_feature (24)..(180): Homolog of NCBI NO: 15237359 NR Description: putative protein
  misc_feature (24)..(180): Homolog of NCBI NO: 21553927 NR Description: unknown [Arabidopsis thaliana]
  misc_feature (24)..(184): Homolog of NCBI NO: 15232985 NR Description: unknown protein; protein id: At3g02800.1
  misc_feature (1)..(183): Homolog of NCBI NO: 18412419 NR Description: putative protein
  misc_feature (1)..(92): Homolog of NCBI NO: 30102538 NR Description: At2g32960 [Arabidopsis thaliana]
  misc_feature (87)..(183): Homolog of NCBI NO: 30102538 NR Description: At2g32960 [Arabidopsis thaliana]
  misc_feature (1)..(183): Homolog of NCBI NO: 15225761 NR Description: unknown protein; protein id: At2g32960.1
  misc_feature (1)..(184): Homolog of NCBI NO: 15220383 NR Description: unkown protein; protein id: At1g05000.1
MPQPSSYAVLPRRDGELVSAEELLLVPPLNFAMVDHGVYRSGFPDASNLPFLETLRLRSVLCLCPEPYPEANLEFLRAHGIKLFQFGIDGSKEPFVNIPEDRIREALEVILDASNHPVLIHCKRGKHRTGCVVGCFRKLQRWCLTSIFDEYQRFAAAKTRVSDLRFMELFDVSSIKHLAFESSV

SEQ ID NO: 3734 - protein, 152 aa, Zea mays subsp. mays
  peptide (1)..(152): Ceres Seq. ID no. 12342816
  misc_feature (1)..(152): Pfam Name: Tyrosine phosphatase family Pfam Description: Tyrosine phosphatase family
  misc_feature (1)..(151): Homolog of NCBI NO: 7487406 NR Description: hypothetical protein T24M8.4 - Arabidopsis
  misc_feature (1)..(151): Homolog of NCBI NO: 6324296 NR Description: Synthetic interaction with Whi2; Siw14p
  misc_feature (1)..(148): Homolog of NCBI NO: 15237359 NR Description: putative protein
  misc_feature (1)..(148): Homolog of NCBI NO: 21553927 NR Description: unknown [Arabidopsis thaliana]
  misc_feature (1)..(152): Homolog of NCBI NO: 15232985 NR Description: unknown protein; protein id: At3g02800.1
  misc_feature (1)..(151): Homolog of NCBI NO: 18412419 NR Description: putative protein
  misc_feature (1)..(60): Homolog of NCBI NO: 30102538 NR Description: At2g32960 [Arabidopsis thaliana]
  misc_feature (55)..(151): Homolog of NCBI NO: 30102538 NR Description: At2g32960 [Arabidopsis thaliana]
  misc_feature (1)..(151): Homolog of NCBI NO: 15225761 NR Description: unknown protein; protein id: At2g32960.1
  misc_feature (1)..(152): Homolog of NCBI NO: 15220383 NR Description: unkown protein; protein id: At1g05000.1
MVDHGVYRSGFPDASNLPFLETLRLRSVLCLCPEPYPEANLEFLRAHGIKLFQFGIDGSKEPFVNIPEDRIREALEVILDASNHPVLIHCKRGKHRTGCVVGCFRKLQRWCLTSIFDEYQRFAAAKTRVSDLRFMELFDVSSIKHLAFESSV

SEQ ID NO: 3735 - DNA, 1302 bp, Zea mays subsp. mays; identical to SEQ ID NO: 1696
  misc_feature (1)..(1302): Ceres Seq. ID no. 12411041
  misc_feature: MA Experiment ID: 108523 Result: Up-regulated in Transcription
  misc_feature: MA Experiment 108523 PARAMETER Experiment Name: Zm_42deg_Heat_P Parameter: Age (day) Value: 8
  misc_feature: MA Experiment 108523 PARAMETER Experiment Name: Zm_42deg_Heat_P Parameter: Organism Value: Zea mays
  misc_feature: MA Experiment 108523 PARAMETER Experiment Name: Zm_42deg_Heat_P Parameter: Plant Line Value: 35A19
  misc_feature: MA Experiment 108523 PARAMETER Experiment Name: Zm_42deg_Heat_P Parameter: Temperature (deg C) Value: 42 vs. 22
  misc_feature: MA Experiment 108523 PARAMETER Experiment Name: Zm_42deg_Heat_P Parameter: Timepoint (hr) Value: 6
  misc_feature: MA Experiment 108523 PARAMETER Experiment Name: Zm_42deg_Heat_P Parameter: Tissue Value: Aerial
  misc_feature: MA Experiment ID: 108556 Result: Down-regulated in Transcription
  misc_feature: MA Experiment 108556 PARAMETER Experiment Name: Zm_Drought_P Parameter: Age (day) Value: 9
  misc_feature: MA Experiment 108556 PARAMETER Experiment Name: Zm_Drought_P Parameter: Organism Value: Zea mays
  misc_feature: MA Experiment 108556 PARAMETER Experiment Name: Zm_Drought_P Parameter: Plant Line Value: 35A19
  misc_feature: MA Experiment 108556 PARAMETER Experiment Name: Zm_Drought_P Parameter: Timepoint (hr) Value: 24
  misc_feature: MA Experiment 108556 PARAMETER Experiment Name: Zm_Drought_P Parameter: Tissue Value: Aerial
  misc_feature: MA Experiment 108556 PARAMETER Experiment Name: Zm_Drought_P Parameter: Treatment Value: Drought vs. No Drought

SEQ ID NO: 3736 - protein, 139 aa, Zea mays subsp. mays; identical to SEQ ID NO: 1697
  peptide (1)..(139): Ceres Seq. ID no. 12411042
  misc_feature (19)..(112): Pfam Name: Ribosomal protein L7Ae/L30e/S12e/Gadd45 family Pfam Description: Ribosomal protein L7Ae/L30e/S12e/Gadd45 family
  misc_feature (19)..(112): Pfam Name: Ribosomal protein L7Ae/L30e/S12e/Gadd45 family Pfam Description: Ribosomal protein L7Ae/L30e/S12e/Gadd45 family
  misc_feature (2)..(126): Homolog of NCBI NO: 4826860 NR Description: NHP2 non-histone chromosome protein 2-like 1
  misc_feature (2)..(126): Homolog of NCBI NO: 38174386 NR Description: Unknown (protein for MGC:75724) [Silurana
  misc_feature (5)..(126): Homolog of NCBI NO: 37530712 NR Description: putative ribosomal protein L7Ae-like
  misc_feature (2)..(126): Homolog of NCBI NO: 28302201 NR Description: Similar to NHP2 non-histone chromosome protein
  misc_feature (5)..(45): Homolog of NCBI NO: 30687670 NR Description: ribosomal protein L7Ae family [Arabidopsis
  misc_feature (2)..(126): Homolog of NCBI NO: 4826860 NR Description: NHP2 non-histone chromosome protein 2-like 1
  misc_feature (5)..(126): Homolog of NCBI NO: 37530712 NR Description: putative ribosomal protein L7Ae-like
  misc_feature (5)..(45): Homolog of NCBI NO: 30687670 NR Description: ribosomal protein L7Ae family [Arabidopsis
  misc_feature (5)..(119): Homolog of NCBI NO: 21592866 NR Description: Ribosomal protein L7Ae-like [Arabidopsis thaliana]
  misc_feature (5)..(119): Homolog of NCBI NO: 15241276 NR Description: ribosomal protein L7Ae-like
  misc_feature (5)..(119): Homolog of NCBI NO: 15236127 NR Description: Ribosomal protein L7Ae - like; protein id:
  misc_feature (5)..(119): Homolog of NCBI NO: 15235416 NR Description: Ribosomal protein L7Ae -like
  misc_feature (41)..(119): Homolog of NCBI NO: 30687670 NR Description: ribosomal protein L7Ae family [Arabidopsis
  misc_feature (2)..(126): Homolog of NCBI NO: 28302201 NR Description: Similar to NHP2 non-histone chromosome protein
  misc_feature (2)..(126): Homolog of NCBI NO: 38174386 NR Description: Unknown (protein for MGC:75724) [Silurana
  misc_feature (41)..(119): Homolog of NCBI NO: 30687670 NR Description: ribosomal protein L7Ae family [Arabidopsis
  misc_feature (5)..(119): Homolog of NCBI NO: 15235416 NR Description: Ribosomal protein L7Ae -like
  misc_feature (5)..(119): Homolog of NCBI NO: 15236127 NR Description: Ribosomal protein L7Ae - like; protein id:
  misc_feature (5)..(119): Homolog of NCBI NO: 15241276 NR Description: ribosomal protein L7Ae-like
  misc_feature (5)..(119): Homolog of NCBI NO: 21592866 NR Description: Ribosomal protein L7Ae-like [Arabidopsis thaliana]

SEQ ID NO: 3737 - protein, 85 aa, Zea mays subsp. mays; identical to SEQ ID NO: 1698
  peptide (1)..(85): Ceres Seq. ID no. 12411043
  misc_feature (1)..(58): Pfam Name: Ribosomal protein L7Ae/L30e/S12e/Gadd45 family Pfam Description: Ribosomal protein L7Ae/L30e/S12e/Gadd45 family
  misc_feature (1)..(58): Pfam Name: Ribosomal protein L7Ae/L30e/S12e/Gadd45 family Pfam Description: Ribosomal protein L7Ae/L30e/S12e/Gadd45 family
  misc_feature (1)..(65): Homolog of NCBI NO: 15236127 NR Description: Ribosomal protein L7Ae - like; protein id:
  misc_feature (1)..(65): Homolog of NCBI NO: 15241276 NR Description: ribosomal protein L7Ae-like
  misc_feature (1)..(72): Homolog of NCBI NO: 4826860 NR Description: NHP2 non-histone chromosome protein 2-like 1
  misc_feature (1)..(72): Homolog of NCBI NO: 37530712 NR Description: putative ribosomal protein L7Ae-like
  misc_feature (1)..(65): Homolog of NCBI NO: 30687670 NR Description: ribosomal protein L7Ae family [Arabidopsis
  misc_feature (1)..(72): Homolog of NCBI NO: 38174386 NR Description: Unknown (protein for MGC:75724) [Silurana
  misc_feature (1)..(72): Homolog of NCBI NO: 28302201 NR Description: Similar to NHP2 non-histone chromosome protein
  misc_feature (1)..(65): Homolog of NCBI NO: 15235416 NR Description: Ribosomal protein L7Ae -like
  misc_feature (1)..(72): Homolog of NCBI NO: 4826860 NR Description: NHP2 non-histone chromosome protein 2-like 1
  misc_feature (1)..(72): Homolog of NCBI NO: 12835698 NR Description: unnamed protein product [Mus musculus]
  misc_feature (1)..(65): Homolog of NCBI NO: 21592866 NR Description: Ribosomal protein L7Ae-like [Arabidopsis thaliana]
  misc_feature (1)..(65): Homolog of NCBI NO: 15241276 NR Description: ribosomal protein L7Ae-like
  misc_feature (1)..(65): Homolog of NCBI NO: 15236127 NR Description: Ribosomal protein L7Ae - like; protein id:
  misc_feature (1)..(65): Homolog of NCBI NO: 30687670 NR Description: ribosomal protein L7Ae family [Arabidopsis
  misc_feature (1)..(72): Homolog of NCBI NO: 37530712 NR Description: putative ribosomal protein L7Ae-like
  misc_feature (1)..(65): Homolog of NCBI NO: 15235416 NR Description: Ribosomal protein L7Ae -like
  misc_feature (1)..(72): Homolog of NCBI NO: 28302201 NR Description: Similar to NHP2 non-histone chromosome protein
  misc_feature (1)..(72): Homolog of NCBI NO: 38174386 NR Description: Unknown (protein for MGC:75724) [Silurana
  misc_feature (1)..(72): Homolog of NCBI NO: 12835698 NR Description: unnamed protein product [Mus musculus]
  misc_feature (1)..(65): Homolog of NCBI NO: 21592866 NR Description: Ribosomal protein L7Ae-like [Arabidopsis thaliana]

SEQ ID NO: 3738 - DNA, 520 bp, Zea mays subsp. mays
  misc_feature (1)..(520): Ceres Seq. ID no. 13564877
  misc_feature: MA Experiment ID: 108535 Result: Up-regulated in Transcription
  misc_feature: MA Experiment 108535 PARAMETER Experiment Name: Zm_Meristem_P Parameter: Age (day) Value: 8
  misc_feature: MA Experiment 108535 PARAMETER Experiment Name: Zm_Meristem_P Parameter: Organism Value: Zea mays
  misc_feature: MA Experiment 108535 PARAMETER Experiment Name: Zm_Meristem_P Parameter: Plant Line Value: 35A19
  misc_feature: MA Experiment 108535 PARAMETER Experiment Name: Zm_Meristem_P Parameter: Tissue Value: Root Meristem vs. Above Root Meristem
  misc_feature: MA Experiment ID: 108556 Result: Down-regulated in Transcription
  misc_feature: MA Experiment 108556 PARAMETER Experiment Name: Zm_Drought_P Parameter: Age (day) Value: 9
  misc_feature: MA Experiment 108556 PARAMETER Experiment Name: Zm_Drought_P Parameter: Organism Value: Zea mays
  misc_feature: MA Experiment 108556 PARAMETER Experiment Name: Zm_Drought_P Parameter: Plant Line Value: 35A19
  misc_feature: MA Experiment 108556 PARAMETER Experiment Name: Zm_Drought_P Parameter: Timepoint (hr) Value: 24
  misc_feature: MA Experiment 108556 PARAMETER Experiment Name: Zm_Drought_P Parameter: Tissue Value: Aerial
  misc_feature: MA Experiment 108556 PARAMETER Experiment Name: Zm_Drought_P Parameter: Treatment Value: Drought vs. No Drought
  misc_feature: MA Experiment ID: 20000487 Result: Up-regulated in Transcription
  misc_feature: MA Experiment 20000487 PARAMETER Experiment Name: Zm_50mM_NH4NO3_L_to_H_P Parameter: Organism Value: Zea mays
  misc_feature: MA Experiment 20000487 PARAMETER Experiment Name: Zm_50mM_NH4NO3_L_to_H_P Parameter: Timepoint (hr) Value: 4
  misc_feature: MA Experiment 20000487 PARAMETER Experiment Name: Zm_50mM_NH4NO3_L_to_H_P Parameter: Tissue Value: Leaves
  misc_feature: MA Experiment 20000487 PARAMETER Experiment Name: Zm_50mM_NH4NO3_L_to_H_P Parameter: Treatment Value: 50mM NH4NO3 vs. 100mM Mannitol
  misc_feature: MA Experiment ID: 20000488 Result: Up-regulated in Transcription
  misc_feature: MA Experiment 20000488 PARAMETER Experiment Name: Zm_50mM_NH4NO3_L_to_H_P Parameter: Organism Value: Zea mays
  misc_feature: MA Experiment 20000488 PARAMETER Experiment Name: Zm_50mM_NH4NO3_L_to_H_P Parameter: Timepoint (hr) Value: 8
  misc_feature: MA Experiment 20000488 PARAMETER Experiment Name: Zm_50mM_NH4NO3_L_to_H_P Parameter: Tissue Value: Leaves
  misc_feature: MA Experiment 20000488 PARAMETER Experiment Name: Zm_50mM_NH4NO3_L_to_H_P Parameter: Treatment Value: 50mM NH4NO3 vs. 100mM Mannitol
  misc_feature: MA Experiment ID: 20000492 Result: Up-regulated in Transcription
  misc_feature: MA Experiment 20000492 PARAMETER Experiment Name: Zm_Hybrid_Seed_Dev_P Parameter: DAP Value: 12
  misc_feature: MA Experiment 20000492 PARAMETER Experiment Name: Zm_Hybrid_Seed_Dev_P Parameter: Organism Value: Zea mays
  misc_feature: MA Experiment 20000492 PARAMETER Experiment Name: Zm_Hybrid_Seed_Dev_P Parameter: Plant Line Value: 35A19
  misc_feature: MA Experiment 20000492 PARAMETER Experiment Name: Zm_Hybrid_Seed_Dev_P Parameter: Tissue Value: Fert Kernel vs. Unfert Floret
cacaaccngccgccgtccaccccctcctagagcggaaccacattccacggctctaaggccatgtcgccggcgtccctcgcagctcggctcctacgccgcgccgcttccacctcttcctctcctctctccgctcttgtccgccgcggtctctgttcctcggcgcccgttcccctcctccgccgtctccctgcggccacctcatcgacggcggggaccaccgcccgccgcttcctggcgtcgcagtccccggcgtcctcctccacgtcttcggmggacgataacctgaggmgcatcgtcgagtctgagatcgagtgcgttgtccagtcggaggagagcaacaccgacaagcacattgatctaccagaggacttcccttttgagatcatagacaatcctggtgatcagtcaataaccctccaaagggagattgcaggggagacaattaaagctgttatatacaccaactttgatacagatgaacatttggatgatgaggatgacaaaagtkggcacagatgag

SEQ ID NO: 3739 - protein, 152 aa, Zea mays subsp. mays
  peptide (1)..(152): Ceres Seq. ID no. 13564878
  misc_feature (79)..(148): Pfam Name: Mitochondrial glycoprotein Pfam Description: Mitochondrial glycoprotein
  misc_feature (13)..(152): Homolog of NCBI NO: 34895730 NR Description: P0019D06.23 [Oryza sativa (japonica
  misc_feature (63)..(148): Homolog of NCBI NO: 15239320 NR Description: expressed protein [Arabidopsis thaliana]
  misc_feature (70)..(147): Homolog of NCBI NO: 7487698 NR Description: hypothetical protein At2g39790 [imported] -
  misc_feature (1)..(147): Homolog of NCBI NO: 11357566 NR Description: hypothetical protein F1I16.10 - Arabidopsis
  misc_feature (8)..(147): Homolog of NCBI NO: 18410318 NR Description: expressed protein [Arabidopsis thaliana]
  misc_feature (5)..(147): Homolog of NCBI NO: 21593469 NR Description: unknown [Arabidopsis thaliana]
  misc_feature (5)..(147): Homolog of NCBI NO: 18405164 NR Description: expressed protein [Arabidopsis thaliana]
  misc_feature (10)..(148): Homolog of NCBI NO: 15241669 NR Description: expressed protein [Arabidopsis thaliana]
  misc_feature (10)..(148): Homolog of NCBI NO: 21592321 NR Description: unknown [Arabidopsis thaliana]
  misc_feature (71)..(71): Xaa is any aa, unknown or other
  misc_feature (77)..(77): Xaa is any aa, unknown or other
  misc_feature (150)..(150): Xaa is any aa, unknown or other
MSPASLAARLLRRAASTSSSPLSALVRRGLCSSAPVPLLRRLPAATSSTAGTTARRFLASQSPASSSTSSXDDNLRXIVESEIECVVQSEESNTDKHIDLPEDFPFEIIDNPGDQSITLQREIAGETIKAVIYTNFDTDEHLDDEDDKSXHR

SEQ ID NO: 3740 - protein, 94 aa, Zea mays subsp. mays
  peptide (1)..(94): Ceres Seq. ID no. 13564879
  misc_feature (3)..(3): Xaa is any aa, unknown or other
  misc_feature (91)..(91): Xaa is any aa, unknown or other
TTXRRPPPPRAEPHSTALRPCRRRPSQLGSYAAPLPPLPLLSPLLSAAVSVPRRPFPSSAVSLRPPHRRRGPPPAASWRRSPRRPPPRLRXTIT

SEQ ID NO: 3741 - DNA, 698 bp, Zea mays subsp. mays
  misc_feature (1)..(698): Ceres Seq. ID no. 13492060
  misc_feature: MA Experiment ID: 108543 Result: Down-regulated in Transcription
  misc_feature: MA Experiment ID: 20000535 Result: Up-regulated in Transcription
  misc_feature: MA Experiment 20000535 PARAMETER Experiment Name: Zm_Hybrid_Seed_Dev_P Parameter: DAP Value: 30 vs. 12
  misc_feature: MA Experiment 20000535 PARAMETER Experiment Name: Zm_Hybrid_Seed_Dev_P Parameter: Organism Value: Zea mays
  misc_feature: MA Experiment 20000535 PARAMETER Experiment Name: Zm_Hybrid_Seed_Dev_P Parameter: Plant Line Value: 35A19
  misc_feature: MA Experiment 20000535 PARAMETER Experiment Name: Zm_Hybrid_Seed_Dev_P Parameter: Tissue Value: Embryo vs. Unfert Floret
accggatcaccagcctacagctcgtcacatctctctctctccgcccggccgcggcctctagactcactctaaccgccatggccacggcgcacggcagcaggctcatcttcctcttcgaggccacgctcttctcggcgctgctgctcgtcccggcacgccctgcttccgccgcagacggcagcgcgtacccggccggcgactgcccctacccgtgcctgccgccgcccgccgtcaccgccaactgcccgccgcctccgccggctgcggcgtcgtactcgtacccgccaccgccgggggcttacattccctacttccagcctgcggcgggtggcggtggtggcggcggtagtggggggtacggcggctacccggcgccgccgccgcccaaccccatcctgccgtggtacccatggtactacaagacgccgccgtcgtccgcggccgccacgtcgggcagggggagtcgcgttcttcttgggtcggccgccatggtagctgctgctgccctgctgatcatggcttagccgcagcccgcagcagtcgttctttttgcatcttcgatcttgttctcacccccaggttttttttcctcttgttaatttactgctcaggatttatattcagaggtatataacgagggagcattatatatattgcttgtactcctaatttatcagctacatgtctctagttccttg

SEQ ID NO: 3742 - protein, 173 aa, Zea mays subsp. mays
  peptide (1)..(173): Ceres Seq. ID no. 13492061
  misc_feature (68)..(143): Pfam Name: Extensin-like region Pfam Description: Extensin-like region
  misc_feature (54)..(162): Homolog of NCBI NO: 7510074 NR Description: hypothetical protein Y50E8A.g - Caenorhabditis
  misc_feature (63)..(166): Homolog of NCBI NO: 18422542 NR Description: proline-rich protein family [Arabidopsis
  misc_feature (46)..(126): Homolog of NCBI NO: 34894212 NR Description: P0439B06.27 [Oryza sativa (japonica
  misc_feature (36)..(156): Homolog of NCBI NO: 15234820 NR Description: proline-rich protein family [Arabidopsis
  misc_feature (83)..(168): Homolog of NCBI NO: 34894480 NR Description: OJ1116_C07.3 [Oryza sativa (japonica
  misc_feature (67)..(170): Homolog of NCBI NO: 18409730 NR Description: proline-rich protein family [Arabidopsis
  misc_feature (67)..(172): Homolog of NCBI NO: 15220010 NR Description: expressed protein [Arabidopsis thaliana]
  misc_feature (42)..(164): Homolog of NCBI NO: 18397707 NR Description: proline-rich protein family [Arabidopsis
  misc_feature (48)..(148): Homolog of NCBI NO: 18423010 NR Description: proline-rich protein family [Arabidopsis
  misc_feature (42)..(171): Homolog of NCBI NO: 34894212 NR Description: P0439B06.27 [Oryza sativa (japonica
RITSLQLVTSLSLRPAAASRLTLTAMATAHGSRLIFLFEATLFSALLLVPARPASAADGSAYPAGDCPYPCLPPPAVTANCPPPPPAAASYSYPPPPGAYIPYFQPAAGGGGGGGSGGYGGYPAPPPPNPILPWYPWYYKTPPSSAAATSGRGSRVLLGSAAMVAAAALLIMA

SEQ ID NO: 3743 - protein, 148 aa, Zea mays subsp. mays
  peptide (1)..(148): Ceres Seq. ID no. 13492062
  misc_feature (43)..(118): Pfam Name: Extensin-like region Pfam Description: Extensin-like region
  misc_feature (29)..(137): Homolog of NCBI NO: 7510074 NR Description: hypothetical protein Y50E8A.g - Caenorhabditis
  misc_feature (38)..(141): Homolog of NCBI NO: 18422542 NR Description: proline-rich protein family [Arabidopsis
  misc_feature (21)..(101): Homolog of NCBI NO: 34894212 NR Description: P0439B06.27 [Oryza sativa (japonica
  misc_feature (11)..(131): Homolog of NCBI NO: 15234820 NR Description: proline-rich protein family [Arabidopsis
  misc_feature (58)..(143): Homolog of NCBI NO: 34894480 NR Description: OJ1116_C07.3 [Oryza sativa (japonica
  misc_feature (42)..(145): Homolog of NCBI NO: 18409730 NR Description: proline-rich protein family [Arabidopsis
  misc_feature (42)..(147): Homolog of NCBI NO: 15220010 NR Description: expressed protein [Arabidopsis thaliana]
  misc_feature (17)..(139): Homolog of NCBI NO: 18397707 NR Description: proline-rich protein family [Arabidopsis
  misc_feature (23)..(123): Homolog of NCBI NO: 18423010 NR Description: proline-rich protein family [Arabidopsis
  misc_feature (17)..(146): Homolog of NCBI NO: 34894212 NR Description: P0439B06.27 [Oryza sativa (japonica
MATAHGSRLIFLFEATLFSALLLVPARPASAADGSAYPAGDCPYPCLPPPAVTANCPPPPPAAASYSYPPPPGAYIPYFQPAAGGGGGGGSGGYGGYPAPPPPNPILPWYPWYYKTPPSSAAATSGRGSRVLLGSAAMVAAAALLIMA

SEQ ID NO: 3744 - DNA, 1179 bp, Zea mays subsp. mays
  misc_feature (1)..(1179): Ceres Seq. ID no. 12341648
  misc_feature: MA Experiment ID: 108530 Result: Down-regulated in Transcription
  misc_feature: MA Experiment 108530 PARAMETER Experiment Name: Zm_Imbibed_Seeds_P Parameter: Age (day) Value: 6 vs. 2
  misc_feature: MA Experiment 108530 PARAMETER Experiment Name: Zm_Imbibed_Seeds_P Parameter: Organism Value: Zea mays
  misc_feature: MA Experiment 108530 PARAMETER Experiment Name: Zm_Imbibed_Seeds_P Parameter: Plant Line Value: 35A19
  misc_feature: MA Experiment 108530 PARAMETER Experiment Name: Zm_Imbibed_Seeds_P Parameter: Tissue Value: Aerial vs. Embryo
  misc_feature: MA Experiment ID: 108536 Result: Down-regulated in Transcription
  misc_feature: MA Experiment 108536 PARAMETER Experiment Name: Zm_Meristem_P Parameter: Age (day) Value: 8
  misc_feature: MA Experiment 108536 PARAMETER Experiment Name: Zm_Meristem_P Parameter: Organism Value: Zea mays
  misc_feature: MA Experiment 108536 PARAMETER Experiment Name: Zm_Meristem_P Parameter: Plant Line Value: 35A19
  misc_feature: MA Experiment 108536 PARAMETER Experiment Name: Zm_Meristem_P Parameter: Tissue Value: Shoot Meristem vs. Above Shoot Meristem
  misc_feature: MA Experiment ID: 20000488 Result: Down-regulated in Transcription
  misc_feature: MA Experiment 20000488 PARAMETER Experiment Name: Zm_50mM_NH4NO3_L_to_H_P Parameter: Organism Value: Zea mays
  misc_feature: MA Experiment 20000488 PARAMETER Experiment Name: Zm_50mM_NH4NO3_L_to_H_P Parameter: Timepoint (hr) Value: 8
  misc_feature: MA Experiment 20000488 PARAMETER Experiment Name: Zm_50mM_NH4NO3_L_to_H_P Parameter: Tissue Value: Leaves
  misc_feature: MA Experiment 20000488 PARAMETER Experiment Name: Zm_50mM_NH4NO3_L_to_H_P Parameter: Treatment Value: 50mM NH4NO3 vs. 100mM Mannitol
  misc_feature: MA Experiment ID: 20000626 Result: Down-regulated in Transcription
  misc_feature: MA Experiment 20000626 PARAMETER Experiment Name: Zm_Herbicide-Treatments_P Parameter: Timepoint (hr) Value: 12
  misc_feature: MA Experiment 20000626 PARAMETER Experiment Name: Zm_Herbicide-Treatments_P Parameter: Tissue Value: Aerial
  misc_feature: MA Experiment 20000626 PARAMETER Experiment Name: Zm_Herbicide-Treatments_P Parameter: Treatment Value: Roundup vs. No Treatment
tcgagggggaataaaatcccagcggcttcccccaaacaaaacctcttctccgccagagtccgcgtcggccagatcaaacgaatcggcacgacgcatcggcatcgcctccgacgatcttgagacaaacaaaacccaccgctgcggcaactccgcctcccgctgacacggggatcgcctgacaacaggcagagaaaagaggcgcagggtttgcccgcgaagatggaggacgtggacgtctcgcggcagctgaagcagatgacgaacttcatccgccaggaggccgtcgagaaggccgccgagatcgaggccgccgccgccgaggagttccaaatagaaaagttgcagctggtggaagctgaaaagaagaagatcaggcaggaatatgaccggaaagagaagcaagttggcatcaagaagaaaattgattactcgatgcagctcaatgcttccagaattaaagtccttcaagctcaggatgatttggtaacagatatgttggagtcagcaaggaaagagctactgtgcataagtagagatcaccccacttacaagaagctcctcaagacacttattgttcagagtttgctgcgcctgaaagaaccagctgtgcttctccgctgcaggaaggaggatcttcaacttgttgatttagttttggaatctgcaaggaatgagtatgcagataaagcaaaagtatatcctcctgagatagtggtagatcgtcaaatctatctgccatctgctcccagtcattatcaggcacctggcccctcatgctccggtggagttgtgctagcttcccgagatggaaagattgtctgtgaaaacacactggatgctagattgcaggtagttttcagaaagaagctgccagagattcgtcagagccttttcgggcaggtagctgcgtagccaattcttgaaagcagaacgtggcccagtactctttggggtaccctgacgatgtccaggagaaactttggcagctctcaatagtgatttatcacacttttggacctcgattattatttgtgtatacttttttcctggttatggatacctttgaatcctgcacagagcaaataaactgtgttcatttgtgggacgatcgtttgttgcaataaggcatcgagatgtgttgcgatgccacttctgttatagcatcatgttttttcgttg

SEQ ID NO: 3745 - protein, 230 aa, Zea mays subsp. mays
  peptide (1)..(230): Ceres Seq. ID no. 12341649
  misc_feature (16)..(224): Pfam Name: ATP synthase (E/31 kDa) subunit Pfam Description: ATP synthase (E/31 kDa) subunit
  misc_feature (1)..(224): Homolog of NCBI NO: 4099148 NR Description: YLP [Hordeum vulgare]
  misc_feature (1)..(230): Homolog of NCBI NO: 15237054 NR Description: H+-transporting ATPase chain E, vacuolar
  misc_feature (1)..(230): Homolog of NCBI NO: 3334411 NR Description: Vacuolar ATP synthase subunit E (V-ATPase E
  misc_feature (5)..(230): Homolog of NCBI NO: 9652289 NR Description: putative vacuolar proton ATPase subunit E
  misc_feature (1)..(230): Homolog of NCBI NO: 3334405 NR Description: Vacuolar ATP synthase subunit E (V-ATPase E
  misc_feature (7)..(230): Homolog of NCBI NO: 29290712 NR Description: vacuolar ATPase subunit E [Phaseolus acutifolius]
  misc_feature (1)..(230): Homolog of NCBI NO: 34912000 NR Description: putative YLP [Oryza sativa (japonica
  misc_feature (1)..(230): Homolog of NCBI NO: 12585474 NR Description: Vacuolar ATP synthase subunit E (V-ATPase E
  misc_feature (1)..(230): Homolog of NCBI NO: 12585492 NR Description: Vacuolar ATP synthase subunit E (V-ATPase E
  misc_feature (1)..(230): Homolog of NCBI NO: 34904112 NR Description: unnamed protein product [Oryza sativa (japonica
MEDVDVSRQLKQMTNFIRQEAVEKAAEIEAAAAEEFQIEKLQLVEAEKKKIRQEYDRKEKQVGIKKKIDYSMQLNASRIKVLQAQDDLVTDMLESARKELLCISRDHPTYKKLLKTLIVQSLLRLKEPAVLLRCRKEDLQLVDLVLESARNEYADKAKVYPPEIVVDRQIYLPSAPSHYQAPGPSCSGGVVLASRDGKIVCENTLDARLQVVFRKKLPEIRQSLFGQVAA

SEQ ID NO: 3746 - protein, 218 aa, Zea mays subsp. mays
  peptide (1)..(218): Ceres Seq. ID no. 12341650
  misc_feature (4)..(212): Pfam Name: ATP synthase (E/31 kDa) subunit Pfam Description: ATP synthase (E/31 kDa) subunit
  misc_feature (1)..(212): Homolog of NCBI NO: 4099148 NR Description: YLP [Hordeum vulgare]
  misc_feature (1)..(218): Homolog of NCBI NO: 15237054 NR Description: H+-transporting ATPase chain E, vacuolar
  misc_feature (1)..(218): Homolog of NCBI NO: 3334411 NR Description: Vacuolar ATP synthase subunit E (V-ATPase E
  misc_feature (1)..(218): Homolog of NCBI NO: 9652289 NR Description: putative vacuolar proton ATPase subunit E
  misc_feature (1)..(218): Homolog of NCBI NO: 3334405 NR Description: Vacuolar ATP synthase subunit E (V-ATPase E
  misc_feature (1)..(218): Homolog of NCBI NO: 29290712 NR Description: vacuolar ATPase subunit E [Phaseolus acutifolius]
  misc_feature (1)..(218): Homolog of NCBI NO: 34912000 NR Description: putative YLP [Oryza sativa (japonica
  misc_feature (1)..(218): Homolog of NCBI NO: 12585474 NR Description: Vacuolar ATP synthase subunit E (V-ATPase E
  misc_feature (1)..(218): Homolog of NCBI NO: 12585492 NR Description: Vacuolar ATP synthase subunit E (V-ATPase E
  misc_feature (1)..(218): Homolog of NCBI NO: 34904112 NR Description: unnamed protein product [Oryza sativa (japonica
MTNFIRQEAVEKAAEIEAAAAEEFQIEKLQLVEAEKKKIRQEYDRKEKQVGIKKKIDYSMQLNASRIKVLQAQDDLVTDMLESARKELLCISRDHPTYKKLLKTLIVQSLLRLKEPAVLLRCRKEDLQLVDLVLESARNEYADKAKVYPPEIVVDRQIYLPSAPSHYQAPGPSCSGGVVLASRDGKIVCENTLDARLQVVFRKKLPEIRQSLFGQVAA

SEQ ID NO: 3747 - protein, 159 aa, Zea mays subsp. mays
  peptide (1)..(159): Ceres Seq. ID no. 12341651
  misc_feature (1)..(153): Pfam Name: ATP synthase (E/31 kDa) subunit Pfam Description: ATP synthase (E/31 kDa) subunit
  misc_feature (1)..(153): Homolog of NCBI NO: 4099148 NR Description: YLP [Hordeum vulgare]
  misc_feature (1)..(159): Homolog of NCBI NO: 15237054 NR Description: H+-transporting ATPase chain E, vacuolar
  misc_feature (1)..(159): Homolog of NCBI NO: 3334411 NR Description: Vacuolar ATP synthase subunit E (V-ATPase E
  misc_feature (1)..(159): Homolog of NCBI NO: 9652289 NR Description: putative vacuolar proton ATPase subunit E
  misc_feature (1)..(159): Homolog of NCBI NO: 3334405 NR Description: Vacuolar ATP synthase subunit E (V-ATPase E
  misc_feature (1)..(159): Homolog of NCBI NO: 29290712 NR Description: vacuolar ATPase subunit E [Phaseolus acutifolius]
  misc_feature (1)..(159): Homolog of NCBI NO: 34912000 NR Description: putative YLP [Oryza sativa (japonica
  misc_feature (1)..(159): Homolog of NCBI NO: 12585474 NR Description: Vacuolar ATP synthase subunit E (V-ATPase E
  misc_feature (1)..(159): Homolog of NCBI NO: 12585492 NR Description: Vacuolar ATP synthase subunit E (V-ATPase E
  misc_feature (1)..(159): Homolog of NCBI NO: 34904112 NR Description: unnamed protein product [Oryza sativa (japonica
MQLNASRIKVLQAQDDLVTDMLESARKELLCISRDHPTYKKLLKTLIVQSLLRLKEPAVLLRCRKEDLQLVDLVLESARNEYADKAKVYPPEIVVDRQIYLPSAPSHYQAPGPSCSGGVVLASRDGKIVCENTLDARLQVVFRKKLPEIRQSLFGQVAA

SEQ ID NO: 3748 - DNA, 883 bp, Zea mays subsp. mays
  misc_feature (1)..(883): Ceres Seq. ID no. 12404746
  misc_feature: MA Experiment ID: 20000534 Result: Down-regulated in Transcription
  misc_feature: MA Experiment 20000534 PARAMETER Experiment Name: Zm_Hybrid_Pollen_P Parameter: Age (day) Value: 8
  misc_feature: MA Experiment 20000534 PARAMETER Experiment Name: Zm_Hybrid_Pollen_P Parameter: Organism Value: Zea mays
  misc_feature: MA Experiment 20000534 PARAMETER Experiment Name: Zm_Hybrid_Pollen_P Parameter: Plant Line Value: 35A19
  misc_feature: MA Experiment 20000534 PARAMETER Experiment Name: Zm_Hybrid_Pollen_P Parameter: Tissue Value: Pollen vs. Aerial
atccgagtccacccaactaatcacgcccaatcagaacagactcggtcgcttcaccactccactcgccgcaggccgccgggcgccgccgaggggatcggagcaagatgttcttccacatcgtgctggagcggaacatgcagctgcacccacgacacttcgggccgcacctccgcgacaagctcgtttccaagctcatcaaggacgtcgagggcacctgcagcgggcggcacgggttcgttgtggcgatcacgggtgtggaggacatcggcaaggggctcatccgggaaggcacgggatacgtcaccttccccgtcaagtaccagtgcgttgtctttagacccttcaagggcgagatcctcgaagctgtcgtcaccatggtgaacaagatgggcttctttgcggaggctgggccggtgcagatcttcgtgtccaaccatttgattccagacgatatggagttccaatcaggagatgtgccgaactacacaacttctgatggatcggtgaaaattcaaaaagagagtgaggtgcggctgaagattattggtactcgtgtcgatgctacagaaattttttgcattggcacaataaaggatgattttctgggtgttatcagcgatcctggtgcggcagtgtaaatggtctaagaagcgagattgtactccattgttctgacttctgagtactatcgcagacgtgtgtaatcgctggtccgttaaaactgcaatggctgtactgactgcggaacttgttgagaatgatgtgactaggaccttgtttagggcctgtttggttctttagtatggccctgattggcacaactgctgtttattgaaaaaacagcttatctgataagctggtgaaaaatagcttctgcttgttg

SEQ ID NO: 3749 - protein, 177 aa, Zea mays subsp. mays
  peptide (1)..(177): Ceres Seq. ID no. 12404747
  misc_feature (78)..(160): Pfam Name: S1 RNA binding domain Pfam Description: S1 RNA binding domain
  misc_feature (1)..(168): Homolog of NCBI NO: 38567178 NR Description: probable DNA-directed RNA polymerase II chain
  misc_feature (1)..(168): Homolog of NCBI NO: 12655858 NR Description: RNA polymerase II subunit 7 [Candida albicans]
  misc_feature (2)..(170): Homolog of NCBI NO: 19114885 NR Description: RNA polymerase II subunit rpb7
  misc_feature (1)..(169): Homolog of NCBI NO: 17510349 NR Description: RNA polymerase Rpb7, N-terminal domain and S1 RNA
  misc_feature (1)..(169): Homolog of NCBI NO: 39595528 NR Description: Hypothetical protein CBG04195 [Caenorhabditis
  misc_feature (1)..(171): Homolog of NCBI NO: 28278826 NR Description: Unknown (protein for MGC:55297) [Danio rerio]
  misc_feature (1)..(171): Homolog of NCBI NO: 4505947 NR Description: DNA directed RNA polymerase II polypeptide G
  misc_feature (1)..(172): Homolog of NCBI NO: 24647020 NR Description: CG31155-PA [Drosophila melanogaster]
  misc_feature (1)..(176): Homolog of NCBI NO: 15237831 NR Description: RNA polymerase II; protein id: At5g59180.1
  misc_feature (1)..(173): Homolog of NCBI NO: 1173137 NR Description: DNA-DIRECTED RNA POLYMERASE II 19 KD POLYPEPTIDE
MFFHIVLERNMQLHPRHFGPHLRDKLVSKLIKDVEGTCSGRHGFVVAITGVEDIGKGLIREGTGYVTFPVKYQCVVFRPFKGEILEAVVTMVNKMGFFAEAGPVQIFVSNHLIPDDMEFQSGDVPNYTTSDGSVKIQKESEVRLKIIGTRVDATEIFCIGTIKDDFLGVISDPGAAV

SEQ ID NO: 3750 - protein, 167 aa, Zea mays subsp. mays
  peptide (1)..(167): Ceres Seq. ID no. 12404748
  misc_feature (68)..(150): Pfam Name: S1 RNA binding domain Pfam Description: S1 RNA binding domain
  misc_feature (1)..(158): Homolog of NCBI NO: 38567178 NR Description: probable DNA-directed RNA polymerase II chain
  misc_feature (1)..(158): Homolog of NCBI NO: 12655858 NR Description: RNA polymerase II subunit 7 [Candida albicans]
  misc_feature (1)..(160): Homolog of NCBI NO: 19114885 NR Description: RNA polymerase II subunit rpb7
  misc_feature (1)..(159): Homolog of NCBI NO: 17510349 NR Description: RNA polymerase Rpb7, N-terminal domain and S1 RNA
  misc_feature (1)..(159): Homolog of NCBI NO: 39595528 NR Description: Hypothetical protein CBG04195 [Caenorhabditis
  misc_feature (1)..(161): Homolog of NCBI NO: 28278826 NR Description: Unknown (protein for MGC:55297) [Danio rerio]
  misc_feature (1)..(161): Homolog of NCBI NO: 4505947 NR Description: DNA directed RNA polymerase II polypeptide G
  misc_feature (1)..(162): Homolog of NCBI NO: 24647020 NR Description: CG31155-PA [Drosophila melanogaster]
  misc_feature (1)..(166): Homolog of NCBI NO: 15237831 NR Description: RNA polymerase II; protein id: At5g59180.1
  misc_feature (1)..(163): Homolog of NCBI NO: 1173137 NR Description: DNA-DIRECTED RNA POLYMERASE II 19 KD POLYPEPTIDE
MQLHPRHFGPHLRDKLVSKLIKDVEGTCSGRHGFVVAITGVEDIGKGLIREGTGYVTFPVKYQCVVFRPFKGEILEAVVTMVNKMGFFAEAGPVQIFVSNHLIPDDMEFQSGDVPNYTTSDGSVKIQKESEVRLKIIGTRVDATEIFCIGTIKDDFLGVISDPGAAV

SEQ ID NO: 3751 - protein, 126 aa, Zea mays subsp. mays
  peptide (1)..(126): Ceres Seq. ID no. 12404749
IRVHPTNHAQSEQTRSLHHSTRRRPPGAAEGIGARCSSTSCWSGTCSCTHDTSGRTSATSSFPSSSRTSRAPAAGGTGSLWRSRVWRTSARGSSGKARDTSPSPSSTSALSLDPSRARSSKLSSPW

SEQ ID NO: 3752 - DNA, 858 bp, Zea mays subsp. mays
  misc_feature (1)..(858): Ceres Seq. ID no. 12356124
  misc_feature: MA Experiment ID: 108504 Result: Up-regulated in Transcription
  misc_feature: MA Experiment 108504 PARAMETER Experiment Name: Zm_Drought_P Parameter: Age (day) Value: 8
  misc_feature: MA Experiment 108504 PARAMETER Experiment Name: Zm_Drought_P Parameter: Organism Value: Zea mays
  misc_feature: MA Experiment 108504 PARAMETER Experiment Name: Zm_Drought_P Parameter: Plant Line Value: 35A19
  misc_feature: MA Experiment 108504 PARAMETER Experiment Name: Zm_Drought_P Parameter: Timepoint (hr) Value: 12
  misc_feature: MA Experiment 108504 PARAMETER Experiment Name: Zm_Drought_P Parameter: Tissue Value: Aerial
  misc_feature: MA Experiment 108504 PARAMETER Experiment Name: Zm_Drought_P Parameter: Treatment Value: Drought vs. No Drought
  misc_feature: MA Experiment ID: 108522 Result: Up-regulated in Transcription
  misc_feature: MA Experiment 108522 PARAMETER Experiment Name: Zm_42deg_Heat_P Parameter: Age (day) Value: 8
  misc_feature: MA Experiment 108522 PARAMETER Experiment Name: Zm_42deg_Heat_P Parameter: Organism Value: Zea mays
  misc_feature: MA Experiment 108522 PARAMETER Experiment Name: Zm_42deg_Heat_P Parameter: Plant Line Value: 35A19
  misc_feature: MA Experiment 108522 PARAMETER Experiment Name: Zm_42deg_Heat_P Parameter: Temperature (deg C) Value: 42 vs. 22
  misc_feature: MA Experiment 108522 PARAMETER Experiment Name: Zm_42deg_Heat_P Parameter: Timepoint (hr) Value: 1
  misc_feature: MA Experiment 108522 PARAMETER Experiment Name: Zm_42deg_Heat_P Parameter: Tissue Value: Aerial
  misc_feature: MA Experiment ID: 108523 Result: Up-regulated in Transcription
  misc_feature: MA Experiment 108523 PARAMETER Experiment Name: Zm_42deg_Heat_P Parameter: Age (day) Value: 8
  misc_feature: MA Experiment 108523 PARAMETER Experiment Name: Zm_42deg_Heat_P Parameter: Organism Value: Zea mays
  misc_feature: MA Experiment 108523 PARAMETER Experiment Name: Zm_42deg_Heat_P Parameter: Plant Line Value: 35A19
  misc_feature: MA Experiment 108523 PARAMETER Experiment Name: Zm_42deg_Heat_P Parameter: Temperature (deg C) Value: 42 vs. 22
  misc_feature: MA Experiment 108523 PARAMETER Experiment Name: Zm_42deg_Heat_P Parameter: Timepoint (hr) Value: 6
  misc_feature: MA Experiment 108523 PARAMETER Experiment Name: Zm_42deg_Heat_P Parameter: Tissue Value: Aerial
  misc_feature: MA Experiment ID: 108527 Result: Up-regulated in Transcription
  misc_feature: MA Experiment 108527 PARAMETER Experiment Name: Zm_5mM_NO_P Parameter: Age (day) Value: 8
  misc_feature: MA Experiment 108527 PARAMETER Experiment Name: Zm_5mM_NO_P Parameter: Organism Value: Zea mays
  misc_feature: MA Experiment 108527 PARAMETER Experiment Name: Zm_5mM_NO_P Parameter: Plant Line Value: 35A19
  misc_feature: MA Experiment 108527 PARAMETER Experiment Name: Zm_5mM_NO_P Parameter: Timepoint (hr) Value: 6
  misc_feature: MA Experiment 108527 PARAMETER Experiment Name: Zm_5mM_NO_P Parameter: Tissue Value: Aerial
  misc_feature: MA Experiment 108527 PARAMETER Experiment Name: Zm_5mM_NO_P Parameter: Treatment Value: 5mM NO vs. No Treatment
  misc_feature: MA Experiment ID: 108529 Result: Up-regulated in Transcription
  misc_feature: MA Experiment 108529 PARAMETER Experiment Name: Zm_Imbibed_Seeds_P Parameter: Age (day) Value: 5 vs. 2
  misc_feature: MA Experiment 108529 PARAMETER Experiment Name: Zm_Imbibed_Seeds_P Parameter: Organism Value: Zea mays
  misc_feature: MA Experiment 108529 PARAMETER Experiment Name: Zm_Imbibed_Seeds_P Parameter: Plant Line Value: 35A19
  misc_feature: MA Experiment 108529 PARAMETER Experiment Name: Zm_Imbibed_Seeds_P Parameter: Tissue Value: Roots vs. Embryo
  misc_feature: MA Experiment ID: 108530 Result: Up-regulated in Transcription
  misc_feature: MA Experiment 108530 PARAMETER Experiment Name: Zm_Imbibed_Seeds_P Parameter: Age (day) Value: 6 vs. 2
  misc_feature: MA Experiment 108530 PARAMETER Experiment Name: Zm_Imbibed_Seeds_P Parameter: Organism Value: Zea mays
  misc_feature: MA Experiment 108530 PARAMETER Experiment Name: Zm_Imbibed_Seeds_P Parameter: Plant Line Value: 35A19
  misc_feature: MA Experiment 108530 PARAMETER Experiment Name: Zm_Imbibed_Seeds_P Parameter: Tissue Value: Aerial vs. Embryo
  misc_feature: MA Experiment ID: 108533 Result: Up-regulated in Transcription
  misc_feature: MA Experiment 108533 PARAMETER Experiment Name: Zm_4deg_Cold_P Parameter: Age (hr) Value: 8
  misc_feature: MA Experiment 108533 PARAMETER Experiment Name: Zm_4deg_Cold_P Parameter: Organism Value: Zea mays
  misc_feature: MA Experiment 108533 PARAMETER Experiment Name: Zm_4deg_Cold_P Parameter: Plant Line Value: 35A19
  misc_feature: MA Experiment 108533 PARAMETER Experiment Name: Zm_4deg_Cold_P Parameter: Temperature (deg C) Value: 4 vs. 22
  misc_feature: MA Experiment 108533 PARAMETER Experiment Name: Zm_4deg_Cold_P Parameter: Timepoint (hr) Value: 1
  misc_feature: MA Experiment 108533 PARAMETER Experiment Name: Zm_4deg_Cold_P Parameter: Tissue Value: Aerial
  misc_feature: MA Experiment ID: 108534 Result: Up-regulated in Transcription
  misc_feature: MA Experiment 108534 PARAMETER Experiment Name: Zm_4deg_Cold_P Parameter: Age (hr) Value: 8
  misc_feature: MA Experiment 108534 PARAMETER Experiment Name: Zm_4deg_Cold_P Parameter: Organism Value: Zea mays
  misc_feature: MA Experiment 108534 PARAMETER Experiment Name: Zm_4deg_Cold_P Parameter: Plant Line Value: 35A19
  misc_feature: MA Experiment 108534 PARAMETER Experiment Name: Zm_4deg_Cold_P Parameter: Temperature (deg C) Value: 4 vs. 22
  misc_feature: MA Experiment 108534 PARAMETER Experiment Name: Zm_4deg_Cold_P Parameter: Timepoint (hr) Value: 6
  misc_feature: MA Experiment 108534 PARAMETER Experiment Name: Zm_4deg_Cold_P Parameter: Tissue Value: Aerial
  misc_feature: MA Experiment ID: 108535 Result: Down-regulated in Transcription
  misc_feature: MA Experiment 108535 PARAMETER Experiment Name: Zm_Meristem_P Parameter: Age (day) Value: 8
  misc_feature: MA Experiment 108535 PARAMETER Experiment Name: Zm_Meristem_P Parameter: Organism Value: Zea mays
  misc_feature: MA Experiment 108535 PARAMETER Experiment Name: Zm_Meristem_P Parameter: Plant Line Value: 35A19
  misc_feature: MA Experiment 108535 PARAMETER Experiment Name: Zm_Meristem_P Parameter: Tissue Value: Root Meristem vs. Above Root Meristem
  misc_feature: MA Experiment ID: 108536 Result: Up-regulated in Transcription
  misc_feature: MA Experiment 108536 PARAMETER Experiment Name: Zm_Meristem_P Parameter: Age (day) Value: 8
  misc_feature: MA Experiment 108536 PARAMETER Experiment Name: Zm_Meristem_P Parameter: Organism Value: Zea mays
  misc_feature: MA Experiment 108536 PARAMETER Experiment Name: Zm_Meristem_P Parameter: Plant Line Value: 35A19
  misc_feature: MA Experiment 108536 PARAMETER Experiment Name: Zm_Meristem_P Parameter: Tissue Value: Shoot Meristem vs. Above Shoot Meristem
  misc_feature: MA Experiment ID: 108542 Result: Up-regulated in Transcription
  misc_feature: MA Experiment 108542 PARAMETER Experiment Name: Zm_150mM_NaCl_P Parameter: Age (day) Value: 8
  misc_feature: MA Experiment 108542 PARAMETER Experiment Name: Zm_150mM_NaCl_P Parameter: Organism Value: Zea mays
  misc_feature: MA Experiment 108542 PARAMETER Experiment Name: Zm_150mM_NaCl_P Parameter: Plant Line Value: 35A19
  misc_feature: MA Experiment 108542 PARAMETER Experiment Name: Zm_150mM_NaCl_P Parameter: Timepoint (hr) Value: 6
  misc_feature: MA Experiment 108542 PARAMETER Experiment Name: Zm_150mM_NaCl_P Parameter: Tissue Value: Aerial
  misc_feature: MA Experiment 108542 PARAMETER Experiment Name: Zm_150mM_NaCl_P Parameter: Treatment Value: 150mM NaCl vs. No Treatment
  misc_feature: MA Experiment ID: 108543 Result: Up-regulated in Transcription
  misc_feature: MA Experiment ID: 108546 Result: Up-regulated in Transcription
  misc_feature: MA Experiment 108546 PARAMETER Experiment Name: Zm_Imbibed_Seeds_P Parameter: Age (day) Value: 3 vs. 2
  misc_feature: MA Experiment 108546 PARAMETER Experiment Name: Zm_Imbibed_Seeds_P Parameter: Organism Value: Zea mays
  misc_feature: MA Experiment 108546 PARAMETER Experiment Name: Zm_Imbibed_Seeds_P Parameter: Plant Line Value: 35A19
  misc_feature: MA Experiment 108546 PARAMETER Experiment Name: Zm_Imbibed_Seeds_P Parameter: Tissue Value: Roots vs. Embryo
  misc_feature: MA Experiment ID: 108547 Result: Up-regulated in Transcription
  misc_feature: MA Experiment 108547 PARAMETER Experiment Name: Zm_Imbibed_Seeds_P Parameter: Age (day) Value: 4 vs. 2
  misc_feature: MA Experiment 108547 PARAMETER Experiment Name: Zm_Imbibed_Seeds_P Parameter: Organism Value: Zea mays
  misc_feature: MA Experiment 108547 PARAMETER Experiment Name: Zm_Imbibed_Seeds_P Parameter: Plant Line Value: 35A19
  misc_feature: MA Experiment 108547 PARAMETER Experiment Name: Zm_Imbibed_Seeds_P Parameter: Tissue Value: Aerial vs. Embryo
  misc_feature: MA Experiment ID: 108556 Result: Up-regulated in Transcription
  misc_feature: MA Experiment 108556 PARAMETER Experiment Name: Zm_Drought_P Parameter: Age (day) Value: 9
  misc_feature: MA Experiment 108556 PARAMETER Experiment Name: Zm_Drought_P Parameter: Organism Value: Zea mays
  misc_feature: MA Experiment 108556 PARAMETER Experiment Name: Zm_Drought_P Parameter: Plant Line Value: 35A19
  misc_feature: MA Experiment 108556 PARAMETER Experiment Name: Zm_Drought_P Parameter: Timepoint (hr) Value: 24
  misc_feature: MA Experiment 108556 PARAMETER Experiment Name: Zm_Drought_P Parameter: Tissue Value: Aerial
  misc_feature: MA Experiment 108556 PARAMETER Experiment Name: Zm_Drought_P Parameter: Treatment Value: Drought vs. No Drought
  misc_feature: MA Experiment ID: 20000478 Result: Up-regulated in Transcription
  misc_feature: MA Experiment 20000478 PARAMETER Experiment Name: Zm_5mM_SA_P Parameter: Age (day) Value: 11
  misc_feature: MA Experiment 20000478 PARAMETER Experiment Name: Zm_5mM_SA_P Parameter: Organism Value: Zea mays
  misc_feature: MA Experiment 20000478 PARAMETER Experiment Name: Zm_5mM_SA_P Parameter: Plant Line Value: 35A19
  misc_feature: MA Experiment 20000478 PARAMETER Experiment Name: Zm_5mM_SA_P Parameter: Timepoint (hr) Value: 72
  misc_feature: MA Experiment 20000478 PARAMETER Experiment Name: Zm_5mM_SA_P Parameter: Tissue Value: Aerial
  misc_feature: MA Experiment 20000478 PARAMETER Experiment Name: Zm_5mM_SA_P Parameter: Treatment Value: 5mM SA vs. No Treatment
  misc_feature: MA Experiment ID: 20000492 Result: Down-regulated in Transcription
  misc_feature: MA Experiment 20000492 PARAMETER Experiment Name: Zm_Hybrid_Seed_Dev_P Parameter: DAP Value: 12
  misc_feature: MA Experiment 20000492 PARAMETER Experiment Name: Zm_Hybrid_Seed_Dev_P Parameter: Organism Value: Zea mays
  misc_feature: MA Experiment 20000492 PARAMETER Experiment Name: Zm_Hybrid_Seed_Dev_P Parameter: Plant Line Value: 35A19
  misc_feature: MA Experiment 20000492 PARAMETER Experiment Name: Zm_Hybrid_Seed_Dev_P Parameter: Tissue Value: Fert Kernel vs. Unfert Floret
  misc_feature: MA Experiment ID: 20000535 Result: Down-regulated in Transcription
  misc_feature: MA Experiment 20000535 PARAMETER Experiment Name: Zm_Hybrid_Seed_Dev_P Parameter: DAP Value: 30 vs. 12
  misc_feature: MA Experiment 20000535 PARAMETER Experiment Name: Zm_Hybrid_Seed_Dev_P Parameter: Organism Value: Zea mays
  misc_feature: MA Experiment 20000535 PARAMETER Experiment Name: Zm_Hybrid_Seed_Dev_P Parameter: Plant Line Value: 35A19
  misc_feature: MA Experiment 20000535 PARAMETER Experiment Name: Zm_Hybrid_Seed_Dev_P Parameter: Tissue Value: Embryo vs. Unfert Floret
aacgaactccagaaataatccgccctcgtatcctcacgcccacaaaacacccgaagaaaagaagagactgaacgccgcgagttcacgtgacgatggagaacgccgcctccgccatcgctaagccgtcgctgtccaagaagccctcgccgtcgttccgcctccggaacggcagcctcaacgcactgcgcctgcgccgcgtgttcgacctcttcgaccgcaacggcgacggcgagatcagcctcgacgagatggcctcggcgctcgacgcgctcggcctcggcgccgaccgctccggcctggaggccgcggttggcgggtacatcccggccggcgccgcggggctccgcttcaacgacttcgagtccctccaccgcgcgctcggggacgcgctgttcgggccccatgccggtggctgtgaccgaggatgacgacgacgagggggacatgaaggaggcgttccgggtgttcgatgaggacggcgacggcttcatctcggccgccgagctgcaggccgtgctcaagaagctcggcctgcccgaggctcggaacctggccactgtgcaggagatgatctgcaacgtcgaccgcaactgcgacggccgcgtcgacttcggcgagttcaagaacatgatgcaggggatcaccgtgtggggcgcttagctgccgcgcacctgcgttgtcacaccccctctactgcgtggtgtcatgtatgtatccaggcaccgtaggatgcgcttttctacccggcgcttcttcctcctcttgatggcgcagtggattcttcctgttcttggctttgctatctgactctgcttgtagtcttgagaatctggcggcacacagacatagttttctttc

SEQ ID NO: 3753 - protein, 111 aa, Zea mays subsp. mays
  peptide (1)..(111): Ceres Seq. ID no. 12356125
  misc_feature (15)..(96): Homolog of NCBI NO: 15231685 NR Description: calmodulin-like protein; protein id: At3g59440.1
  misc_feature (9)..(96): Homolog of NCBI NO: 21740787 NR Description: OSJNBb0091E11.1 [Oryza sativa (japonica
  misc_feature (5)..(109): Homolog of NCBI NO: 1168696 NR Description: Calcium-binding allergen Bet v 3 (Bet v III)
  misc_feature (7)..(102): Homolog of NCBI NO: 1168782 NR Description: Calcium-binding protein CAST
  misc_feature (14)..(102): Homolog of NCBI NO: 12003380 NR Description: Avr9/Cf-9 rapidly elicited protein 31 [Nicotiana
  misc_feature (10)..(109): Homolog of NCBI NO: 15241500 NR Description: calmodulin-like protein; protein id: At5g44460.1
  misc_feature (16)..(107): Homolog of NCBI NO: 15233402 NR Description: calcium-binding protein - like; protein id:
  misc_feature (7)..(107): Homolog of NCBI NO: 33146667 NR Description: putative Avr9/Cf-9 rapidly elicited protein 31
  misc_feature (7)..(111): Homolog of NCBI NO: 29467539 NR Description: P0665F09.7 [Oryza sativa (japonica
  misc_feature (1)..(103): Homolog of NCBI NO: 13194672 NR Description: calmodulin-like protein [Pennisetum ciliare]
MENAASAIAKPSLSKKPSPSFRLRNGSLNALRLRRVFDLFDRNGDGEISLDEMASALDALGLGADRSGLEAAVGGYIPAGAAGLRFNDFESLHRALGDALFGPHAGGCDRG

SEQ ID NO: 3754 - protein, 85 aa, Zea mays subsp. mays
  peptide (1)..(85): Ceres Seq. ID no. 12356126
  misc_feature (14)..(42): Pfam Name: EF hand Pfam Description: EF hand
  misc_feature (8)..(78): Homolog of NCBI NO: 15231685 NR Description: calmodulin-like protein; protein id: At3g59440.1
  misc_feature (4)..(79): Homolog of NCBI NO: 21740787 NR Description: OSJNBb0091E11.1 [Oryza sativa (japonica
  misc_feature (11)..(82): Homolog of NCBI NO: 1168696 NR Description: Calcium-binding allergen Bet v 3 (Bet v III)
  misc_feature (1)..(82): Homolog of NCBI NO: 1168782 NR Description: Calcium-binding protein CAST
  misc_feature (3)..(82): Homolog of NCBI NO: 12003380 NR Description: Avr9/Cf-9 rapidly elicited protein 31 [Nicotiana
  misc_feature (8)..(82): Homolog of NCBI NO: 15241500 NR Description: calmodulin-like protein; protein id: At5g44460.1
  misc_feature (1)..(82): Homolog of NCBI NO: 15233402 NR Description: calcium-binding protein - like; protein id:
  misc_feature (11)..(85): Homolog of NCBI NO: 33146667 NR Description: putative Avr9/Cf-9 rapidly elicited protein 31
  misc_feature (10)..(84): Homolog of NCBI NO: 29467539 NR Description: P0665F09.7 [Oryza sativa (japonica
  misc_feature (1)..(85): Homolog of NCBI NO: 13194672 NR Description: calmodulin-like protein [Pennisetum ciliare]
MPVAVTEDDDDEGDMKEAFRVFDEDGDGFISAAELQAVLKKLGLPEARNLATVQEMICNVDRNCDGRVDFGEFKNMMQGITVWGA

SEQ ID NO: 3755 - protein, 71 aa, Zea mays subsp. mays
  peptide (1)..(71): Ceres Seq. ID no. 12356127
  misc_feature (1)..(28): Pfam Name: EF hand Pfam Description: EF hand
  misc_feature (1)..(64): Homolog of NCBI NO: 15231685 NR Description: calmodulin-like protein; protein id: At3g59440.1
  misc_feature (1)..(65): Homolog of NCBI NO: 21740787 NR Description: OSJNBb0091E11.1 [Oryza sativa (japonica
  misc_feature (1)..(68): Homolog of NCBI NO: 1168696 NR Description: Calcium-binding allergen Bet v 3 (Bet v III)
  misc_feature (1)..(68): Homolog of NCBI NO: 1168782 NR Description: Calcium-binding protein CAST
  misc_feature (1)..(68): Homolog of NCBI NO: 12003380 NR Description: Avr9/Cf-9 rapidly elicited protein 31 [Nicotiana
  misc_feature (1)..(68): Homolog of NCBI NO: 15241500 NR Description: calmodulin-like protein; protein id: At5g44460.1
  misc_feature (1)..(68): Homolog of NCBI NO: 15233402 NR Description: calcium-binding protein - like; protein id:
  misc_feature (1)..(71): Homolog of NCBI NO: 33146667 NR Description: putative Avr9/Cf-9 rapidly elicited protein 31
  misc_feature (1)..(70): Homolog of NCBI NO: 29467539 NR Description: P0665F09.7 [Oryza sativa (japonica
  misc_feature (1)..(71): Homolog of NCBI NO: 13194672 NR Description: calmodulin-like protein [Pennisetum ciliare]
MKEAFRVFDEDGDGFISAAELQAVLKKLGLPEARNLATVQEMICNVDRNCDGRVDFGEFKNMMQGITVWGA

SEQ ID NO: 3756 - DNA, 1512 bp, Zea mays subsp. mays
  misc_feature (1)..(1512): Ceres Seq. ID no. 12405701
  misc_feature: MA Experiment ID: 20000492 Result: Down-regulated in Transcription
  misc_feature: MA Experiment 20000492 PARAMETER Experiment Name: Zm_Hybrid_Seed_Dev_P Parameter: DAP Value: 12
  misc_feature: MA Experiment 20000492 PARAMETER Experiment Name: Zm_Hybrid_Seed_Dev_P Parameter: Organism Value: Zea mays
  misc_feature: MA Experiment 20000492 PARAMETER Experiment Name: Zm_Hybrid_Seed_Dev_P Parameter: Plant Line Value: 35A19
  misc_feature: MA Experiment 20000492 PARAMETER Experiment Name: Zm_Hybrid_Seed_Dev_P Parameter: Tissue Value: Fert Kernel vs. Unfert Floret
  misc_feature: MA Experiment ID: 20000535 Result: Down-regulated in Transcription
  misc_feature: MA Experiment 20000535 PARAMETER Experiment Name: Zm_Hybrid_Seed_Dev_P Parameter: DAP Value: 30 vs. 12
  misc_feature: MA Experiment 20000535 PARAMETER Experiment Name: Zm_Hybrid_Seed_Dev_P Parameter: Organism Value: Zea mays
  misc_feature: MA Experiment 20000535 PARAMETER Experiment Name: Zm_Hybrid_Seed_Dev_P Parameter: Plant Line Value: 35A19
  misc_feature: MA Experiment 20000535 PARAMETER Experiment Name: Zm_Hybrid_Seed_Dev_P Parameter: Tissue Value: Embryo vs. Unfert Floret
gaaaatccttcactcgtccctctctcggtctgtccctttggagcgaaggcgaaccgcgtcgcgaacccaggatcccatcgagggcaggcgggcagatcccggcgtccgacggcgatgggcgaggaggacgcgagcgccgggggagatccgcagcggctgaagcggatcgccgctgcggcgtacgactacgagaacgatgcgcggtgggccgggtactggtccaacgtcctcgtgccgcccccacctcgcctcccgccccgacgtcgtcgaccacttcaagcgcaaagttctaccagcgatacatcgatcctggtttggttgttgaaccgatgtcctcccatgacttcaactcagtctagcagaccagcagcgaagtcttcagctacaccatctagtgagaatgtcagagctcgggactcaggctctagcacgagatcaactgggacctcccaacatccaccagcagagaggactgcaaattcattacagctagacggacggacaataaacttttctatcaatgcctgggtactggttgtagctagtctcggaatactcccagttctacccaaccatatctcgagtaaagcataccgtctttcattgctaggaacaatatgctcgtctgcatattctttatatggcacttatgggaaaccaagagcatggaatatgcctgcaattcagtcctggttgcagtctattattgtagctaaggactttgttcacttgatgttctctcttatgatgttcacatctaatgtgcactttaagattgctctacttcctgtgctttgctgggcgcttgatcatgttgctcgattcctaaggcgtaattttacacactcttctttatacaggaagtacttagaggacccttgcctatgggtagagacaaacaacactacactcagcctactttgttcgaatgctgaaatcaccctggggtttctcatgatcatctcgcttttctcgtcgagacgcaatataatccagacatttatgtactttcatcttttgaagttgatgtaccattctcctgtgacatctggttaccaccagagcgtgtgggcaagaataggccgggctgtaaacccgtacatttaccgctatgcgccattcctgaacacacctatttcggcagtccagagatggtggctgaggtaggaaagcatggaccgcagcacagtgaaaatatgcctaaacagctactctgatctcagcgcctcgatcttttagaaggcgtgcttgcacggcgtgttcttttcttgtaaaggttgtattctcagttcatgtcttactgagctactgaaggcataacactagagaatttcttacgatgagcagtagcgcttgagcaaactgtcgatttgatgggatacagttacaggcataaagtgattgcacagaattttcataaggatgcttgctgcagtcaataggatggaacatgcgagtggcactattgattcttgaagtaataaatgatgttcttgtctattttattttgcc

SEQ ID NO: 3757 - protein, 388 aa, Zea mays subsp. mays
  peptide (1)..(388): Ceres Seq. ID no. 12405702
  misc_feature (181)..(346): Pfam Name: Uncharacterised protein family (UPF0121) Pfam Description: Uncharacterised protein family (UPF0121)
  misc_feature (125)..(217): Homolog of NCBI NO: 34911634 NR Description: P0039G05.19 [Oryza sativa (japonica
  misc_feature (47)..(258): Homolog of NCBI NO: 34912430 NR Description: P0681B11.19 [Oryza sativa (japonica
  misc_feature (44)..(388): Homolog of NCBI NO: 18396183 NR Description: expressed protein
ENPSLVPLSVCPFGAKANRVANPGSHRGQAGRSRRPTAMGEEDASAGGDPQRLKRIAAAAYDYENDARWAGYWSNVLVPPPPRLPPRRRRPLQAQSSTSDTSILVWLLNRCPPMTSTQSSRPAAKSSATPSSENVRARDSGSSTRSTGTSQHPPAERTANSLQLDGRTINFSINAWVLVVASLGILPVLPNHISSKAYRLSLLGTICSSAYSLYGTYGKPRAWNMPAIQSWLQSIIVAKDFVHLMFSLMMFTSNVHFKIALLPVLCWALDHVARFLRRNFTHSSLYRKYLEDPCLWVETNNTTLSLLCSNAEITLGFLMIISLFSSRRNIIQTFMYFHLLKLMYHSPVTSGYHQSVWARIGRAVNPYIYRYAPFLNTPISAVQRWWLR

SEQ ID NO: 3758 - protein, 350 aa, Zea mays subsp. mays
  peptide (1)..(350): Ceres Seq. ID no. 12405703
  misc_feature (143)..(308): Pfam Name: Uncharacterised protein family (UPF0121) Pfam Description: Uncharacterised protein family (UPF0121)
  misc_feature (87)..(179): Homolog of NCBI NO: 34911634 NR Description: P0039G05.19 [Oryza sativa (japonica
  misc_feature (9)..(220): Homolog of NCBI NO: 34912430 NR Description: P0681B11.19 [Oryza sativa (japonica
  misc_feature (6)..(350): Homolog of NCBI NO: 18396183 NR Description: expressed protein
MGEEDASAGGDPQRLKRIAAAAYDYENDARWAGYWSNVLVPPPPRLPPRRRRPLQAQSSTSDTSILVWLLNRCPPMTSTQSSRPAAKSSATPSSENVRARDSGSSTRSTGTSQHPPAERTANSLQLDGRTINFSINAWVLVVASLGILPVLPNHISSKAYRLSLLGTICSSAYSLYGTYGKPRAWNMPAIQSWLQSIIVAKDFVHLMFSLMMFTSNVHFKIALLPVLCWALDHVARFLRRNFTHSSLYRKYLEDPCLWVETNNTTLSLLCSNAEITLGFLMIISLFSSRRNIIQTFMYFHLLKLMYHSPVTSGYHQSVWARIGRAVNPYIYRYAPFLNTPISAVQRWWLR

SEQ ID NO: 3759 - protein, 275 aa, Zea mays subsp. mays
  peptide (1)..(275): Ceres Seq. ID no. 12405704
  misc_feature (68)..(233): Pfam Name: Uncharacterised protein family (UPF0121) Pfam Description: Uncharacterised protein family (UPF0121)
  misc_feature (12)..(104): Homolog of NCBI NO: 34911634 NR Description: P0039G05.19 [Oryza sativa (japonica
  misc_feature (1)..(145): Homolog of NCBI NO: 34912430 NR Description: P0681B11.19 [Oryza sativa (japonica
  misc_feature (1)..(275): Homolog of NCBI NO: 18396183 NR Description: expressed protein
MTSTQSSRPAAKSSATPSSENVRARDSGSSTRSTGTSQHPPAERTANSLQLDGRTINFSINAWVLVVASLGILPVLPNHISSKAYRLSLLGTICSSAYSLYGTYGKPRAWNMPAIQSWLQSIIVAKDFVHLMFSLMMFTSNVHFKIALLPVLCWALDHVARFLRRNFTHSSLYRKYLEDPCLWVETNNTTLSLLCSNAEITLGFLMIISLFSSRRNIIQTFMYFHLLKLMYHSPVTSGYHQSVWARIGRAVNPYIYRYAPFLNTPISAVQRWWLR

SEQ ID NO: 3760 - DNA, 1275 bp, Zea mays subsp. mays
  misc_feature (1)..(1275): Ceres Seq. ID no. 12410098
  misc_feature: MA Experiment ID: 108522 Result: Down-regulated in Transcription
  misc_feature: MA Experiment 108522 PARAMETER Experiment Name: Zm_42deg_Heat_P Parameter: Age (day) Value: 8
  misc_feature: MA Experiment 108522 PARAMETER Experiment Name: Zm_42deg_Heat_P Parameter: Organism Value: Zea mays
  misc_feature: MA Experiment 108522 PARAMETER Experiment Name: Zm_42deg_Heat_P Parameter: Plant Line Value: 35A19
  misc_feature: MA Experiment 108522 PARAMETER Experiment Name: Zm_42deg_Heat_P Parameter: Temperature (deg C) Value: 42 vs. 22
  misc_feature: MA Experiment 108522 PARAMETER Experiment Name: Zm_42deg_Heat_P Parameter: Timepoint (hr) Value: 1
  misc_feature: MA Experiment 108522 PARAMETER Experiment Name: Zm_42deg_Heat_P Parameter: Tissue Value: Aerial
  misc_feature: MA Experiment ID: 108523 Result: Down-regulated in Transcription
  misc_feature: MA Experiment 108523 PARAMETER Experiment Name: Zm_42deg_Heat_P Parameter: Age (day) Value: 8
  misc_feature: MA Experiment 108523 PARAMETER Experiment Name: Zm_42deg_Heat_P Parameter: Organism Value: Zea mays
  misc_feature: MA Experiment 108523 PARAMETER Experiment Name: Zm_42deg_Heat_P Parameter: Plant Line Value: 35A19
  misc_feature: MA Experiment 108523 PARAMETER Experiment Name: Zm_42deg_Heat_P Parameter: Temperature (deg C) Value: 42 vs. 22
  misc_feature: MA Experiment 108523 PARAMETER Experiment Name: Zm_42deg_Heat_P Parameter: Timepoint (hr) Value: 6
  misc_feature: MA Experiment 108523 PARAMETER Experiment Name: Zm_42deg_Heat_P Parameter: Tissue Value: Aerial
  misc_feature: MA Experiment ID: 108527 Result: Down-regulated in Transcription
  misc_feature: MA Experiment 108527 PARAMETER Experiment Name: Zm_5mM_NO_P Parameter: Age (day) Value: 8
  misc_feature: MA Experiment 108527 PARAMETER Experiment Name: Zm_5mM_NO_P Parameter: Organism Value: Zea mays
  misc_feature: MA Experiment 108527 PARAMETER Experiment Name: Zm_5mM_NO_P Parameter: Plant Line Value: 35A19
  misc_feature: MA Experiment 108527 PARAMETER Experiment Name: Zm_5mM_NO_P Parameter: Timepoint (hr) Value: 6
  misc_feature: MA Experiment 108527 PARAMETER Experiment Name: Zm_5mM_NO_P Parameter: Tissue Value: Aerial
  misc_feature: MA Experiment 108527 PARAMETER Experiment Name: Zm_5mM_NO_P Parameter: Treatment Value: 5mM NO vs. No Treatment
  misc_feature: MA Experiment ID: 108528 Result: Up-regulated in Transcription
  misc_feature: MA Experiment 108528 PARAMETER Experiment Name: Zm_Imbibed_Seeds_P Parameter: Age (day) Value: 5 vs. 2
  misc_feature: MA Experiment 108528 PARAMETER Experiment Name: Zm_Imbibed_Seeds_P Parameter: Organism Value: Zea mays
  misc_feature: MA Experiment 108528 PARAMETER Experiment Name: Zm_Imbibed_Seeds_P Parameter: Plant Line Value: 35A19
  misc_feature: MA Experiment 108528 PARAMETER Experiment Name: Zm_Imbibed_Seeds_P Parameter: Tissue Value: Aerial vs. Embryo
  misc_feature: MA Experiment ID: 108529 Result: Up-regulated in Transcription
  misc_feature: MA Experiment 108529 PARAMETER Experiment Name: Zm_Imbibed_Seeds_P Parameter: Age (day) Value: 5 vs. 2
  misc_feature: MA Experiment 108529 PARAMETER Experiment Name: Zm_Imbibed_Seeds_P Parameter: Organism Value: Zea mays
  misc_feature: MA Experiment 108529 PARAMETER Experiment Name: Zm_Imbibed_Seeds_P Parameter: Plant Line Value: 35A19
  misc_feature: MA Experiment 108529 PARAMETER Experiment Name: Zm_Imbibed_Seeds_P Parameter: Tissue Value: Roots vs. Embryo
  misc_feature: MA Experiment ID: 108530 Result: Up-regulated in Transcription
  misc_feature: MA Experiment 108530 PARAMETER Experiment Name: Zm_Imbibed_Seeds_P Parameter: Age (day) Value: 6 vs. 2
  misc_feature: MA Experiment 108530 PARAMETER Experiment Name: Zm_Imbibed_Seeds_P Parameter: Organism Value: Zea mays
  misc_feature: MA Experiment 108530 PARAMETER Experiment Name: Zm_Imbibed_Seeds_P Parameter: Plant Line Value: 35A19
  misc_feature: MA Experiment 108530 PARAMETER Experiment Name: Zm_Imbibed_Seeds_P Parameter: Tissue Value: Aerial vs. Embryo
  misc_feature: MA Experiment ID: 108535 Result: Down-regulated in Transcription
  misc_feature: MA Experiment 108535 PARAMETER Experiment Name: Zm_Meristem_P Parameter: Age (day) Value: 8
  misc_feature: MA Experiment 108535 PARAMETER Experiment Name: Zm_Meristem_P Parameter: Organism Value: Zea mays
  misc_feature: MA Experiment 108535 PARAMETER Experiment Name: Zm_Meristem_P Parameter: Plant Line Value: 35A19
  misc_feature: MA Experiment 108535 PARAMETER Experiment Name: Zm_Meristem_P Parameter: Tissue Value: Root Meristem vs. Above Root Meristem
  misc_feature: MA Experiment ID: 108545 Result: Up-regulated in Transcription
  misc_feature: MA Experiment 108545 PARAMETER Experiment Name: Zm_Imbibed_Seeds_P Parameter: Age (day) Value: 3 vs. 2
  misc_feature: MA Experiment 108545 PARAMETER Experiment Name: Zm_Imbibed_Seeds_P Parameter: Organism Value: Zea mays
  misc_feature: MA Experiment 108545 PARAMETER Experiment Name: Zm_Imbibed_Seeds_P Parameter: Plant Line Value: 35A19
  misc_feature: MA Experiment 108545 PARAMETER Experiment Name: Zm_Imbibed_Seeds_P Parameter: Tissue Value: Aerial vs. Embryo
  misc_feature: MA Experiment ID: 108546 Result: Up-regulated in Transcription
  misc_feature: MA Experiment 108546 PARAMETER Experiment Name: Zm_Imbibed_Seeds_P Parameter: Age (day) Value: 3 vs. 2
  misc_feature: MA Experiment 108546 PARAMETER Experiment Name: Zm_Imbibed_Seeds_P Parameter: Organism Value: Zea mays
  misc_feature: MA Experiment 108546 PARAMETER Experiment Name: Zm_Imbibed_Seeds_P Parameter: Plant Line Value: 35A19
  misc_feature: MA Experiment 108546 PARAMETER Experiment Name: Zm_Imbibed_Seeds_P Parameter: Tissue Value: Roots vs. Embryo
  misc_feature: MA Experiment ID: 108547 Result: Up-regulated in Transcription
  misc_feature: MA Experiment 108547 PARAMETER Experiment Name: Zm_Imbibed_Seeds_P Parameter: Age (day) Value: 4 vs. 2
  misc_feature: MA Experiment 108547 PARAMETER Experiment Name: Zm_Imbibed_Seeds_P Parameter: Organism Value: Zea mays
  misc_feature: MA Experiment 108547 PARAMETER Experiment Name: Zm_Imbibed_Seeds_P Parameter: Plant Line Value: 35A19
  misc_feature: MA Experiment 108547 PARAMETER Experiment Name: Zm_Imbibed_Seeds_P Parameter: Tissue Value: Aerial vs. Embryo
  misc_feature: MA Experiment ID: 108556 Result: Down-regulated in Transcription
  misc_feature: MA Experiment 108556 PARAMETER Experiment Name: Zm_Drought_P Parameter: Age (day) Value: 9
  misc_feature: MA Experiment 108556 PARAMETER Experiment Name: Zm_Drought_P Parameter: Organism Value: Zea mays
  misc_feature: MA Experiment 108556 PARAMETER Experiment Name: Zm_Drought_P Parameter: Plant Line Value: 35A19
  misc_feature: MA Experiment 108556 PARAMETER Experiment Name: Zm_Drought_P Parameter: Timepoint (hr) Value: 24
  misc_feature: MA Experiment 108556 PARAMETER Experiment Name: Zm_Drought_P Parameter: Tissue Value: Aerial
  misc_feature: MA Experiment 108556 PARAMETER Experiment Name: Zm_Drought_P Parameter: Treatment Value: Drought vs. No Drought
  misc_feature: MA Experiment ID: 108597 Result: Down-regulated in Transcription
  misc_feature: MA Experiment 108597 PARAMETER Experiment Name: Zm_100uM_ABA_P Parameter: Age (day) Value: 9
  misc_feature: MA Experiment 108597 PARAMETER Experiment Name: Zm_100uM_ABA_P Parameter: Organism Value: Zea mays
  misc_feature: MA Experiment 108597 PARAMETER Experiment Name: Zm_100uM_ABA_P Parameter: Plant Line Value: 35A19
  misc_feature: MA Experiment 108597 PARAMETER Experiment Name: Zm_100uM_ABA_P Parameter: Timepoint (hr) Value: 24
  misc_feature: MA Experiment 108597 PARAMETER Experiment Name: Zm_100uM_ABA_P Parameter: Tissue Value: Aerial
  misc_feature: MA Experiment 108597 PARAMETER Experiment Name: Zm_100uM_ABA_P Parameter: Treatment Value: 100uM ABA vs. No Treatment
  misc_feature: MA Experiment ID: 108687 Result: Down-regulated in Transcription
  misc_feature: MA Experiment 108687 PARAMETER Experiment Name: Zm_Embryos-Flowers__P Parameter: Tissue Value: Embryo vs. Aerial+
  misc_feature: MA Experiment ID: 20000478 Result: Down-regulated in Transcription
  misc_feature: MA Experiment 20000478 PARAMETER Experiment Name: Zm_5mM_SA_P Parameter: Age (day) Value: 11
  misc_feature: MA Experiment 20000478 PARAMETER Experiment Name: Zm_5mM_SA_P Parameter: Organism Value: Zea mays
  misc_feature: MA Experiment 20000478 PARAMETER Experiment Name: Zm_5mM_SA_P Parameter: Plant Line Value: 35A19
  misc_feature: MA Experiment 20000478 PARAMETER Experiment Name: Zm_5mM_SA_P Parameter: Timepoint (hr) Value: 72
  misc_feature: MA Experiment 20000478 PARAMETER Experiment Name: Zm_5mM_SA_P Parameter: Tissue Value: Aerial
  misc_feature: MA Experiment 20000478 PARAMETER Experiment Name: Zm_5mM_SA_P Parameter: Treatment Value: 5mM SA vs. No Treatment
  misc_feature: MA Experiment ID: 20000479 Result: Down-regulated in Transcription
  misc_feature: MA Experiment 20000479 PARAMETER Experiment Name: Zm_Drought_P Parameter: Age (day) Value: 10
  misc_feature: MA Experiment 20000479 PARAMETER Experiment Name: Zm_Drought_P Parameter: Organism Value: Zea mays
  misc_feature: MA Experiment 20000479 PARAMETER Experiment Name: Zm_Drought_P Parameter: Plant Line Value: 35A19
  misc_feature: MA Experiment 20000479 PARAMETER Experiment Name: Zm_Drought_P Parameter: Timepoint (hr) Value: 48
  misc_feature: MA Experiment 20000479 PARAMETER Experiment Name: Zm_Drought_P Parameter: Tissue Value: Aerial
  misc_feature: MA Experiment 20000479 PARAMETER Experiment Name: Zm_Drought_P Parameter: Treatment Value: Drought vs. No Drought
  misc_feature: MA Experiment ID: 20000488 Result: Down-regulated in Transcription
  misc_feature: MA Experiment 20000488 PARAMETER Experiment Name: Zm_50mM_NH4NO3_L_to_H_P Parameter: Organism Value: Zea mays
  misc_feature: MA Experiment 20000488 PARAMETER Experiment Name: Zm_50mM_NH4NO3_L_to_H_P Parameter: Timepoint (hr) Value: 8
  misc_feature: MA Experiment 20000488 PARAMETER Experiment Name: Zm_50mM_NH4NO3_L_to_H_P Parameter: Tissue Value: Leaves
  misc_feature: MA Experiment 20000488 PARAMETER Experiment Name: Zm_50mM_NH4NO3_L_to_H_P Parameter: Treatment Value: 50mM NH4NO3 vs. 100mM Mannitol
  misc_feature: MA Experiment ID: 20000492 Result: Down-regulated in Transcription
  misc_feature: MA Experiment 20000492 PARAMETER Experiment Name: Zm_Hybrid_Seed_Dev_P Parameter: DAP Value: 12
  misc_feature: MA Experiment 20000492 PARAMETER Experiment Name: Zm_Hybrid_Seed_Dev_P Parameter: Organism Value: Zea mays
  misc_feature: MA Experiment 20000492 PARAMETER Experiment Name: Zm_Hybrid_Seed_Dev_P Parameter: Plant Line Value: 35A19
  misc_feature: MA Experiment 20000492 PARAMETER Experiment Name: Zm_Hybrid_Seed_Dev_P Parameter: Tissue Value: Fert Kernel vs. Unfert Floret
  misc_feature: MA Experiment ID: 20000535 Result: Down-regulated in Transcription
  misc_feature: MA Experiment 20000535 PARAMETER Experiment Name: Zm_Hybrid_Seed_Dev_P Parameter: DAP Value: 30 vs. 12
  misc_feature: MA Experiment 20000535 PARAMETER Experiment Name: Zm_Hybrid_Seed_Dev_P Parameter: Organism Value: Zea mays
  misc_feature: MA Experiment 20000535 PARAMETER Experiment Name: Zm_Hybrid_Seed_Dev_P Parameter: Plant Line Value: 35A19
  misc_feature: MA Experiment 20000535 PARAMETER Experiment Name: Zm_Hybrid_Seed_Dev_P Parameter: Tissue Value: Embryo vs. Unfert Floret
  misc_feature: MA Experiment ID: 20000626 Result: Down-regulated in Transcription
  misc_feature: MA Experiment 20000626 PARAMETER Experiment Name: Zm_Herbicide-Treatments_P Parameter: Timepoint (hr) Value: 12
  misc_feature: MA Experiment 20000626 PARAMETER Experiment Name: Zm_Herbicide-Treatments_P Parameter: Tissue Value: Aerial
  misc_feature: MA Experiment 20000626 PARAMETER Experiment Name: Zm_Herbicide-Treatments_P Parameter: Treatment Value: Roundup vs. No Treatment
  misc_feature: MA Experiment ID: 20001610 Result: Down-regulated in Transcription
  misc_feature: MA Experiment 20001610 PARAMETER Experiment Name: Zm_50ppm_KNO3_L-to-H_P Parameter: Age (day) Value: 19
  misc_feature: MA Experiment 20001610 PARAMETER Experiment Name: Zm_50ppm_KNO3_L-to-H_P Parameter: Organism Value: Zea mays
  misc_feature: MA Experiment 20001610 PARAMETER Experiment Name: Zm_50ppm_KNO3_L-to-H_P Parameter: Plant Line Value: 35A19
  misc_feature: MA Experiment 20001610 PARAMETER Experiment Name: Zm_50ppm_KNO3_L-to-H_P Parameter: Timepoint (hr) Value: 2
  misc_feature: MA Experiment 20001610 PARAMETER Experiment Name: Zm_50ppm_KNO3_L-to-H_P Parameter: Tissue Value: Roots
  misc_feature: MA Experiment 20001610 PARAMETER Experiment Name: Zm_50ppm_KNO3_L-to-H_P Parameter: Treatment Value: 50ppm KNO3 vs. 50ppm KCl
gagtcacatgctagcgtgcgtgtgcgtgtgcaacggctataccacctgcgcgacccaccgcgagcgcccgcagctaagctagctctcgctcgcgcgctctgggagaggagagatcaatggcgtcccgtggcagcatgacctgtagtcttcagctcgccgtcctcgtttccgccgccatcgcgctcgggttcggcgtccgggccggcgaggcgcagctgtccagcgagtactacggccagacgtgccccgtcgtgcaccgggtcgcgcggcgggtgctgaagaaggcgcacgaggccgacgtccgcatctacgccagcctcacccgcctccatttccacgactgcttcgtgcaaggctgcgacggctccatcctgctggacaacagctcgagcatcgtgtcggagaagttcgccacgcccaacaacaactcggcgcgcgggtaccccgtggtcgacgccgtcaaggcggcgctggaggagggcttgcccaggcgttgtctcctgcgctgacatactggcccatcgcccgccaagatctcggtcgaactgtccggcgggccaaggtggcgcgtgcctctcggccggcgcgacggcaccacggccaacatcaccgccgccaacaacctcccgagccccttcgacaacctcactacgctccagcagaagttcggcgccgtcggcctcgacgacaccgacctcgtcgcgctctcaggggcgcacacgttcgggcgcgtgcagtgccagttcgtgacggcgcggctgtacaacttcagcgggacgaaccggccggacccgacgctggacagggggtaccgggcgttcctctccctgcggtgcccgagggccggcaacgcgtcggcgctcaacgacctcgacccgaccacgccggacaccttcgacaacaattactacaccaacatcgaggcgcgccgtgggacgctgcagtccgaccaggagctgctgtcgacgcccggcgcgcccacggcgccgatcgtcggacggttcgccgccagccagaaggagttcttcaggagcttcgccaggtccatggtcaacatggggaacatccaggtgctgacggggagtcagggtgagatcaggaagaactgtaggatggtcaacggaagctagacccgtcgacggcacaagttactggtgaactgaaagcagttctgctgtatgtacgatgcctcaaacatgttgatgggataatggtgcgccgatcgatttatttgtcaaggagatccaataaattggttttttgcattttttttcc

SEQ ID NO: 3761 - protein, 130 aa, Zea mays subsp. mays
  peptide (1)..(130): Ceres Seq. ID no. 12410099
  misc_feature (51)..(130): Pfam Name: Peroxidase Pfam Description: Peroxidase
  misc_feature (32)..(130): Homolog of NCBI NO: 1279654 NR Description: peroxidase [Populus balsamifera subsp.
  misc_feature (14)..(130): Homolog of NCBI NO: 5002348 NR Description: peroxidase 5 precursor [Phaseolus vulgaris]
  misc_feature (15)..(130): Homolog of NCBI NO: 2129513 NR Description: peroxidase (EC 1.11.1.7) A3a precursor - Japanese
  misc_feature (16)..(130): Homolog of NCBI NO: 8546851 NR Description: peroxidase [Ipomoea batatas]
  misc_feature (1)..(130): Homolog of NCBI NO: 37530466 NR Description: putative peroxidase [Oryza sativa (japonica
MASRGSMTCSLQLAVLVSAAIALGFGVRAGEAQLSSEYYGQTCPVVHRVARRVLKKAHEADVRIYASLTRLHFHDCFVQGCDGSILLDNSSSIVSEKFATPNNNSARGYPVVDAVKAALEEGLPRRCLLR

SEQ ID NO: 3762 - protein, 124 aa, Zea mays subsp. mays
  peptide (1)..(124): Ceres Seq. ID no. 12410100
  misc_feature (45)..(124): Pfam Name: Peroxidase Pfam Description: Peroxidase
  misc_feature (26)..(124): Homolog of NCBI NO: 1279654 NR Description: peroxidase [Populus balsamifera subsp.
  misc_feature (8)..(124): Homolog of NCBI NO: 5002348 NR Description: peroxidase 5 precursor [Phaseolus vulgaris]
  misc_feature (9)..(124): Homolog of NCBI NO: 2129513 NR Description: peroxidase (EC 1.11.1.7) A3a precursor - Japanese
  misc_feature (10)..(124): Homolog of NCBI NO: 8546851 NR Description: peroxidase [Ipomoea batatas]
  misc_feature (1)..(124): Homolog of NCBI NO: 37530466 NR Description: putative peroxidase [Oryza sativa (japonica
MTCSLQLAVLVSAAIALGFGVRAGEAQLSSEYYGQTCPVVHRVARRVLKKAHEADVRIYASLTRLHFHDCFVQGCDGSILLDNSSSIVSEKFATPNNNSARGYPVVDAVKAALEEGLPRRCLLR

SEQ ID NO: 3763 - DNA, 1797 bp, Zea mays subsp. mays
  misc_feature (1)..(1797): Ceres Seq. ID no. 12423918
  misc_feature: MA Experiment ID: 108543 Result: Up-regulated in Transcription
  misc_feature: MA Experiment ID: 108556 Result: Up-regulated in Transcription
  misc_feature: MA Experiment 108556 PARAMETER Experiment Name: Zm_Drought_P Parameter: Age (day) Value: 9
  misc_feature: MA Experiment 108556 PARAMETER Experiment Name: Zm_Drought_P Parameter: Organism Value: Zea mays
  misc_feature: MA Experiment 108556 PARAMETER Experiment Name: Zm_Drought_P Parameter: Plant Line Value: 35A19
  misc_feature: MA Experiment 108556 PARAMETER Experiment Name: Zm_Drought_P Parameter: Timepoint (hr) Value: 24
  misc_feature: MA Experiment 108556 PARAMETER Experiment Name: Zm_Drought_P Parameter: Tissue Value: Aerial
  misc_feature: MA Experiment 108556 PARAMETER Experiment Name: Zm_Drought_P Parameter: Treatment Value: Drought vs. No Drought
  misc_feature: MA Experiment ID: 108559 Result: Up-regulated in Transcription
  misc_feature: MA Experiment 108559 PARAMETER Experiment Name: Zm_5mM_NO_P Parameter: Age (day) Value: 8
  misc_feature: MA Experiment 108559 PARAMETER Experiment Name: Zm_5mM_NO_P Parameter: Organism Value: Zea mays
  misc_feature: MA Experiment 108559 PARAMETER Experiment Name: Zm_5mM_NO_P Parameter: Plant Line Value: 35A19
  misc_feature: MA Experiment 108559 PARAMETER Experiment Name: Zm_5mM_NO_P Parameter: Timepoint (hr) Value: 12
  misc_feature: MA Experiment 108559 PARAMETER Experiment Name: Zm_5mM_NO_P Parameter: Tissue Value: Aerial
  misc_feature: MA Experiment 108559 PARAMETER Experiment Name: Zm_5mM_NO_P Parameter: Treatment Value: 5mM NO vs. No Treatment
  misc_feature: MA Experiment ID: 20000478 Result: Up-regulated in Transcription
  misc_feature: MA Experiment 20000478 PARAMETER Experiment Name: Zm_5mM_SA_P Parameter: Age (day) Value: 11
  misc_feature: MA Experiment 20000478 PARAMETER Experiment Name: Zm_5mM_SA_P Parameter: Organism Value: Zea mays
  misc_feature: MA Experiment 20000478 PARAMETER Experiment Name: Zm_5mM_SA_P Parameter: Plant Line Value: 35A19
  misc_feature: MA Experiment 20000478 PARAMETER Experiment Name: Zm_5mM_SA_P Parameter: Timepoint (hr) Value: 72
  misc_feature: MA Experiment 20000478 PARAMETER Experiment Name: Zm_5mM_SA_P Parameter: Tissue Value: Aerial
  misc_feature: MA Experiment 20000478 PARAMETER Experiment Name: Zm_5mM_SA_P Parameter: Treatment Value: 5mM SA vs. No Treatment
  misc_feature: MA Experiment ID: 20000479 Result: Up-regulated in Transcription
  misc_feature: MA Experiment 20000479 PARAMETER Experiment Name: Zm_Drought_P Parameter: Age (day) Value: 10
  misc_feature: MA Experiment 20000479 PARAMETER Experiment Name: Zm_Drought_P Parameter: Organism Value: Zea mays
  misc_feature: MA Experiment 20000479 PARAMETER Experiment Name: Zm_Drought_P Parameter: Plant Line Value: 35A19
  misc_feature: MA Experiment 20000479 PARAMETER Experiment Name: Zm_Drought_P Parameter: Timepoint (hr) Value: 48
  misc_feature: MA Experiment 20000479 PARAMETER Experiment Name: Zm_Drought_P Parameter: Tissue Value: Aerial
  misc_feature: MA Experiment 20000479 PARAMETER Experiment Name: Zm_Drought_P Parameter: Treatment Value: Drought vs. No Drought
  misc_feature: MA Experiment ID: 20000480 Result: Up-regulated in Transcription
  misc_feature: MA Experiment 20000480 PARAMETER Experiment Name: Zm_Drought_P Parameter: Age (day) Value: 11
  misc_feature: MA Experiment 20000480 PARAMETER Experiment Name: Zm_Drought_P Parameter: Organism Value: Zea mays
  misc_feature: MA Experiment 20000480 PARAMETER Experiment Name: Zm_Drought_P Parameter: Plant Line Value: 35A19
  misc_feature: MA Experiment 20000480 PARAMETER Experiment Name: Zm_Drought_P Parameter: Timepoint (hr) Value: 72
  misc_feature: MA Experiment 20000480 PARAMETER Experiment Name: Zm_Drought_P Parameter: Tissue Value: Aerial
  misc_feature: MA Experiment 20000480 PARAMETER Experiment Name: Zm_Drought_P Parameter: Treatment Value: Drought vs. No Drought
  misc_feature: MA Experiment ID: 20000535 Result: Down-regulated in Transcription
  misc_feature: MA Experiment 20000535 PARAMETER Experiment Name: Zm_Hybrid_Seed_Dev_P Parameter: DAP Value: 30 vs. 12
  misc_feature: MA Experiment 20000535 PARAMETER Experiment Name: Zm_Hybrid_Seed_Dev_P Parameter: Organism Value: Zea mays
  misc_feature: MA Experiment 20000535 PARAMETER Experiment Name: Zm_Hybrid_Seed_Dev_P Parameter: Plant Line Value: 35A19
  misc_feature: MA Experiment 20000535 PARAMETER Experiment Name: Zm_Hybrid_Seed_Dev_P Parameter: Tissue Value: Embryo vs. Unfert Floret
aaagctccagcacatccaatcgcacgacactccctgctgctctctgctgagaggtgctagatctcggactcgccgttgatttgattccaagttaaagacagcgagcaatccatagattgaccggtggagagcgagagaaagcgagagagagaagggaattggttggtaggtggagaccggagggagagctcagctcaggagattgatgcttgcatggtgatgcgggcgcgggcgatggggctgagcagcatccggcgggaggtgctggtctccgccgtcttcacggcgctcctcgtggcctccatcctcctcctcccctcgctcctcctaacgggcgctgggcccatcaggtggccgtccctgtccccgtcgaaggatgccggcatcggcgaggaggaggagcagcaggcgcggtaccccgtgacgttcgcgtacctgatctcggcgtcgacgggggacgcgtcccgcgccgcgcggctgctggcggcgctgtaccacccgggcaacagctacctgctgcacctggaccgggaggcccccgcggaggagcaccggcgtctggcggagctggtgtccgggcgcggcgtgtacgcgcgcgcgggcaacgtgtggatcgtgggcaggcccaacctggtaacctaccgtggccccaccatgctgaccaccacgctgcacgccgtcgccgtgctgctccgcctccgccgccgctgggactggttcatcaacctcagcgcctccgactacccgctcgtcacccaggacggtaccctgtgatgcttgcttgcttgcttgctgttggtcgtccactggatggacagactgtttctgaattttgggggttgcagatttgatggaggcgttcgccgggctgcccagggacctcaacttcatccagcacacgagccacctgggctggaagataaagaagcgggcgctgccggtgatcctggacacggcgctgtacgaggacgggagggcggagctgatccgcccggtgaacatctccaccaacctcaggaggctgcccacggcattcaagctcttcacagggtcggcgtggacgatgctgtcgcgggcgttcgcggagtacgtgacgatggggtgggacgacaacctgccgcggacgctgctgctgtaccacgccaacatcgtctcctcgcccgagttctacttccagacggtggcctgcaactcgcgccggttccgcaacgccacggtcaaccacgacctgcacttcatccgctgggacaccccgcccaagcagcacccgctctacctcaccgccagggactaccgccggatgctgctcagcggggccgccttcgcgcgcaagttcagggacggcgaccccgtgctgggaccgcatcgacagggacatcctccgccgccgggaccccgccgcccancnttctacggcggctggtgctccgaggccggcgaccaaaacggcggcgccgcgctctgctccaacccgcaggagcccgggaggcgcggggccgtcaagcccggcgccgggtccaggcggctcaaggccatgctcaggaagacgctgtcgccgaggaatttcaggaggcagcagtgtaggtaggggaactgttctgttatgttctgatcaaacaaacaggtcgttgactcaattttgtatgtatagaaaaggcagatctgaaacgcatcaaagcggcccaaagccaattttgttcagttgattcgcacaagtctgaattgaattgtagtagggagatactcctggtggttgatcatctcatacacggaataataatggaaggggcattatgt

SEQ ID NO: 3764 - protein, 257 aa, Zea mays subsp. mays
  peptide (1)..(257): Ceres Seq. ID no. 12423919
  misc_feature (199)..(199): Xaa is any aa, unknown or other
  misc_feature (200)..(200): Xaa is any aa, unknown or other
MDRLFLNFGGCRFDGGVRRAAQGPQLHPAHEPPGLEDKEAGAAGDPGHGAVRGREGGADPPGEHLHQPQEAAHGIQALHRVGVDDAVAGVRGVRDDGVGRQPAADAAAVPRQHRLLARVLLPDGGLQLAPVPQRHGQPRPALHPLGHPAQAAPALPHRQGLPPDAAQRGRLRAQVQGRRPRAGTASTGTSSAAGTPPPXXLRRLVLRGRRPKRRRRALLQPAGAREARGRQARRRVQAAQGHAQEDAVAEEFQEAAV

SEQ ID NO: 3765 - protein, 245 aa, Zea mays subsp. mays
  peptide (1)..(245): Ceres Seq. ID no. 12423920
  misc_feature (1)..(114): Pfam Name: Core-2/I-Branching enzyme Pfam Description: Core-2/I-Branching enzyme
  misc_feature (1)..(245): Homolog of NCBI NO: 34903664 NR Description: B1015E06.17 [Oryza sativa (japonica
  misc_feature (1)..(244): Homolog of NCBI NO: 15219202 NR Description: N-acetylglucosaminyltransferase family
  misc_feature (1)..(245): Homolog of NCBI NO: 15242199 NR Description: N-acetylglucosaminyltransferase family
  misc_feature (1)..(245): Homolog of NCBI NO: 15242532 NR Description: N-acetylglucosaminyltransferase family
  misc_feature (212)..(245): Homolog of NCBI NO: 15228609 NR Description: N-acetylglucosaminyltransferase family
  misc_feature (1)..(169): Homolog of NCBI NO: 15228609 NR Description: N-acetylglucosaminyltransferase family
  misc_feature (212)..(245): Homolog of NCBI NO: 13605509 NR Description: AT3g03690/T12J13_3 [Arabidopsis thaliana]
  misc_feature (1)..(169): Homolog of NCBI NO: 13605509 NR Description: AT3g03690/T12J13_3 [Arabidopsis thaliana]
  misc_feature (1)..(73): Homolog of NCBI NO: 37534694 NR Description: putative lycosylation enzyme-like protein
  misc_feature (67)..(245): Homolog of NCBI NO: 37534694 NR Description: putative lycosylation enzyme-like protein
  misc_feature (186)..(186): Xaa is any aa, unknown or other
MEAFAGLPRDLNFIQHTSHLGWKIKKRALPVILDTALYEDGRAELIRPVNISTNLRRLPTAFKLFTGSAWTMLSRAFAEYVTMGWDDNLPRTLLLYHANIVSSPEFYFQTVACNSRRFRNATVNHDLHFIRWDTPPKQHPLYLTARDYRRMLLSGAAFARKFRDGDPVLGPHRQGHPPPPGPRRPXFYGGWCSEAGDQNGGAALCSNPQEPGRRGAVKPGAGSRRLKAMLRKTLSPRNFRRQQCR

SEQ ID NO: 3766 - protein, 186 aa, Zea mays subsp. mays
  peptide (1)..(186): Ceres Seq. ID no. 12423921
  misc_feature (72)..(183): Pfam Name: Core-2/I-Branching enzyme Pfam Description: Core-2/I-Branching enzyme
  misc_feature (18)..(186): Homolog of NCBI NO: 18400725 NR Description: N-acetylglucosaminyltransferase family
  misc_feature (18)..(186): Homolog of NCBI NO: 15146308 NR Description: AT3g15350/K7L4_15 [Arabidopsis thaliana]
  misc_feature (18)..(186): Homolog of NCBI NO: 34903664 NR Description: B1015E06.17 [Oryza sativa (japonica
  misc_feature (13)..(183): Homolog of NCBI NO: 15219202 NR Description: N-acetylglucosaminyltransferase family
  misc_feature (69)..(186): Homolog of NCBI NO: 15242199 NR Description: N-acetylglucosaminyltransferase family
  misc_feature (8)..(183): Homolog of NCBI NO: 30687610 NR Description: N-acetylglucosaminyltransferase family
  misc_feature (10)..(186): Homolog of NCBI NO: 15242532 NR Description: N-acetylglucosaminyltransferase family
  misc_feature (12)..(183): Homolog of NCBI NO: 15228609 NR Description: N-acetylglucosaminyltransferase family
  misc_feature (12)..(183): Homolog of NCBI NO: 13605509 NR Description: AT3g03690/T12J13_3 [Arabidopsis thaliana]
  misc_feature (14)..(183): Homolog of NCBI NO: 37534694 NR Description: putative lycosylation enzyme-like protein
MVMRARAMGLSSIRREVLVSAVFTALLVASILLLPSLLLTGAGPIRWPSLSPSKDAGIGEEEEQQARYPVTFAYLISASTGDASRAARLLAALYHPGNSYLLHLDREAPAEEHRRLAELVSGRGVYARAGNVWIVGRPNLVTYRGPTMLTTTLHAVAVLLRLRRRWDWFINLSASDYPLVTQDGTL

SEQ ID NO: 3767 - DNA, 1191 bp, Zea mays subsp. mays
  misc_feature (1)..(1191): Ceres Seq. ID no. 12410095
  misc_feature: MA Experiment ID: 108515 Result: Up-regulated in Transcription
  misc_feature: MA Experiment 108515 PARAMETER Experiment Name: Zm_2mM_SA_P Parameter: Age (day) Value: 8
  misc_feature: MA Experiment 108515 PARAMETER Experiment Name: Zm_2mM_SA_P Parameter: Organism Value: Zea mays
  misc_feature: MA Experiment 108515 PARAMETER Experiment Name: Zm_2mM_SA_P Parameter: Plant Line Value: 35A19
  misc_feature: MA Experiment 108515 PARAMETER Experiment Name: Zm_2mM_SA_P Parameter: Timepoint (hr) Value: 12
  misc_feature: MA Experiment 108515 PARAMETER Experiment Name: Zm_2mM_SA_P Parameter: Tissue Value: Aerial
  misc_feature: MA Experiment 108515 PARAMETER Experiment Name: Zm_2mM_SA_P Parameter: Treatment Value: 2mM SA vs. No Treatment
  misc_feature: MA Experiment ID: 108522 Result: Up-regulated in Transcription
  misc_feature: MA Experiment 108522 PARAMETER Experiment Name: Zm_42deg_Heat_P Parameter: Age (day) Value: 8
  misc_feature: MA Experiment 108522 PARAMETER Experiment Name: Zm_42deg_Heat_P Parameter: Organism Value: Zea mays
  misc_feature: MA Experiment 108522 PARAMETER Experiment Name: Zm_42deg_Heat_P Parameter: Plant Line Value: 35A19
  misc_feature: MA Experiment 108522 PARAMETER Experiment Name: Zm_42deg_Heat_P Parameter: Temperature (deg C) Value: 42 vs. 22
  misc_feature: MA Experiment 108522 PARAMETER Experiment Name: Zm_42deg_Heat_P Parameter: Timepoint (hr) Value: 1
  misc_feature: MA Experiment 108522 PARAMETER Experiment Name: Zm_42deg_Heat_P Parameter: Tissue Value: Aerial
  misc_feature: MA Experiment ID: 108523 Result: Up-regulated in Transcription
  misc_feature: MA Experiment 108523 PARAMETER Experiment Name: Zm_42deg_Heat_P Parameter: Age (day) Value: 8
  misc_feature: MA Experiment 108523 PARAMETER Experiment Name: Zm_42deg_Heat_P Parameter: Organism Value: Zea mays
  misc_feature: MA Experiment 108523 PARAMETER Experiment Name: Zm_42deg_Heat_P Parameter: Plant Line Value: 35A19
  misc_feature: MA Experiment 108523 PARAMETER Experiment Name: Zm_42deg_Heat_P Parameter: Temperature (deg C) Value: 42 vs. 22
  misc_feature: MA Experiment 108523 PARAMETER Experiment Name: Zm_42deg_Heat_P Parameter: Timepoint (hr) Value: 6
  misc_feature: MA Experiment 108523 PARAMETER Experiment Name: Zm_42deg_Heat_P Parameter: Tissue Value: Aerial
  misc_feature: MA Experiment ID: 108527 Result: Up-regulated in Transcription
  misc_feature: MA Experiment 108527 PARAMETER Experiment Name: Zm_5mM_NO_P Parameter: Age (day) Value: 8
  misc_feature: MA Experiment 108527 PARAMETER Experiment Name: Zm_5mM_NO_P Parameter: Organism Value: Zea mays
  misc_feature: MA Experiment 108527 PARAMETER Experiment Name: Zm_5mM_NO_P Parameter: Plant Line Value: 35A19
  misc_feature: MA Experiment 108527 PARAMETER Experiment Name: Zm_5mM_NO_P Parameter: Timepoint (hr) Value: 6
  misc_feature: MA Experiment 108527 PARAMETER Experiment Name: Zm_5mM_NO_P Parameter: Tissue Value: Aerial
  misc_feature: MA Experiment 108527 PARAMETER Experiment Name: Zm_5mM_NO_P Parameter: Treatment Value: 5mM NO vs. No Treatment
  misc_feature: MA Experiment ID: 108534 Result: Up-regulated in Transcription
  misc_feature: MA Experiment 108534 PARAMETER Experiment Name: Zm_4deg_Cold_P Parameter: Age (hr) Value: 8
  misc_feature: MA Experiment 108534 PARAMETER Experiment Name: Zm_4deg_Cold_P Parameter: Organism Value: Zea mays
  misc_feature: MA Experiment 108534 PARAMETER Experiment Name: Zm_4deg_Cold_P Parameter: Plant Line Value: 35A19
  misc_feature: MA Experiment 108534 PARAMETER Experiment Name: Zm_4deg_Cold_P Parameter: Temperature (deg C) Value: 4 vs. 22
  misc_feature: MA Experiment 108534 PARAMETER Experiment Name: Zm_4deg_Cold_P Parameter: Timepoint (hr) Value: 6
  misc_feature: MA Experiment 108534 PARAMETER Experiment Name: Zm_4deg_Cold_P Parameter: Tissue Value: Aerial
  misc_feature: MA Experiment ID: 108543 Result: Down-regulated in Transcription
  misc_feature: MA Experiment ID: 108559 Result: Up-regulated in Transcription
  misc_feature: MA Experiment 108559 PARAMETER Experiment Name: Zm_5mM_NO_P Parameter: Age (day) Value: 8
  misc_feature: MA Experiment 108559 PARAMETER Experiment Name: Zm_5mM_NO_P Parameter: Organism Value: Zea mays
  misc_feature: MA Experiment 108559 PARAMETER Experiment Name: Zm_5mM_NO_P Parameter: Plant Line Value: 35A19
  misc_feature: MA Experiment 108559 PARAMETER Experiment Name: Zm_5mM_NO_P Parameter: Timepoint (hr) Value: 12
  misc_feature: MA Experiment 108559 PARAMETER Experiment Name: Zm_5mM_NO_P Parameter: Tissue Value: Aerial
  misc_feature: MA Experiment 108559 PARAMETER Experiment Name: Zm_5mM_NO_P Parameter: Treatment Value: 5mM NO vs. No Treatment
  misc_feature: MA Experiment ID: 20000477 Result: Up-regulated in Transcription
  misc_feature: MA Experiment 20000477 PARAMETER Experiment Name: Zm_5mM_SA_P Parameter: Age (day) Value: 10
  misc_feature: MA Experiment 20000477 PARAMETER Experiment Name: Zm_5mM_SA_P Parameter: Organism Value: Zea mays
  misc_feature: MA Experiment 20000477 PARAMETER Experiment Name: Zm_5mM_SA_P Parameter: Plant Line Value: 35A19
  misc_feature: MA Experiment 20000477 PARAMETER Experiment Name: Zm_5mM_SA_P Parameter: Timepoint (hr) Value: 48
  misc_feature: MA Experiment 20000477 PARAMETER Experiment Name: Zm_5mM_SA_P Parameter: Tissue Value: Aerial
  misc_feature: MA Experiment 20000477 PARAMETER Experiment Name: Zm_5mM_SA_P Parameter: Treatment Value: 5mM SA vs. No Treatment
  misc_feature: MA Experiment ID: 20000478 Result: Up-regulated in Transcription
  misc_feature: MA Experiment 20000478 PARAMETER Experiment Name: Zm_5mM_SA_P Parameter: Age (day) Value: 11
  misc_feature: MA Experiment 20000478 PARAMETER Experiment Name: Zm_5mM_SA_P Parameter: Organism Value: Zea mays
  misc_feature: MA Experiment 20000478 PARAMETER Experiment Name: Zm_5mM_SA_P Parameter: Plant Line Value: 35A19
  misc_feature: MA Experiment 20000478 PARAMETER Experiment Name: Zm_5mM_SA_P Parameter: Timepoint (hr) Value: 72
  misc_feature: MA Experiment 20000478 PARAMETER Experiment Name: Zm_5mM_SA_P Parameter: Tissue Value: Aerial
  misc_feature: MA Experiment 20000478 PARAMETER Experiment Name: Zm_5mM_SA_P Parameter: Treatment Value: 5mM SA vs. No Treatment
  misc_feature: MA Experiment ID: 20000479 Result: Up-regulated in Transcription
  misc_feature: MA Experiment 20000479 PARAMETER Experiment Name: Zm_Drought_P Parameter: Age (day) Value: 10
  misc_feature: MA Experiment 20000479 PARAMETER Experiment Name: Zm_Drought_P Parameter: Organism Value: Zea mays
  misc_feature: MA Experiment 20000479 PARAMETER Experiment Name: Zm_Drought_P Parameter: Plant Line Value: 35A19
  misc_feature: MA Experiment 20000479 PARAMETER Experiment Name: Zm_Drought_P Parameter: Timepoint (hr) Value: 48
  misc_feature: MA Experiment 20000479 PARAMETER Experiment Name: Zm_Drought_P Parameter: Tissue Value: Aerial
  misc_feature: MA Experiment 20000479 PARAMETER Experiment Name: Zm_Drought_P Parameter: Treatment Value: Drought vs. No Drought
  misc_feature: MA Experiment ID: 20000480 Result: Up-regulated in Transcription
  misc_feature: MA Experiment 20000480 PARAMETER Experiment Name: Zm_Drought_P Parameter: Age (day) Value: 11
  misc_feature: MA Experiment 20000480 PARAMETER Experiment Name: Zm_Drought_P Parameter: Organism Value: Zea mays
  misc_feature: MA Experiment 20000480 PARAMETER Experiment Name: Zm_Drought_P Parameter: Plant Line Value: 35A19
  misc_feature: MA Experiment 20000480 PARAMETER Experiment Name: Zm_Drought_P Parameter: Timepoint (hr) Value: 72
  misc_feature: MA Experiment 20000480 PARAMETER Experiment Name: Zm_Drought_P Parameter: Tissue Value: Aerial
  misc_feature: MA Experiment 20000480 PARAMETER Experiment Name: Zm_Drought_P Parameter: Treatment Value: Drought vs. No Drought
  misc_feature: MA Experiment ID: 20000535 Result: Down-regulated in Transcription
  misc_feature: MA Experiment 20000535 PARAMETER Experiment Name: Zm_Hybrid_Seed_Dev_P Parameter: DAP Value: 30 vs. 12
  misc_feature: MA Experiment 20000535 PARAMETER Experiment Name: Zm_Hybrid_Seed_Dev_P Parameter: Organism Value: Zea mays
  misc_feature: MA Experiment 20000535 PARAMETER Experiment Name: Zm_Hybrid_Seed_Dev_P Parameter: Plant Line Value: 35A19
  misc_feature: MA Experiment 20000535 PARAMETER Experiment Name: Zm_Hybrid_Seed_Dev_P Parameter: Tissue Value: Embryo vs. Unfert Floret
  misc_feature: MA Experiment ID: 20000626 Result: Up-regulated in Transcription
  misc_feature: MA Experiment 20000626 PARAMETER Experiment Name: Zm_Herbicide-Treatments_P Parameter: Timepoint (hr) Value: 12
  misc_feature: MA Experiment 20000626 PARAMETER Experiment Name: Zm_Herbicide-Treatments_P Parameter: Tissue Value: Aerial
  misc_feature: MA Experiment 20000626 PARAMETER Experiment Name: Zm_Herbicide-Treatments_P Parameter: Treatment Value: Roundup vs. No Treatment
  misc_feature: MA Experiment ID: 20000627 Result: Up-regulated in Transcription
  misc_feature: MA Experiment 20000627 PARAMETER Experiment Name: Zm_Herbicide-Treatments_P Parameter: Timepoint (hr) Value: 12
  misc_feature: MA Experiment 20000627 PARAMETER Experiment Name: Zm_Herbicide-Treatments_P Parameter: Tissue Value: Aerial
  misc_feature: MA Experiment 20000627 PARAMETER Experiment Name: Zm_Herbicide-Treatments_P Parameter: Treatment Value: Finale vs. No Treatment
acaccgcccgcacaccccaccggccggccacacaggcaccgacagcgactcggagatgacggccgggcagcttctgcgcaccgagccatcggcccagccccagcgggtgcgccacagcaccccgccggcggcactccaagcgggcatcgtgccgtcgtacccgccgcccgagtcggacggtgacgagtcgtgggtctggtcccagatcaaggcggaggcgcggcgcgacgcggacgcggagccggcgctggcctccttcctctacgcgacggtgctgtcgcacgcgtccctggaccggtccctggccttccacctggccaacaagctgtgctcctccacgctgctgtcgacgctcctctacgacctcttcgtggcgtcgctcgcggagcacccgtccgtccgcgccgcggccggtggccgacctgatcgccgcgcggtcgcgggacccggcctgcgcgggcttcgcgcactgcctcctcaactacaaggggttcctggccgtgcaggcgcaccgcgtggcgcacgtgctgtgggcgcagggccggcgcgcgctggcgctggcgctccagtcccgcgtcgccgaggtcttcgccgtggacatccacccggccgccaccgtcggcaggggcatcctgctggaccacgccacgggcgtcgtcgtcggggagacggccgtcgtgggcgacaacgtctccatactccaccacgtgacgctgggcggcaccggcaaggcggtgggcgaccggcaccccaagatcggggacggcgtgctcatcggcgccggcgcgaccgtcctgggcaacgtcaggatcggcgccggcgccaaggtcggcgccgggtccgtcgtgctcatcgacgtgccgcccaggagcaccgccgtggggaaccccgccaggctgatcggcgggaagaagggcgaggaggtgatgccgggggagtccatggaccacacctccttcatacagcagtggtcggactacatcatttgagcccgcaagctagaaaaaaaagagctcgtcttgctactgttgttatactgctgttgcgttttctgtgtatgtgcgtgcctgtgtggctgtgttagctgtatgctcttgttccagtgaggtgaaccgtggacatgctggtgtccagaaagatgtgttcaaagttcgctctgtaattttcgaagcgaatgaacagtgtttacgg

SEQ ID NO: 3768 - protein, 360 aa, Zea mays subsp. mays
  peptide (1)..(360): Ceres Seq. ID no. 12410096
  misc_feature (139)..(316): Pfam Name: HlyD family secretion protein Pfam Description: HlyD family secretion protein
  misc_feature (21)..(136): Homolog of NCBI NO: 21537083 NR Description: serine O-acetyltransferase (EC 2.3.1.30) Sat-52
  misc_feature (54)..(136): Homolog of NCBI NO: 28460066 NR Description: serine O-acetyltransferase [Beta vulgaris]
  misc_feature (21)..(136): Homolog of NCBI NO: 15241928 NR Description: serine O-acetyltransferase (EC 2.3.1.30) Sat-52
  misc_feature (58)..(136): Homolog of NCBI NO: 1361979 NR Description: serine O-acetyltransferase (EC 2.3.1.30) -
  misc_feature (39)..(137): Homolog of NCBI NO: 23343585 NR Description: serine acetyltransferase 7 [Nicotiana tabacum]
  misc_feature (38)..(136): Homolog of NCBI NO: 25991545 NR Description: satase isoform III [Zea mays]
  misc_feature (51)..(136): Homolog of NCBI NO: 7384806 NR Description: serine acetyltransferase [Allium tuberosum]
  misc_feature (50)..(137): Homolog of NCBI NO: 6601494 NR Description: serine acetyltransferase [Allium cepa]
  misc_feature (19)..(136): Homolog of NCBI NO: 34910686 NR Description: putative serine acetyltransferase
  misc_feature (19)..(137): Homolog of NCBI NO: 25991547 NR Description: satase isoform I [Zea mays]
HRPHTPPAGHTGTDSDSEMTAGQLLRTEPSAQPQRVRHSTPPAALQAGIVPSYPPPESDGDESWVWSQIKAEARRDADAEPALASFLYATVLSHASLDRSLAFHLANKLCSSTLLSTLLYDLFVASLAEHPSVRAAAGGRPDRRAVAGPGLRGLRALPPQLQGVPGRAGAPRGARAVGAGPARAGAGAPVPRRRGLRRGHPPGRHRRQGHPAGPRHGRRRRGDGRRGRQRLHTPPRDAGRHRQGGGRPAPQDRGRRAHRRRRDRPGQRQDRRRRQGRRRVRRAHRRAAQEHRRGEPRQADRREEGRGGDAGGVHGPHLLHTAVVGLHHLSPQARKKRARLATVVILLLRFLCMCVPVWLC

SEQ ID NO: 3769 - protein, 342 aa, Zea mays subsp. mays
  peptide (1)..(342): Ceres Seq. ID no. 12410097
  misc_feature (121)..(298): Pfam Name: HlyD family secretion protein Pfam Description: HlyD family secretion protein
  misc_feature (3)..(118): Homolog of NCBI NO: 21537083 NR Description: serine O-acetyltransferase (EC 2.3.1.30) Sat-52
  misc_feature (36)..(118): Homolog of NCBI NO: 28460066 NR Description: serine O-acetyltransferase [Beta vulgaris]
  misc_feature (3)..(118): Homolog of NCBI NO: 15241928 NR Description: serine O-acetyltransferase (EC 2.3.1.30) Sat-52
  misc_feature (40)..(118): Homolog of NCBI NO: 1361979 NR Description: serine O-acetyltransferase (EC 2.3.1.30) -
  misc_feature (21)..(119): Homolog of NCBI NO: 23343585 NR Description: serine acetyltransferase 7 [Nicotiana tabacum]
  misc_feature (20)..(118): Homolog of NCBI NO: 25991545 NR Description: satase isoform III [Zea mays]
  misc_feature (33)..(118): Homolog of NCBI NO: 7384806 NR Description: serine acetyltransferase [Allium tuberosum]
  misc_feature (32)..(119): Homolog of NCBI NO: 6601494 NR Description: serine acetyltransferase [Allium cepa]
  misc_feature (1)..(118): Homolog of NCBI NO: 34910686 NR Description: putative serine acetyltransferase
  misc_feature (1)..(119): Homolog of NCBI NO: 25991547 NR Description: satase isoform I [Zea mays]
MTAGQLLRTEPSAQPQRVRHSTPPAALQAGIVPSYPPPESDGDESWVWSQIKAEARRDADAEPALASFLYATVLSHASLDRSLAFHLANKLCSSTLLSTLLYDLFVASLAEHPSVRAAAGGRPDRRAVAGPGLRGLRALPPQLQGVPGRAGAPRGARAVGAGPARAGAGAPVPRRRGLRRGHPPGRHRRQGHPAGPRHGRRRRGDGRRGRQRLHTPPRDAGRHRQGGGRPAPQDRGRRAHRRRRDRPGQRQDRRRRQGRRRVRRAHRRAAQEHRRGEPRQADRREEGRGGDAGGVHGPHLLHTAVVGLHHLSPQARKKRARLATVVILLLRFLCMCVPVWLC

SEQ ID NO: 3770 - DNA, 1015 bp, Zea mays subsp. mays
  misc_feature (1)..(1015): Ceres Seq. ID no. 12595679
  misc_feature: MA Experiment ID: 108559 Result: Up-regulated in Transcription
  misc_feature: MA Experiment 108559 PARAMETER Experiment Name: Zm_5mM_NO_P Parameter: Age (day) Value: 8
  misc_feature: MA Experiment 108559 PARAMETER Experiment Name: Zm_5mM_NO_P Parameter: Organism Value: Zea mays
  misc_feature: MA Experiment 108559 PARAMETER Experiment Name: Zm_5mM_NO_P Parameter: Plant Line Value: 35A19
  misc_feature: MA Experiment 108559 PARAMETER Experiment Name: Zm_5mM_NO_P Parameter: Timepoint (hr) Value: 12
  misc_feature: MA Experiment 108559 PARAMETER Experiment Name: Zm_5mM_NO_P Parameter: Tissue Value: Aerial
  misc_feature: MA Experiment 108559 PARAMETER Experiment Name: Zm_5mM_NO_P Parameter: Treatment Value: 5mM NO vs. No Treatment
  misc_feature: MA Experiment ID: 20000477 Result: Up-regulated in Transcription
  misc_feature: MA Experiment 20000477 PARAMETER Experiment Name: Zm_5mM_SA_P Parameter: Age (day) Value: 10
  misc_feature: MA Experiment 20000477 PARAMETER Experiment Name: Zm_5mM_SA_P Parameter: Organism Value: Zea mays
  misc_feature: MA Experiment 20000477 PARAMETER Experiment Name: Zm_5mM_SA_P Parameter: Plant Line Value: 35A19
  misc_feature: MA Experiment 20000477 PARAMETER Experiment Name: Zm_5mM_SA_P Parameter: Timepoint (hr) Value: 48
  misc_feature: MA Experiment 20000477 PARAMETER Experiment Name: Zm_5mM_SA_P Parameter: Tissue Value: Aerial
  misc_feature: MA Experiment 20000477 PARAMETER Experiment Name: Zm_5mM_SA_P Parameter: Treatment Value: 5mM SA vs. No Treatment
  misc_feature: MA Experiment ID: 20000480 Result: Up-regulated in Transcription
  misc_feature: MA Experiment 20000480 PARAMETER Experiment Name: Zm_Drought_P Parameter: Age (day) Value: 11
  misc_feature: MA Experiment 20000480 PARAMETER Experiment Name: Zm_Drought_P Parameter: Organism Value: Zea mays
  misc_feature: MA Experiment 20000480 PARAMETER Experiment Name: Zm_Drought_P Parameter: Plant Line Value: 35A19
  misc_feature: MA Experiment 20000480 PARAMETER Experiment Name: Zm_Drought_P Parameter: Timepoint (hr) Value: 72
  misc_feature: MA Experiment 20000480 PARAMETER Experiment Name: Zm_Drought_P Parameter: Tissue Value: Aerial
  misc_feature: MA Experiment 20000480 PARAMETER Experiment Name: Zm_Drought_P Parameter: Treatment Value: Drought vs. No Drought
  misc_feature: MA Experiment ID: 20000535 Result: Up-regulated in Transcription
  misc_feature: MA Experiment 20000535 PARAMETER Experiment Name: Zm_Hybrid_Seed_Dev_P Parameter: DAP Value: 30 vs. 12
  misc_feature: MA Experiment 20000535 PARAMETER Experiment Name: Zm_Hybrid_Seed_Dev_P Parameter: Organism Value: Zea mays
  misc_feature: MA Experiment 20000535 PARAMETER Experiment Name: Zm_Hybrid_Seed_Dev_P Parameter: Plant Line Value: 35A19
  misc_feature: MA Experiment 20000535 PARAMETER Experiment Name: Zm_Hybrid_Seed_Dev_P Parameter: Tissue Value: Embryo vs. Unfert Floret
agcttcgtcatttccggcgccctcctcctttcctttatctctctccccacgcccccacgtttcgccccccatttcgaagcccaccgaattccctgcgattcctctcccctcgcctcctcgtctccccctaggggatcgtcggagaggaatcgcaaagagggccgtctcatccgagttaaggaagccatggagcacaaggaggctgggtgccaggcccccgagggacccatcctctgcatcaataactgtggcttcttcggcagcgcggcgaccatgaacatgtgctccaagtgccacaaggagatgataacgaagcaggatcaggccaagctggctgcctcctctatcgacagcatcgtgaacggcagcgacgccgtcatggagccggttgttgctggcagcaacacgggtagtagctgttgcccaagttgagttgcaaacaatgaacgtgcagcagcccgctggatgttgccggacccagccgagggggtggcggcgatctccaaaggggggaaggtagggccgaaccggtgcagcgcctgcaggaagagggttggacttacgggattcaactgccggtgtgggaacttgtactgcgcactccaccgctactccgacaagcacgactgcaagttcgactaccggactgctgccagggacgccattgccaaggctaatccggtggtgaaggcagacaagctcgacaagatctagggggggttccctacggttgggtatcaggaagattgtaaaccgcggtaactcgtcatgcggaactgctgccttgccccccgcgcctttctcttccatgtttgctgctacaatcttgttgttgggcattgcagtgcacggtgcacacttgtgtagcccgcctcgagaattcctgcctctgcatctggtcagttctaaaatgatttgcatgttggctatgttgtgtaagctctatttatggtggtctcgctgagacgggtatttggcttcgcagttatctagctatgtgatgtactgttgtctt

SEQ ID NO: 3771 - protein, 143 aa, Zea mays subsp. mays
  peptide (1)..(143): Ceres Seq. ID no. 12595680
  misc_feature (76)..(100): Pfam Name: A20-like zinc finger Pfam Description: A20-like zinc finger
  misc_feature (76)..(100): Pfam Name: A20-like zinc finger Pfam Description: A20-like zinc finger
  misc_feature (76)..(100): Pfam Name: A20-like zinc finger Pfam Description: A20-like zinc finger
  misc_feature (63)..(143): Homolog of NCBI NO: 35187687 NR Description: zinc-finger protein [Oryza sativa (indica
  misc_feature (63)..(143): Homolog of NCBI NO: 11361253 NR Description: hypothetical protein p85RF [imported] - Prunus
  misc_feature (63)..(143): Homolog of NCBI NO: 18403408 NR Description: expressed protein; protein id: At1g51200.1, by cDNA: gi_15912334 [Arabidopsis thaliana]
  misc_feature (63)..(143): Homolog of NCBI NO: 25082726 NR Description: expressed protein [Arabidopsis thaliana]
  misc_feature (62)..(143): Homolog of NCBI NO: 15231686 NR Description: zinc finger - like protein; protein id: supported by cDNA: gi_14596166 [Arabidopsis thaliana]
  misc_feature (63)..(143): Homolog of NCBI NO: 11361253 NR Description: hypothetical protein p85RF [imported] - Prunus
  misc_feature (63)..(143): Homolog of NCBI NO: 25082726 NR Description: expressed protein [Arabidopsis thaliana]
  misc_feature (63)..(143): Homolog of NCBI NO: 18403408 NR Description: expressed protein; protein id: At1g51200.1, by cDNA: gi_15912334 [Arabidopsis thaliana]
  misc_feature (63)..(143): Homolog of NCBI NO: 11361253 NR Description: hypothetical protein p85RF [imported] - Prunus
  misc_feature (63)..(143): Homolog of NCBI NO: 35187687 NR Description: zinc-finger protein [Oryza sativa (indica
  misc_feature (71)..(143): Homolog of NCBI NO: 29791559 NR Description: Unknown (protein for MGC:56057) [Danio rerio]
  misc_feature (62)..(143): Homolog of NCBI NO: 18404102 NR Description: expressed protein; protein id: At2g36320.1, by cDNA: 24255. [Arabidopsis thaliana] >gi|25408460|pir||C84779
  misc_feature (67)..(103): Homolog of NCBI NO: 30908921 NR Description: putative zinc finger transcription factor ZFP33
  misc_feature (64)..(136): Homolog of NCBI NO: 28269431 NR Description: putative zinc finger protein [Oryza sativa
  misc_feature (62)..(143): Homolog of NCBI NO: 14596167 NR Description: zinc finger-like protein [Arabidopsis thaliana]
  misc_feature (62)..(143): Homolog of NCBI NO: 15231686 NR Description: zinc finger - like protein; protein id: supported by cDNA: gi_14596166 [Arabidopsis thaliana]
  misc_feature (71)..(143): Homolog of NCBI NO: 29791559 NR Description: Unknown (protein for MGC:56057) [Danio rerio]
  misc_feature (62)..(143): Homolog of NCBI NO: 18404102 NR Description: expressed protein; protein id: At2g36320.1, by cDNA: 24255. [Arabidopsis thaliana] >gi|25408460|pir||C84779
  misc_feature (67)..(103): Homolog of NCBI NO: 30908921 NR Description: putative zinc finger transcription factor ZFP33
  misc_feature (64)..(136): Homolog of NCBI NO: 28269431 NR Description: putative zinc finger protein [Oryza sativa
  misc_feature (62)..(143): Homolog of NCBI NO: 14596167 NR Description: zinc finger-like protein [Arabidopsis thaliana]
  misc_feature (62)..(143): Homolog of NCBI NO: 15231686 NR Description: zinc finger - like protein; protein id: supported by cDNA: gi_14596166 [Arabidopsis thaliana]
  misc_feature (63)..(143): Homolog of NCBI NO: 25082726 NR Description: expressed protein [Arabidopsis thaliana]
  misc_feature (63)..(143): Homolog of NCBI NO: 18403408 NR Description: expressed protein; protein id: At1g51200.1, by cDNA: gi_15912334 [Arabidopsis thaliana]
  misc_feature (63)..(143): Homolog of NCBI NO: 35187687 NR Description: zinc-finger protein [Oryza sativa (indica
  misc_feature (62)..(143): Homolog of NCBI NO: 14596167 NR Description: zinc finger-like protein [Arabidopsis thaliana]
  misc_feature (64)..(136): Homolog of NCBI NO: 28269431 NR Description: putative zinc finger protein [Oryza sativa
  misc_feature (67)..(103): Homolog of NCBI NO: 30908921 NR Description: putative zinc finger transcription factor ZFP33
  misc_feature (62)..(143): Homolog of NCBI NO: 18404102 NR Description: expressed protein; protein id: At2g36320.1, by cDNA: 24255. [Arabidopsis thaliana] >gi|25408460|pir||C84779
  misc_feature (71)..(143): Homolog of NCBI NO: 29791559 NR Description: Unknown (protein for MGC:56057) [Danio rerio]
SFVISGALLLSFISLPTPPRFAPHFEAHRIPCDSSPLASSSPPRGSSERNRKEGRLIRVKEAMEHKEAGCQAPEGPILCINNCGFFGSAATMNMCSKCHKEMITKQDQAKLAASSIDSIVNGSDAVMEPVVAGSNTGSSCCPS

SEQ ID NO: 3772 - protein, 91 aa, Zea mays subsp. mays
  peptide (1)..(91): Ceres Seq. ID no. 12595681
ASSFPAPSSFPLSLSPRPHVSPPISKPTEFPAIPLPSPPRLPLGDRRRGIAKRAVSSELRKPWSTRRLGARPPRDPSSASITVASSAARRP

SEQ ID NO: 3773 - protein, 82 aa, Zea mays subsp. mays
  peptide (1)..(82): Ceres Seq. ID no. 12595682
  misc_feature (23)..(63): Pfam Name: AN1-like Zinc finger Pfam Description: AN1-like Zinc finger
  misc_feature (23)..(63): Pfam Name: AN1-like Zinc finger Pfam Description: AN1-like Zinc finger
  misc_feature (23)..(63): Pfam Name: AN1-like Zinc finger Pfam Description: AN1-like Zinc finger
  misc_feature (1)..(82): Homolog of NCBI NO: 35187687 NR Description: zinc-finger protein [Oryza sativa (indica
  misc_feature (1)..(82): Homolog of NCBI NO: 11361253 NR Description: hypothetical protein p85RF [imported] - Prunus
  misc_feature (1)..(82): Homolog of NCBI NO: 18403408 NR Description: expressed protein; protein id: At1g51200.1, by cDNA: gi_15912334 [Arabidopsis thaliana]
  misc_feature (1)..(82): Homolog of NCBI NO: 25082726 NR Description: expressed protein [Arabidopsis thaliana]
  misc_feature (1)..(82): Homolog of NCBI NO: 15231686 NR Description: zinc finger - like protein; protein id: supported by cDNA: gi_14596166 [Arabidopsis thaliana]
  misc_feature (1)..(82): Homolog of NCBI NO: 11361253 NR Description: hypothetical protein p85RF [imported] - Prunus
  misc_feature (1)..(82): Homolog of NCBI NO: 25082726 NR Description: expressed protein [Arabidopsis thaliana]
  misc_feature (1)..(82): Homolog of NCBI NO: 18403408 NR Description: expressed protein; protein id: At1g51200.1, by cDNA: gi_15912334 [Arabidopsis thaliana]
  misc_feature (1)..(82): Homolog of NCBI NO: 11361253 NR Description: hypothetical protein p85RF [imported] - Prunus
  misc_feature (1)..(82): Homolog of NCBI NO: 35187687 NR Description: zinc-finger protein [Oryza sativa (indica
  misc_feature (3)..(82): Homolog of NCBI NO: 29791559 NR Description: Unknown (protein for MGC:56057) [Danio rerio]
  misc_feature (1)..(82): Homolog of NCBI NO: 18404102 NR Description: expressed protein; protein id: At2g36320.1, by cDNA: 24255. [Arabidopsis thaliana] >gi|25408460|pir||C84779
  misc_feature (3)..(82): Homolog of NCBI NO: 30908921 NR Description: putative zinc finger transcription factor ZFP33
  misc_feature (6)..(82): Homolog of NCBI NO: 28269431 NR Description: putative zinc finger protein [Oryza sativa
  misc_feature (1)..(82): Homolog of NCBI NO: 14596167 NR Description: zinc finger-like protein [Arabidopsis thaliana]
  misc_feature (1)..(82): Homolog of NCBI NO: 15231686 NR Description: zinc finger - like protein; protein id: supported by cDNA: gi_14596166 [Arabidopsis thaliana]
  misc_feature (3)..(82): Homolog of NCBI NO: 29791559 NR Description: Unknown (protein for MGC:56057) [Danio rerio]
  misc_feature (1)..(82): Homolog of NCBI NO: 18404102 NR Description: expressed protein; protein id: At2g36320.1, by cDNA: 24255. [Arabidopsis thaliana] >gi|25408460|pir||C84779
  misc_feature (3)..(82): Homolog of NCBI NO: 30908921 NR Description: putative zinc finger transcription factor ZFP33
  misc_feature (6)..(82): Homolog of NCBI NO: 28269431 NR Description: putative zinc finger protein [Oryza sativa
  misc_feature (1)..(82): Homolog of NCBI NO: 14596167 NR Description: zinc finger-like protein [Arabidopsis thaliana]
  misc_feature (1)..(82): Homolog of NCBI NO: 15231686 NR Description: zinc finger - like protein; protein id: supported by cDNA: gi_14596166 [Arabidopsis thaliana]
  misc_feature (1)..(82): Homolog of NCBI NO: 25082726 NR Description: expressed protein [Arabidopsis thaliana]
  misc_feature (1)..(82): Homolog of NCBI NO: 18403408 NR Description: expressed protein; protein id: At1g51200.1, by cDNA: gi_15912334 [Arabidopsis thaliana]
  misc_feature (1)..(82): Homolog of NCBI NO: 35187687 NR Description: zinc-finger protein [Oryza sativa (indica
  misc_feature (1)..(82): Homolog of NCBI NO: 14596167 NR Description: zinc finger-like protein [Arabidopsis thaliana]
  misc_feature (6)..(82): Homolog of NCBI NO: 28269431 NR Description: putative zinc finger protein [Oryza sativa
  misc_feature (3)..(82): Homolog of NCBI NO: 30908921 NR Description: putative zinc finger transcription factor ZFP33
  misc_feature (1)..(82): Homolog of NCBI NO: 18404102 NR Description: expressed protein; protein id: At2g36320.1, by cDNA: 24255. [Arabidopsis thaliana] >gi|25408460|pir||C84779
  misc_feature (3)..(82): Homolog of NCBI NO: 29791559 NR Description: Unknown (protein for MGC:56057) [Danio rerio]
MLPDPAEGVAAISKGGKVGPNRCSACRKRVGLTGFNCRCGNLYCALHRYSDKHDCKFDYRTAARDAIAKANPVVKADKLDKI

SEQ ID NO: 3774 - protein, 81 aa, Zea mays subsp. mays
  peptide (1)..(81): Ceres Seq. ID no. 12595683
  misc_feature (14)..(38): Pfam Name: A20-like zinc finger Pfam Description: A20-like zinc finger
  misc_feature (14)..(38): Pfam Name: A20-like zinc finger Pfam Description: A20-like zinc finger
  misc_feature (14)..(38): Pfam Name: A20-like zinc finger Pfam Description: A20-like zinc finger
  misc_feature (1)..(81): Homolog of NCBI NO: 35187687 NR Description: zinc-finger protein [Oryza sativa (indica
  misc_feature (1)..(81): Homolog of NCBI NO: 11361253 NR Description: hypothetical protein p85RF [imported] - Prunus
  misc_feature (1)..(81): Homolog of NCBI NO: 18403408 NR Description: expressed protein; protein id: At1g51200.1, by cDNA: gi_15912334 [Arabidopsis thaliana]
  misc_feature (1)..(81): Homolog of NCBI NO: 25082726 NR Description: expressed protein [Arabidopsis thaliana]
  misc_feature (1)..(81): Homolog of NCBI NO: 15231686 NR Description: zinc finger - like protein; protein id: supported by cDNA: gi_14596166 [Arabidopsis thaliana]
  misc_feature (1)..(81): Homolog of NCBI NO: 11361253 NR Description: hypothetical protein p85RF [imported] - Prunus
  misc_feature (1)..(81): Homolog of NCBI NO: 25082726 NR Description: expressed protein [Arabidopsis thaliana]
  misc_feature (1)..(81): Homolog of NCBI NO: 18403408 NR Description: expressed protein; protein id: At1g51200.1, by cDNA: gi_15912334 [Arabidopsis thaliana]
  misc_feature (1)..(81): Homolog of NCBI NO: 11361253 NR Description: hypothetical protein p85RF [imported] - Prunus
  misc_feature (1)..(81): Homolog of NCBI NO: 35187687 NR Description: zinc-finger protein [Oryza sativa (indica
  misc_feature (9)..(81): Homolog of NCBI NO: 29791559 NR Description: Unknown (protein for MGC:56057) [Danio rerio]
  misc_feature (1)..(81): Homolog of NCBI NO: 18404102 NR Description: expressed protein; protein id: At2g36320.1, by cDNA: 24255. [Arabidopsis thaliana] >gi|25408460|pir||C84779
  misc_feature (5)..(41): Homolog of NCBI NO: 30908921 NR Description: putative zinc finger transcription factor ZFP33
  misc_feature (2)..(74): Homolog of NCBI NO: 28269431 NR Description: putative zinc finger protein [Oryza sativa
  misc_feature (1)..(81): Homolog of NCBI NO: 14596167 NR Description: zinc finger-like protein [Arabidopsis thaliana]
  misc_feature (1)..(81): Homolog of NCBI NO: 15231686 NR Description: zinc finger - like protein; protein id: supported by cDNA: gi_14596166 [Arabidopsis thaliana]
  misc_feature (9)..(81): Homolog of NCBI NO: 29791559 NR Description: Unknown (protein for MGC:56057) [Danio rerio]
  misc_feature (1)..(81): Homolog of NCBI NO: 18404102 NR Description: expressed protein; protein id: At2g36320.1, by cDNA: 24255. [Arabidopsis thaliana] >gi|25408460|pir||C84779
  misc_feature (5)..(41): Homolog of NCBI NO: 30908921 NR Description: putative zinc finger transcription factor ZFP33
  misc_feature (2)..(74): Homolog of NCBI NO: 28269431 NR Description: putative zinc finger protein [Oryza sativa
  misc_feature (1)..(81): Homolog of NCBI NO: 14596167 NR Description: zinc finger-like protein [Arabidopsis thaliana]
  misc_feature (1)..(81): Homolog of NCBI NO: 15231686 NR Description: zinc finger - like protein; protein id: supported by cDNA: gi_14596166 [Arabidopsis thaliana]
  misc_feature (1)..(81): Homolog of NCBI NO: 25082726 NR Description: expressed protein [Arabidopsis thaliana]
  misc_feature (1)..(81): Homolog of NCBI NO: 18403408 NR Description: expressed protein; protein id: At1g51200.1, by cDNA: gi_15912334 [Arabidopsis thaliana]
  misc_feature (1)..(81): Homolog of NCBI NO: 35187687 NR Description: zinc-finger protein [Oryza sativa (indica
  misc_feature (1)..(81): Homolog of NCBI NO: 14596167 NR Description: zinc finger-like protein [Arabidopsis thaliana]
  misc_feature (2)..(74): Homolog of NCBI NO: 28269431 NR Description: putative zinc finger protein [Oryza sativa
  misc_feature (5)..(41): Homolog of NCBI NO: 30908921 NR Description: putative zinc finger transcription factor ZFP33
  misc_feature (1)..(81): Homolog of NCBI NO: 18404102 NR Description: expressed protein; protein id: At2g36320.1, by cDNA: 24255. [Arabidopsis thaliana] >gi|25408460|pir||C84779
  misc_feature (9)..(81): Homolog of NCBI NO: 29791559 NR Description: Unknown (protein for MGC:56057) [Danio rerio]
MEHKEAGCQAPEGPILCINNCGFFGSAATMNMCSKCHKEMITKQDQAKLAASSIDSIVNGSDAVMEPVVAGSNTGSSCCPS

SEQ ID NO: 3775 - DNA, 770 bp, Zea mays subsp. mays
  misc_feature (1)..(770): Ceres Seq. ID no. 12403056
  misc_feature: MA Experiment ID: 108528 Result: Up-regulated in Transcription
  misc_feature: MA Experiment 108528 PARAMETER Experiment Name: Zm_Imbibed_Seeds_P Parameter: Age (day) Value: 5 vs. 2
  misc_feature: MA Experiment 108528 PARAMETER Experiment Name: Zm_Imbibed_Seeds_P Parameter: Organism Value: Zea mays
  misc_feature: MA Experiment 108528 PARAMETER Experiment Name: Zm_Imbibed_Seeds_P Parameter: Plant Line Value: 35A19
  misc_feature: MA Experiment 108528 PARAMETER Experiment Name: Zm_Imbibed_Seeds_P Parameter: Tissue Value: Aerial vs. Embryo
  misc_feature: MA Experiment ID: 108530 Result: Up-regulated in Transcription
  misc_feature: MA Experiment 108530 PARAMETER Experiment Name: Zm_Imbibed_Seeds_P Parameter: Age (day) Value: 6 vs. 2
  misc_feature: MA Experiment 108530 PARAMETER Experiment Name: Zm_Imbibed_Seeds_P Parameter: Organism Value: Zea mays
  misc_feature: MA Experiment 108530 PARAMETER Experiment Name: Zm_Imbibed_Seeds_P Parameter: Plant Line Value: 35A19
  misc_feature: MA Experiment 108530 PARAMETER Experiment Name: Zm_Imbibed_Seeds_P Parameter: Tissue Value: Aerial vs. Embryo
  misc_feature: MA Experiment ID: 108543 Result: Down-regulated in Transcription
  misc_feature: MA Experiment ID: 108547 Result: Up-regulated in Transcription
  misc_feature: MA Experiment 108547 PARAMETER Experiment Name: Zm_Imbibed_Seeds_P Parameter: Age (day) Value: 4 vs. 2
  misc_feature: MA Experiment 108547 PARAMETER Experiment Name: Zm_Imbibed_Seeds_P Parameter: Organism Value: Zea mays
  misc_feature: MA Experiment 108547 PARAMETER Experiment Name: Zm_Imbibed_Seeds_P Parameter: Plant Line Value: 35A19
  misc_feature: MA Experiment 108547 PARAMETER Experiment Name: Zm_Imbibed_Seeds_P Parameter: Tissue Value: Aerial vs. Embryo
  misc_feature: MA Experiment ID: 108687 Result: Up-regulated in Transcription
  misc_feature: MA Experiment 108687 PARAMETER Experiment Name: Zm_Embryos-Flowers__P Parameter: Tissue Value: Embryo vs. Aerial+
cagacttgcgcgcgcctccgctgctgcgacggcgagcccaagaaaaaatttcctctacgagcgcatggaggtgtccgctgggctccggccgccgcccgtcgctgcggcagcgtcgctccttggctgtcggtccgcgtcggtgccgccgcgcgtggcggcttcccattcggtgcggtccgtgtcccgcgcggttaagatcagagcagctgcaattaacggcctccaaagaaacagaagtaatttcgaatcattattccgctacgacaaatctgtccccgagcaggacattggagaaccatctggtctaaatctggaaaagaagaatgtcggggacaagcctccctgctcaagctgtgaagctaaaggtgccttgctgtgtgcaacgtgcgctggttcaggcttgtacgtcgactcgatactagagagccagggaatcatcgtgaaagtcagatgcctaggttgcggtggaactgggaacatcatgtgctccaaatgtggaggccgtgggcatacatgaacgcaaaagcttgcaccttgcagatcaaaggagttgactctatggagaattttctgtgttacatgttacggtgtgctgagctagctgctgtagctacatcgagacatgcttttattttgttcccctcattccgtgcttaaaagcatgatgcgtcataggatttcatgtgatgttgtaatcgtaaaggtgtaatggtatgtgaaagacacacttcgttcatggaggagaatgagagattaaattcagttgtgcc

SEQ ID NO: 3776 - protein, 171 aa, Zea mays subsp. mays
  peptide (1)..(171): Ceres Seq. ID no. 12403057
  misc_feature (61)..(170): Homolog of NCBI NO: 21554941 NR Description: unknown [Arabidopsis thaliana]
  misc_feature (61)..(170): Homolog of NCBI NO: 15238662 NR Description: putative protein
RLARASAAATASPRKNFLYERMEVSAGLRPPPVAAAASLLGCRSASVPPRVAASHSVRSVSRAVKIRAAAINGLQRNRSNFESLFRYDKSVPEQDIGEPSGLNLEKKNVGDKPPCSSCEAKGALLCATCAGSGLYVDSILESQGIIVKVRCLGCGGTGNIMCSKCGGRGHT

SEQ ID NO: 3777 - protein, 150 aa, Zea mays subsp. mays
  peptide (1)..(150): Ceres Seq. ID no. 12403058
  misc_feature (40)..(149): Homolog of NCBI NO: 21554941 NR Description: unknown [Arabidopsis thaliana]
  misc_feature (40)..(149): Homolog of NCBI NO: 15238662 NR Description: putative protein
MEVSAGLRPPPVAAAASLLGCRSASVPPRVAASHSVRSVSRAVKIRAAAINGLQRNRSNFESLFRYDKSVPEQDIGEPSGLNLEKKNVGDKPPCSSCEAKGALLCATCAGSGLYVDSILESQGIIVKVRCLGCGGTGNIMCSKCGGRGHT

SEQ ID NO: 3778 - protein, 101 aa, Zea mays subsp. mays
  peptide (1)..(101): Ceres Seq. ID no. 12403059
DLRAPPLLRRRAQEKISSTSAWRCPLGSGRRPSLRQRRSLAVGPRRCRRAWRLPIRCGPCPARLRSEQLQLTASKETEVISNHYSATTNLSPSRTLENHLV

SEQ ID NO: 3779 - DNA, 733 bp, Zea mays subsp. mays
  misc_feature (1)..(733): Ceres Seq. ID no. 12345910
  misc_feature: MA Experiment ID: 108522 Result: Down-regulated in Transcription
  misc_feature: MA Experiment 108522 PARAMETER Experiment Name: Zm_42deg_Heat_P Parameter: Age (day) Value: 8
  misc_feature: MA Experiment 108522 PARAMETER Experiment Name: Zm_42deg_Heat_P Parameter: Organism Value: Zea mays
  misc_feature: MA Experiment 108522 PARAMETER Experiment Name: Zm_42deg_Heat_P Parameter: Plant Line Value: 35A19
  misc_feature: MA Experiment 108522 PARAMETER Experiment Name: Zm_42deg_Heat_P Parameter: Temperature (deg C) Value: 42 vs. 22
  misc_feature: MA Experiment 108522 PARAMETER Experiment Name: Zm_42deg_Heat_P Parameter: Timepoint (hr) Value: 1
  misc_feature: MA Experiment 108522 PARAMETER Experiment Name: Zm_42deg_Heat_P Parameter: Tissue Value: Aerial
  misc_feature: MA Experiment ID: 108527 Result: Down-regulated in Transcription
  misc_feature: MA Experiment 108527 PARAMETER Experiment Name: Zm_5mM_NO_P Parameter: Age (day) Value: 8
  misc_feature: MA Experiment 108527 PARAMETER Experiment Name: Zm_5mM_NO_P Parameter: Organism Value: Zea mays
  misc_feature: MA Experiment 108527 PARAMETER Experiment Name: Zm_5mM_NO_P Parameter: Plant Line Value: 35A19
  misc_feature: MA Experiment 108527 PARAMETER Experiment Name: Zm_5mM_NO_P Parameter: Timepoint (hr) Value: 6
  misc_feature: MA Experiment 108527 PARAMETER Experiment Name: Zm_5mM_NO_P Parameter: Tissue Value: Aerial
  misc_feature: MA Experiment 108527 PARAMETER Experiment Name: Zm_5mM_NO_P Parameter: Treatment Value: 5mM NO vs. No Treatment
  misc_feature: MA Experiment ID: 108528 Result: Up-regulated in Transcription
  misc_feature: MA Experiment 108528 PARAMETER Experiment Name: Zm_Imbibed_Seeds_P Parameter: Age (day) Value: 5 vs. 2
  misc_feature: MA Experiment 108528 PARAMETER Experiment Name: Zm_Imbibed_Seeds_P Parameter: Organism Value: Zea mays
  misc_feature: MA Experiment 108528 PARAMETER Experiment Name: Zm_Imbibed_Seeds_P Parameter: Plant Line Value: 35A19
  misc_feature: MA Experiment 108528 PARAMETER Experiment Name: Zm_Imbibed_Seeds_P Parameter: Tissue Value: Aerial vs. Embryo
  misc_feature: MA Experiment ID: 108545 Result: Up-regulated in Transcription
  misc_feature: MA Experiment 108545 PARAMETER Experiment Name: Zm_Imbibed_Seeds_P Parameter: Age (day) Value: 3 vs. 2
  misc_feature: MA Experiment 108545 PARAMETER Experiment Name: Zm_Imbibed_Seeds_P Parameter: Organism Value: Zea mays
  misc_feature: MA Experiment 108545 PARAMETER Experiment Name: Zm_Imbibed_Seeds_P Parameter: Plant Line Value: 35A19
  misc_feature: MA Experiment 108545 PARAMETER Experiment Name: Zm_Imbibed_Seeds_P Parameter: Tissue Value: Aerial vs. Embryo
  misc_feature: MA Experiment ID: 108547 Result: Up-regulated in Transcription
  misc_feature: MA Experiment 108547 PARAMETER Experiment Name: Zm_Imbibed_Seeds_P Parameter: Age (day) Value: 4 vs. 2
  misc_feature: MA Experiment 108547 PARAMETER Experiment Name: Zm_Imbibed_Seeds_P Parameter: Organism Value: Zea mays
  misc_feature: MA Experiment 108547 PARAMETER Experiment Name: Zm_Imbibed_Seeds_P Parameter: Plant Line Value: 35A19
  misc_feature: MA Experiment 108547 PARAMETER Experiment Name: Zm_Imbibed_Seeds_P Parameter: Tissue Value: Aerial vs. Embryo
  misc_feature: MA Experiment ID: 108687 Result: Up-regulated in Transcription
  misc_feature: MA Experiment 108687 PARAMETER Experiment Name: Zm_Embryos-Flowers__P Parameter: Tissue Value: Embryo vs. Aerial+
  misc_feature: MA Experiment ID: 108688 Result: Down-regulated in Transcription
  misc_feature: MA Experiment 108688 PARAMETER Experiment Name: Zm_Embryos-Flowers__P Parameter: Tissue Value: Immature Flowers vs. Aerial+
  misc_feature: MA Experiment ID: 20000535 Result: Up-regulated in Transcription
  misc_feature: MA Experiment 20000535 PARAMETER Experiment Name: Zm_Hybrid_Seed_Dev_P Parameter: DAP Value: 30 vs. 12
  misc_feature: MA Experiment 20000535 PARAMETER Experiment Name: Zm_Hybrid_Seed_Dev_P Parameter: Organism Value: Zea mays
  misc_feature: MA Experiment 20000535 PARAMETER Experiment Name: Zm_Hybrid_Seed_Dev_P Parameter: Plant Line Value: 35A19
  misc_feature: MA Experiment 20000535 PARAMETER Experiment Name: Zm_Hybrid_Seed_Dev_P Parameter: Tissue Value: Embryo vs. Unfert Floret
  misc_feature: MA Experiment ID: 20000626 Result: Down-regulated in Transcription
  misc_feature: MA Experiment 20000626 PARAMETER Experiment Name: Zm_Herbicide-Treatments_P Parameter: Timepoint (hr) Value: 12
  misc_feature: MA Experiment 20000626 PARAMETER Experiment Name: Zm_Herbicide-Treatments_P Parameter: Tissue Value: Aerial
  misc_feature: MA Experiment 20000626 PARAMETER Experiment Name: Zm_Herbicide-Treatments_P Parameter: Treatment Value: Roundup vs. No Treatment
ataaagcagatagagcgggcaacatcgcagatatatatatatatatatatatagagagagagagagagagagagagagagagaggcaaactggagaggccgaggctgatggtttccaaggagcagaataagcgaggagctttgcatgagaagctcaagattctccgcagcgttactcactctcatgcgggggataaagtgtccataatagcggacgcgtcatcgtacatcaaggaactaaagcagaagatcgcgaagctaagccaagagatggcatcgtcgtctccgcagcacgccactactggtgtctgccaacaacaacggtcgtcgtcgtcggtgagtgtgggagtcctggacaagaagggccgtttcctcgtcagtgtgttcatggacgagagctgcggcccgccgccggccgggctactcgcttccgtcctcgaggccttcgacgacatcggactcacggtgcttgaggctagggctacctgcgctggttcctttcggctagaagctgtaggagaggaagtagtagatgggggcctcatcatcgacgcgcacgcggtggagcaagcagtagttcaggcaatcaagaattgccctgcaaattaaactaatcgacctagtcctccaattcgatcgatcgagttgacgatgcgctggtggtgtagcacaaagttcatgccaagagactccgagctatatatacatactgattcgcatcgtactttttgaag

SEQ ID NO: 3780 - protein, 201 aa, Zea mays subsp. mays
  peptide (1)..(201): Ceres Seq. ID no. 12345911
  misc_feature (20)..(193): Homolog of NCBI NO: 20127062 NR Description: putative bHLH transcription factor [Arabidopsis
  misc_feature (20)..(193): Homolog of NCBI NO: 15238199 NR Description: bHLH protein
  misc_feature (36)..(196): Homolog of NCBI NO: 15228867 NR Description: putative protein; protein id: At3g56220.1
  misc_feature (36)..(197): Homolog of NCBI NO: 18405384 NR Description: unknown protein; protein id: At2g40435.1
  misc_feature (36)..(198): Homolog of NCBI NO: 22296306 NR Description: hypothetical protein~similar to Arabidopsis
KADRAGNIADIYIYIYIERERERERERGKLERPRLMVSKEQNKRGALHEKLKILRSVTHSHAGDKVSIIADASSYIKELKQKIAKLSQEMASSSPQHATTGVCQQQRSSSSVSVGVLDKKGRFLVSVFMDESCGPPPAGLLASVLEAFDDIGLTVLEARATCAGSFRLEAVGEEVVDGGLIIDAHAVEQAVVQAIKNCPAN

SEQ ID NO: 3781 - protein, 166 aa, Zea mays subsp. mays
  peptide (1)..(166): Ceres Seq. ID no. 12345912
  misc_feature (1)..(158): Homolog of NCBI NO: 20127062 NR Description: putative bHLH transcription factor [Arabidopsis
  misc_feature (1)..(158): Homolog of NCBI NO: 15238199 NR Description: bHLH protein
  misc_feature (1)..(161): Homolog of NCBI NO: 15228867 NR Description: putative protein; protein id: At3g56220.1
  misc_feature (1)..(162): Homolog of NCBI NO: 18405384 NR Description: unknown protein; protein id: At2g40435.1
  misc_feature (1)..(163): Homolog of NCBI NO: 22296306 NR Description: hypothetical protein~similar to Arabidopsis
MVSKEQNKRGALHEKLKILRSVTHSHAGDKVSIIADASSYIKELKQKIAKLSQEMASSSPQHATTGVCQQQRSSSSVSVGVLDKKGRFLVSVFMDESCGPPPAGLLASVLEAFDDIGLTVLEARATCAGSFRLEAVGEEVVDGGLIIDAHAVEQAVVQAIKNCPAN

SEQ ID NO: 3782 - protein, 112 aa, Zea mays subsp. mays
  peptide (1)..(112): Ceres Seq. ID no. 12345913
  misc_feature (1)..(104): Homolog of NCBI NO: 20127062 NR Description: putative bHLH transcription factor [Arabidopsis
  misc_feature (1)..(104): Homolog of NCBI NO: 15238199 NR Description: bHLH protein
  misc_feature (1)..(107): Homolog of NCBI NO: 15228867 NR Description: putative protein; protein id: At3g56220.1
  misc_feature (1)..(108): Homolog of NCBI NO: 18405384 NR Description: unknown protein; protein id: At2g40435.1
  misc_feature (1)..(109): Homolog of NCBI NO: 22296306 NR Description: hypothetical protein~similar to Arabidopsis
MASSSPQHATTGVCQQQRSSSSVSVGVLDKKGRFLVSVFMDESCGPPPAGLLASVLEAFDDIGLTVLEARATCAGSFRLEAVGEEVVDGGLIIDAHAVEQAVVQAIKNCPAN

SEQ ID NO: 3783 - DNA, 1032 bp, Zea mays subsp. mays
  misc_feature (1)..(1032): Ceres Seq. ID no. 12403846
  misc_feature: MA Experiment ID: 20000477 Result: Down-regulated in Transcription
  misc_feature: MA Experiment 20000477 PARAMETER Experiment Name: Zm_5mM_SA_P Parameter: Age (day) Value: 10
  misc_feature: MA Experiment 20000477 PARAMETER Experiment Name: Zm_5mM_SA_P Parameter: Organism Value: Zea mays
  misc_feature: MA Experiment 20000477 PARAMETER Experiment Name: Zm_5mM_SA_P Parameter: Plant Line Value: 35A19
  misc_feature: MA Experiment 20000477 PARAMETER Experiment Name: Zm_5mM_SA_P Parameter: Timepoint (hr) Value: 48
  misc_feature: MA Experiment 20000477 PARAMETER Experiment Name: Zm_5mM_SA_P Parameter: Tissue Value: Aerial
  misc_feature: MA Experiment 20000477 PARAMETER Experiment Name: Zm_5mM_SA_P Parameter: Treatment Value: 5mM SA vs. No Treatment
  misc_feature: MA Experiment ID: 20000478 Result: Down-regulated in Transcription
  misc_feature: MA Experiment 20000478 PARAMETER Experiment Name: Zm_5mM_SA_P Parameter: Age (day) Value: 11
  misc_feature: MA Experiment 20000478 PARAMETER Experiment Name: Zm_5mM_SA_P Parameter: Organism Value: Zea mays
  misc_feature: MA Experiment 20000478 PARAMETER Experiment Name: Zm_5mM_SA_P Parameter: Plant Line Value: 35A19
  misc_feature: MA Experiment 20000478 PARAMETER Experiment Name: Zm_5mM_SA_P Parameter: Timepoint (hr) Value: 72
  misc_feature: MA Experiment 20000478 PARAMETER Experiment Name: Zm_5mM_SA_P Parameter: Tissue Value: Aerial
  misc_feature: MA Experiment 20000478 PARAMETER Experiment Name: Zm_5mM_SA_P Parameter: Treatment Value: 5mM SA vs. No Treatment
  misc_feature: MA Experiment ID: 20000480 Result: Down-regulated in Transcription
  misc_feature: MA Experiment 20000480 PARAMETER Experiment Name: Zm_Drought_P Parameter: Age (day) Value: 11
  misc_feature: MA Experiment 20000480 PARAMETER Experiment Name: Zm_Drought_P Parameter: Organism Value: Zea mays
  misc_feature: MA Experiment 20000480 PARAMETER Experiment Name: Zm_Drought_P Parameter: Plant Line Value: 35A19
  misc_feature: MA Experiment 20000480 PARAMETER Experiment Name: Zm_Drought_P Parameter: Timepoint (hr) Value: 72
  misc_feature: MA Experiment 20000480 PARAMETER Experiment Name: Zm_Drought_P Parameter: Tissue Value: Aerial
  misc_feature: MA Experiment 20000480 PARAMETER Experiment Name: Zm_Drought_P Parameter: Treatment Value: Drought vs. No Drought
  misc_feature: MA Experiment ID: 20001613 Result: Down-regulated in Transcription
  misc_feature: MA Experiment 20001613 PARAMETER Experiment Name: Zm_50ppm_KNO3_L-to-H_P Parameter: Age (day) Value: 20
  misc_feature: MA Experiment 20001613 PARAMETER Experiment Name: Zm_50ppm_KNO3_L-to-H_P Parameter: Organism Value: Zea mays
  misc_feature: MA Experiment 20001613 PARAMETER Experiment Name: Zm_50ppm_KNO3_L-to-H_P Parameter: Plant Line Value: 35A19
  misc_feature: MA Experiment 20001613 PARAMETER Experiment Name: Zm_50ppm_KNO3_L-to-H_P Parameter: Timepoint (hr) Value: 24
  misc_feature: MA Experiment 20001613 PARAMETER Experiment Name: Zm_50ppm_KNO3_L-to-H_P Parameter: Tissue Value: Roots
  misc_feature: MA Experiment 20001613 PARAMETER Experiment Name: Zm_50ppm_KNO3_L-to-H_P Parameter: Treatment Value: 50ppm KNO3 vs. 50ppm KCl
  misc_feature: MA Experiment ID: 20001614 Result: Down-regulated in Transcription
  misc_feature: MA Experiment 20001614 PARAMETER Experiment Name: Zm_50ppm_KNO3_L-to-H_P Parameter: Age (day) Value: 21
  misc_feature: MA Experiment 20001614 PARAMETER Experiment Name: Zm_50ppm_KNO3_L-to-H_P Parameter: Organism Value: Zea mays
  misc_feature: MA Experiment 20001614 PARAMETER Experiment Name: Zm_50ppm_KNO3_L-to-H_P Parameter: Plant Line Value: 35A19
  misc_feature: MA Experiment 20001614 PARAMETER Experiment Name: Zm_50ppm_KNO3_L-to-H_P Parameter: Timepoint (hr) Value: 48
  misc_feature: MA Experiment 20001614 PARAMETER Experiment Name: Zm_50ppm_KNO3_L-to-H_P Parameter: Tissue Value: Roots
  misc_feature: MA Experiment 20001614 PARAMETER Experiment Name: Zm_50ppm_KNO3_L-to-H_P Parameter: Treatment Value: 50ppm KNO3 vs. 50ppm KCl
gcacgagaccattacctagaacatcctaatcgaaaaccaccacatctaatccttcctcccagctggtccctgcggccgctgctgctcgtccctacaagtatatcaaccaacagtgctcacatcatgcactctgtggtgtcttggtagtagttgttggggtagctagctagagagagcagcaggccagcacagcagcatggggaggtcgccgtgctgcgagaaggcgcacacgaacaagggcgcctggaccaaggaggaggaccagcggctcgtcgcctacatcaaggcccacggcgaaggctgctggaggtcgctccccaaggccgcgggcctgctgcgctgcggcaagagctgccgcctccggtggatcaactacctgcgccccgacctcaagcgcggcaacttcacccaggaggaggacgacgtcatcatcaagctccaccaggtcctcggaaacaagtggtcgctgatcgccgcccagctgccggggcggacggacaacgagatcaagaactactggaacacgcacatcaagcgcaagctcatcgcccggggcatcgacccacggacgcaccagccggcgagtgccgccgcagttgcccccgccgccgccgcgcaaagcagctttcgccaccatggcgacgacgaggcggtggcgcggcgcagctgctcgcgagacagcggctgcatcgcggcgcacagcagcgacgacgacgacagcacgtccgggtccctgccacaccaacatgctgtcggcggcatcgacctcaacctctcgctaagcccaccgacgagccaaccgtcatcgccggccgccgccaagggagttgtagctagcggatatggccaagggagtgagagctagctgtacctcctctgcactgccacgatgatggttgtcaattgttgttagctcctcctcctcgtcttatgttcttccatgcaggccggaagatcctaaagagaacgtgtgcgtgcgtgtgagaattaaactcgtgtctgttgttcgatcgggcgctctaagatttggcc

SEQ ID NO: 3784 - protein, 222 aa, Zea mays subsp. mays
  peptide (1)..(222): Ceres Seq. ID no. 12403847
  misc_feature (14)..(61): Pfam Name: Myb-like DNA-binding domain Pfam Description: Myb-like DNA-binding domain
  misc_feature (1)..(133): Homolog of NCBI NO: 19072748 NR Description: typical P-type R2R3 Myb protein [Zea mays]
  misc_feature (1)..(157): Homolog of NCBI NO: 23476279 NR Description: myb-like transcription factor 1 [Gossypium
  misc_feature (1)..(133): Homolog of NCBI NO: 19072766 NR Description: typical P-type R2R3 Myb protein [Oryza sativa]
  misc_feature (1)..(157): Homolog of NCBI NO: 7438345 NR Description: myb-related protein A - upland cotton
  misc_feature (1)..(216): Homolog of NCBI NO: 82310 NR Description: myb-related protein 330 - garden snapdragon
  misc_feature (1)..(209): Homolog of NCBI NO: 13346194 NR Description: GHMYB9 [Gossypium hirsutum]
  misc_feature (1)..(215): Homolog of NCBI NO: 7438344 NR Description: myb-related protein 1 - rice
  misc_feature (1)..(204): Homolog of NCBI NO: 421983 NR Description: myb-related protein 2 - barley
  misc_feature (125)..(222): Homolog of NCBI NO: 34907282 NR Description: putative myb-related protein
  misc_feature (1)..(139): Homolog of NCBI NO: 34907282 NR Description: putative myb-related protein
MGRSPCCEKAHTNKGAWTKEEDQRLVAYIKAHGEGCWRSLPKAAGLLRCGKSCRLRWINYLRPDLKRGNFTQEEDDVIIKLHQVLGNKWSLIAAQLPGRTDNEIKNYWNTHIKRKLIARGIDPRTHQPASAAAVAPAAAAQSSFRHHGDDEAVARRSCSRDSGCIAAHSSDDDDSTSGSLPHQHAVGGIDLNLSLSPPTSQPSSPAAAKGVVASGYGQGSES

SEQ ID NO: 3785 - DNA, 1152 bp, Zea mays subsp. mays
  misc_feature (1)..(1152): Ceres Seq. ID no. 12362891
  misc_feature: MA Experiment ID: 108504 Result: Up-regulated in Transcription
  misc_feature: MA Experiment 108504 PARAMETER Experiment Name: Zm_Drought_P Parameter: Age (day) Value: 8
  misc_feature: MA Experiment 108504 PARAMETER Experiment Name: Zm_Drought_P Parameter: Organism Value: Zea mays
  misc_feature: MA Experiment 108504 PARAMETER Experiment Name: Zm_Drought_P Parameter: Plant Line Value: 35A19
  misc_feature: MA Experiment 108504 PARAMETER Experiment Name: Zm_Drought_P Parameter: Timepoint (hr) Value: 12
  misc_feature: MA Experiment 108504 PARAMETER Experiment Name: Zm_Drought_P Parameter: Tissue Value: Aerial
  misc_feature: MA Experiment 108504 PARAMETER Experiment Name: Zm_Drought_P Parameter: Treatment Value: Drought vs. No Drought
  misc_feature: MA Experiment ID: 108513 Result: Up-regulated in Transcription
  misc_feature: MA Experiment 108513 PARAMETER Experiment Name: Zm_100uM_ABA_P Parameter: Age (day) Value: 8
  misc_feature: MA Experiment 108513 PARAMETER Experiment Name: Zm_100uM_ABA_P Parameter: Organism Value: Zea mays
  misc_feature: MA Experiment 108513 PARAMETER Experiment Name: Zm_100uM_ABA_P Parameter: Plant Line Value: 35A19
  misc_feature: MA Experiment 108513 PARAMETER Experiment Name: Zm_100uM_ABA_P Parameter: Timepoint (hr) Value: 6
  misc_feature: MA Experiment 108513 PARAMETER Experiment Name: Zm_100uM_ABA_P Parameter: Tissue Value: Aerial
  misc_feature: MA Experiment 108513 PARAMETER Experiment Name: Zm_100uM_ABA_P Parameter: Treatment Value: 100uM ABA vs. No Treatment
  misc_feature: MA Experiment ID: 108522 Result: Up-regulated in Transcription
  misc_feature: MA Experiment 108522 PARAMETER Experiment Name: Zm_42deg_Heat_P Parameter: Age (day) Value: 8
  misc_feature: MA Experiment 108522 PARAMETER Experiment Name: Zm_42deg_Heat_P Parameter: Organism Value: Zea mays
  misc_feature: MA Experiment 108522 PARAMETER Experiment Name: Zm_42deg_Heat_P Parameter: Plant Line Value: 35A19
  misc_feature: MA Experiment 108522 PARAMETER Experiment Name: Zm_42deg_Heat_P Parameter: Temperature (deg C) Value: 42 vs. 22
  misc_feature: MA Experiment 108522 PARAMETER Experiment Name: Zm_42deg_Heat_P Parameter: Timepoint (hr) Value: 1
  misc_feature: MA Experiment 108522 PARAMETER Experiment Name: Zm_42deg_Heat_P Parameter: Tissue Value: Aerial
  misc_feature: MA Experiment ID: 108528 Result: Down-regulated in Transcription
  misc_feature: MA Experiment 108528 PARAMETER Experiment Name: Zm_Imbibed_Seeds_P Parameter: Age (day) Value: 5 vs. 2
  misc_feature: MA Experiment 108528 PARAMETER Experiment Name: Zm_Imbibed_Seeds_P Parameter: Organism Value: Zea mays
  misc_feature: MA Experiment 108528 PARAMETER Experiment Name: Zm_Imbibed_Seeds_P Parameter: Plant Line Value: 35A19
  misc_feature: MA Experiment 108528 PARAMETER Experiment Name: Zm_Imbibed_Seeds_P Parameter: Tissue Value: Aerial vs. Embryo
  misc_feature: MA Experiment ID: 108530 Result: Down-regulated in Transcription
  misc_feature: MA Experiment 108530 PARAMETER Experiment Name: Zm_Imbibed_Seeds_P Parameter: Age (day) Value: 6 vs. 2
  misc_feature: MA Experiment 108530 PARAMETER Experiment Name: Zm_Imbibed_Seeds_P Parameter: Organism Value: Zea mays
  misc_feature: MA Experiment 108530 PARAMETER Experiment Name: Zm_Imbibed_Seeds_P Parameter: Plant Line Value: 35A19
  misc_feature: MA Experiment 108530 PARAMETER Experiment Name: Zm_Imbibed_Seeds_P Parameter: Tissue Value: Aerial vs. Embryo
  misc_feature: MA Experiment ID: 108535 Result: Down-regulated in Transcription
  misc_feature: MA Experiment 108535 PARAMETER Experiment Name: Zm_Meristem_P Parameter: Age (day) Value: 8
  misc_feature: MA Experiment 108535 PARAMETER Experiment Name: Zm_Meristem_P Parameter: Organism Value: Zea mays
  misc_feature: MA Experiment 108535 PARAMETER Experiment Name: Zm_Meristem_P Parameter: Plant Line Value: 35A19
  misc_feature: MA Experiment 108535 PARAMETER Experiment Name: Zm_Meristem_P Parameter: Tissue Value: Root Meristem vs. Above Root Meristem
  misc_feature: MA Experiment ID: 108540 Result: Up-regulated in Transcription
  misc_feature: MA Experiment 108540 PARAMETER Experiment Name: Zm_20percent_PEG_P Parameter: Age (day) Value: 8
  misc_feature: MA Experiment 108540 PARAMETER Experiment Name: Zm_20percent_PEG_P Parameter: Organism Value: Zea mays
  misc_feature: MA Experiment 108540 PARAMETER Experiment Name: Zm_20percent_PEG_P Parameter: Plant Line Value: 35A19
  misc_feature: MA Experiment 108540 PARAMETER Experiment Name: Zm_20percent_PEG_P Parameter: Timepoint (hr) Value: 6
  misc_feature: MA Experiment 108540 PARAMETER Experiment Name: Zm_20percent_PEG_P Parameter: Tissue Value: Aerial
  misc_feature: MA Experiment 108540 PARAMETER Experiment Name: Zm_20percent_PEG_P Parameter: Treatment Value: 20percent PEG vs. No Treatment
  misc_feature: MA Experiment ID: 108542 Result: Up-regulated in Transcription
  misc_feature: MA Experiment 108542 PARAMETER Experiment Name: Zm_150mM_NaCl_P Parameter: Age (day) Value: 8
  misc_feature: MA Experiment 108542 PARAMETER Experiment Name: Zm_150mM_NaCl_P Parameter: Organism Value: Zea mays
  misc_feature: MA Experiment 108542 PARAMETER Experiment Name: Zm_150mM_NaCl_P Parameter: Plant Line Value: 35A19
  misc_feature: MA Experiment 108542 PARAMETER Experiment Name: Zm_150mM_NaCl_P Parameter: Timepoint (hr) Value: 6
  misc_feature: MA Experiment 108542 PARAMETER Experiment Name: Zm_150mM_NaCl_P Parameter: Tissue Value: Aerial
  misc_feature: MA Experiment 108542 PARAMETER Experiment Name: Zm_150mM_NaCl_P Parameter: Treatment Value: 150mM NaCl vs. No Treatment
  misc_feature: MA Experiment ID: 108544 Result: Up-regulated in Transcription
  misc_feature: MA Experiment ID: 108556 Result: Up-regulated in Transcription
  misc_feature: MA Experiment 108556 PARAMETER Experiment Name: Zm_Drought_P Parameter: Age (day) Value: 9
  misc_feature: MA Experiment 108556 PARAMETER Experiment Name: Zm_Drought_P Parameter: Organism Value: Zea mays
  misc_feature: MA Experiment 108556 PARAMETER Experiment Name: Zm_Drought_P Parameter: Plant Line Value: 35A19
  misc_feature: MA Experiment 108556 PARAMETER Experiment Name: Zm_Drought_P Parameter: Timepoint (hr) Value: 24
  misc_feature: MA Experiment 108556 PARAMETER Experiment Name: Zm_Drought_P Parameter: Tissue Value: Aerial
  misc_feature: MA Experiment 108556 PARAMETER Experiment Name: Zm_Drought_P Parameter: Treatment Value: Drought vs. No Drought
  misc_feature: MA Experiment ID: 108559 Result: Up-regulated in Transcription
  misc_feature: MA Experiment 108559 PARAMETER Experiment Name: Zm_5mM_NO_P Parameter: Age (day) Value: 8
  misc_feature: MA Experiment 108559 PARAMETER Experiment Name: Zm_5mM_NO_P Parameter: Organism Value: Zea mays
  misc_feature: MA Experiment 108559 PARAMETER Experiment Name: Zm_5mM_NO_P Parameter: Plant Line Value: 35A19
  misc_feature: MA Experiment 108559 PARAMETER Experiment Name: Zm_5mM_NO_P Parameter: Timepoint (hr) Value: 12
  misc_feature: MA Experiment 108559 PARAMETER Experiment Name: Zm_5mM_NO_P Parameter: Tissue Value: Aerial
  misc_feature: MA Experiment 108559 PARAMETER Experiment Name: Zm_5mM_NO_P Parameter: Treatment Value: 5mM NO vs. No Treatment
  misc_feature: MA Experiment ID: 108687 Result: Up-regulated in Transcription
  misc_feature: MA Experiment 108687 PARAMETER Experiment Name: Zm_Embryos-Flowers__P Parameter: Tissue Value: Embryo vs. Aerial+
  misc_feature: MA Experiment ID: 20000477 Result: Up-regulated in Transcription
  misc_feature: MA Experiment 20000477 PARAMETER Experiment Name: Zm_5mM_SA_P Parameter: Age (day) Value: 10
  misc_feature: MA Experiment 20000477 PARAMETER Experiment Name: Zm_5mM_SA_P Parameter: Organism Value: Zea mays
  misc_feature: MA Experiment 20000477 PARAMETER Experiment Name: Zm_5mM_SA_P Parameter: Plant Line Value: 35A19
  misc_feature: MA Experiment 20000477 PARAMETER Experiment Name: Zm_5mM_SA_P Parameter: Timepoint (hr) Value: 48
  misc_feature: MA Experiment 20000477 PARAMETER Experiment Name: Zm_5mM_SA_P Parameter: Tissue Value: Aerial
  misc_feature: MA Experiment 20000477 PARAMETER Experiment Name: Zm_5mM_SA_P Parameter: Treatment Value: 5mM SA vs. No Treatment
  misc_feature: MA Experiment ID: 20000478 Result: Up-regulated in Transcription
  misc_feature: MA Experiment 20000478 PARAMETER Experiment Name: Zm_5mM_SA_P Parameter: Age (day) Value: 11
  misc_feature: MA Experiment 20000478 PARAMETER Experiment Name: Zm_5mM_SA_P Parameter: Organism Value: Zea mays
  misc_feature: MA Experiment 20000478 PARAMETER Experiment Name: Zm_5mM_SA_P Parameter: Plant Line Value: 35A19
  misc_feature: MA Experiment 20000478 PARAMETER Experiment Name: Zm_5mM_SA_P Parameter: Timepoint (hr) Value: 72
  misc_feature: MA Experiment 20000478 PARAMETER Experiment Name: Zm_5mM_SA_P Parameter: Tissue Value: Aerial
  misc_feature: MA Experiment 20000478 PARAMETER Experiment Name: Zm_5mM_SA_P Parameter: Treatment Value: 5mM SA vs. No Treatment
  misc_feature: MA Experiment ID: 20000480 Result: Up-regulated in Transcription
  misc_feature: MA Experiment 20000480 PARAMETER Experiment Name: Zm_Drought_P Parameter: Age (day) Value: 11
  misc_feature: MA Experiment 20000480 PARAMETER Experiment Name: Zm_Drought_P Parameter: Organism Value: Zea mays
  misc_feature: MA Experiment 20000480 PARAMETER Experiment Name: Zm_Drought_P Parameter: Plant Line Value: 35A19
  misc_feature: MA Experiment 20000480 PARAMETER Experiment Name: Zm_Drought_P Parameter: Timepoint (hr) Value: 72
  misc_feature: MA Experiment 20000480 PARAMETER Experiment Name: Zm_Drought_P Parameter: Tissue Value: Aerial
  misc_feature: MA Experiment 20000480 PARAMETER Experiment Name: Zm_Drought_P Parameter: Treatment Value: Drought vs. No Drought
  misc_feature: MA Experiment ID: 20000492 Result: Down-regulated in Transcription
  misc_feature: MA Experiment 20000492 PARAMETER Experiment Name: Zm_Hybrid_Seed_Dev_P Parameter: DAP Value: 12
  misc_feature: MA Experiment 20000492 PARAMETER Experiment Name: Zm_Hybrid_Seed_Dev_P Parameter: Organism Value: Zea mays
  misc_feature: MA Experiment 20000492 PARAMETER Experiment Name: Zm_Hybrid_Seed_Dev_P Parameter: Plant Line Value: 35A19
  misc_feature: MA Experiment 20000492 PARAMETER Experiment Name: Zm_Hybrid_Seed_Dev_P Parameter: Tissue Value: Fert Kernel vs. Unfert Floret
  misc_feature: MA Experiment ID: 20000534 Result: Down-regulated in Transcription
  misc_feature: MA Experiment 20000534 PARAMETER Experiment Name: Zm_Hybrid_Pollen_P Parameter: Age (day) Value: 8
  misc_feature: MA Experiment 20000534 PARAMETER Experiment Name: Zm_Hybrid_Pollen_P Parameter: Organism Value: Zea mays
  misc_feature: MA Experiment 20000534 PARAMETER Experiment Name: Zm_Hybrid_Pollen_P Parameter: Plant Line Value: 35A19
  misc_feature: MA Experiment 20000534 PARAMETER Experiment Name: Zm_Hybrid_Pollen_P Parameter: Tissue Value: Pollen vs. Aerial
  misc_feature: MA Experiment ID: 20000535 Result: Up-regulated in Transcription
  misc_feature: MA Experiment 20000535 PARAMETER Experiment Name: Zm_Hybrid_Seed_Dev_P Parameter: DAP Value: 30 vs. 12
  misc_feature: MA Experiment 20000535 PARAMETER Experiment Name: Zm_Hybrid_Seed_Dev_P Parameter: Organism Value: Zea mays
  misc_feature: MA Experiment 20000535 PARAMETER Experiment Name: Zm_Hybrid_Seed_Dev_P Parameter: Plant Line Value: 35A19
  misc_feature: MA Experiment 20000535 PARAMETER Experiment Name: Zm_Hybrid_Seed_Dev_P Parameter: Tissue Value: Embryo vs. Unfert Floret
atatatctttttctccccaagaaaaaaaaggcggcgagagcataagaaaaaaacacacacacacacacacacacaaagcgcacttttcaaatcgacaaaggggaaaggttcgcttcttctcgcatcttgctttacttcgagtgccatggccgatccggcggaggagaacgttgtctcgccgccaccgacccctgcggccccagccgtgggcgcctcagactcgcccctgcagcctgttgctgacggcgcctcaacggagaaggtgtctgccccggcgccggaggtaaggtcccggggattcaggcttcttggagaggacacttccgtgcacaaatcccttgggggcggtaaaactgctgacgttctgttatggaaagacaagaaaacttctgctgttgtaataggcggcgcaactgtcatctgggttctgttcgaagtgcttgattaccacctcctgaccctgatatcccatgtactgattggtgtgcttgccaccttattcctgtggtccaaagcaaccacgttcatcaagaagagtccaccggatattccagtagtgcaggtatctgaggaccttgttgtgaatgtttcacgggcattacggaatgacatcaacagagcgcttcacttgttccgtgagatcgcaatggggcatgatctgaagaagtttttgggtgtgatcgtgggtctgtgggttctctccggagttggaagcagctgtgacttcctcacgttgacatacattgccgtcctgatgctccacacggtgccaatcttgtacgacaagtaccaggacaaggtggaccatgtcgctggaagggcacacaccgaggccctcaagcagtacaaggtgctggatgccaaggtcctgagcaaaatccccaggggtgcggtcaaatccaaaaagcagaactagttaggataagccgcagattgtgaatgcccgtatcatgagtatcgggcttgtggtttgcatggcatatgtaaatctgtctgttggcttcagcttggttcttctgcgactactttgttgatgttattatagtcctatgtatgtactgtgtacatgacagatgttcggacgtctcggctactgctgtagcttgtaaattccagtggtgcgttgctaagcacgatgctccccttgttttg

SEQ ID NO: 3786 - protein, 304 aa, Zea mays subsp. mays
  peptide (1)..(304): Ceres Seq. ID no. 12362892
  misc_feature (86)..(301): Homolog of NCBI NO: 18406991 NR Description: expressed protein
  misc_feature (70)..(302): Homolog of NCBI NO: 34909318 NR Description: OSJNBb0021A09.5 [Oryza sativa (japonica
  misc_feature (85)..(304): Homolog of NCBI NO: 15236556 NR Description: putative protein
  misc_feature (73)..(304): Homolog of NCBI NO: 15237093 NR Description: putative protein
  misc_feature (46)..(302): Homolog of NCBI NO: 34904202 NR Description: P0492F05.25 [Oryza sativa (japonica
  misc_feature (95)..(303): Homolog of NCBI NO: 18398810 NR Description: expressed protein
  misc_feature (68)..(304): Homolog of NCBI NO: 34899590 NR Description: hypothetical protein~similar to Oryza sativa
  misc_feature (101)..(302): Homolog of NCBI NO: 34897094 NR Description: unknown protein [Oryza sativa (japonica
  misc_feature (70)..(302): Homolog of NCBI NO: 15238125 NR Description: putative protein
  misc_feature (95)..(297): Homolog of NCBI NO: 15222616 NR Description: hypothetical protein
YIFFSPRKKRRREHKKKTHTHTHTQSALFKSTKGKGSLLLASCFTSSAMADPAEENVVSPPPTPAAPAVGASDSPLQPVADGASTEKVSAPAPEVRSRGFRLLGEDTSVHKSLGGGKTADVLLWKDKKTSAVVIGGATVIWVLFEVLDYHLLTLISHVLIGVLATLFLWSKATTFIKKSPPDIPVVQVSEDLVVNVSRALRNDINRALHLFREIAMGHDLKKFLGVIVGLWVLSGVGSSCDFLTLTYIAVLMLHTVPILYDKYQDKVDHVAGRAHTEALKQYKVLDAKVLSKIPRGAVKSKKQN

SEQ ID NO: 3787 - protein, 256 aa, Zea mays subsp. mays
  peptide (1)..(256): Ceres Seq. ID no. 12362893
  misc_feature (47)..(255): Homolog of NCBI NO: 18398810 NR Description: expressed protein
  misc_feature (20)..(256): Homolog of NCBI NO: 34899590 NR Description: hypothetical protein~similar to Oryza sativa
  misc_feature (53)..(254): Homolog of NCBI NO: 34897094 NR Description: unknown protein [Oryza sativa (japonica
  misc_feature (22)..(254): Homolog of NCBI NO: 15238125 NR Description: putative protein
  misc_feature (47)..(249): Homolog of NCBI NO: 15222616 NR Description: hypothetical protein
  misc_feature (38)..(253): Homolog of NCBI NO: 18406991 NR Description: expressed protein
  misc_feature (22)..(254): Homolog of NCBI NO: 34909318 NR Description: OSJNBb0021A09.5 [Oryza sativa (japonica
  misc_feature (37)..(256): Homolog of NCBI NO: 15236556 NR Description: putative protein
  misc_feature (25)..(256): Homolog of NCBI NO: 15237093 NR Description: putative protein
  misc_feature (1)..(254): Homolog of NCBI NO: 34904202 NR Description: P0492F05.25 [Oryza sativa (japonica
MADPAEENVVSPPPTPAAPAVGASDSPLQPVADGASTEKVSAPAPEVRSRGFRLLGEDTSVHKSLGGGKTADVLLWKDKKTSAVVIGGATVIWVLFEVLDYHLLTLISHVLIGVLATLFLWSKATTFIKKSPPDIPVVQVSEDLVVNVSRALRNDINRALHLFREIAMGHDLKKFLGVIVGLWVLSGVGSSCDFLTLTYIAVLMLHTVPILYDKYQDKVDHVAGRAHTEALKQYKVLDAKVLSKIPRGAVKSKKQN

SEQ ID NO: 3788 - DNA, 1075 bp, Zea mays subsp. mays
  misc_feature (1)..(1075): Ceres Seq. ID no. 12372530
  misc_feature: MA Experiment ID: 20000534 Result: Down-regulated in Transcription
  misc_feature: MA Experiment 20000534 PARAMETER Experiment Name: Zm_Hybrid_Pollen_P Parameter: Age (day) Value: 8
  misc_feature: MA Experiment 20000534 PARAMETER Experiment Name: Zm_Hybrid_Pollen_P Parameter: Organism Value: Zea mays
  misc_feature: MA Experiment 20000534 PARAMETER Experiment Name: Zm_Hybrid_Pollen_P Parameter: Plant Line Value: 35A19
  misc_feature: MA Experiment 20000534 PARAMETER Experiment Name: Zm_Hybrid_Pollen_P Parameter: Tissue Value: Pollen vs. Aerial
aaacccataaaaaatactgtattttccaaccaagccactcgcccgaccttcatccgcattccacgcgcactccgctgcctcactccgagactccgccgctgcttccaacttccgttgcgcacgagcgaaacatccggagctagcaagggaggaggaggaggaggcgatggcggggggcggggataaggtggactacgtcttcaaggtggtgctcatcggcgactccgctgtcggcaagtcgcagatccttgcgcgcttcgcccgcaacgagtttagcctcgactcgaaggccaccattggggtcgagttccagactcggacgctcgtcatcgaacacaagtccgtcaaggcgcagatctgggacaccgccgggcaggagaggtatagagctgtcacaagtgcctactacagaggtgctttgggagctctgctagtctatgatatcacaaaacgccagagcttcgaccacatacctcgctggctggaagagcttcggggccatgctgacaaaaacattgtgatcatgctggttggcaacaagagcgacctcgaagacgagcgtgccgtaagcaccgaggacgccaaggagtttgccgagaaggagaacctcttcttccttgagacctccgcgctgcaggcgaccaatgtagaaaatgccttccagaccgtcttgacagagatctttaagatccacagcaagaagaacatggcagcggacccaagggccaatggggccgcaccatcgctggcagggaagaaggtcatcgtcccaggcccagctcaggagatccctaagagcaagtgctgcagttccatgtgacatgttgcctgaattttatttgggtttgttcgtgtccgaggtattctcagcatctttgtggatgtataatactggaataggcttagatttgaattgctggttaacttgattttcggttttgaagggaccgatatcgtagtttagatttgtcacccgtcttcaagatgacgaggatagggagcgagaagaaaacatatgtttgcatagactttgttggattttacaaaaatagcagtgtaagcacattattttttc

SEQ ID NO: 3789 - protein, 217 aa, Zea mays subsp. mays
  peptide (1)..(217): Ceres Seq. ID no. 12372531
  misc_feature (13)..(173): Pfam Name: Ras family Pfam Description: Ras family
  misc_feature (1)..(216): Homolog of NCBI NO: 3024500 NR Description: RAS-RELATED PROTEIN RAB11A
  misc_feature (1)..(216): Homolog of NCBI NO: 7438430 NR Description: GTP-binding protein - garden pea
  misc_feature (1)..(216): Homolog of NCBI NO: 3024503 NR Description: RAS-RELATED PROTEIN RAB11C
  misc_feature (1)..(216): Homolog of NCBI NO: 3024505 NR Description: RAS-RELATED PROTEIN RAB11D
  misc_feature (4)..(217): Homolog of NCBI NO: 37533688 NR Description: putative Ras-related protein Rab
MAGGGDKVDYVFKVVLIGDSAVGKSQILARFARNEFSLDSKATIGVEFQTRTLVIEHKSVKAQIWDTAGQERYRAVTSAYYRGALGALLVYDITKRQSFDHIPRWLEELRGHADKNIVIMLVGNKSDLEDERAVSTEDAKEFAEKENLFFLETSALQATNVENAFQTVLTEIFKIHSKKNMAADPRANGAAPSLAGKKVIVPGPAQEIPKSKCCSSM

SEQ ID NO: 3790 - DNA, 777 bp, Zea mays subsp. mays
  misc_feature (1)..(777): Ceres Seq. ID no. 12342769
  misc_feature: MA Experiment ID: 108527 Result: Down-regulated in Transcription
  misc_feature: MA Experiment 108527 PARAMETER Experiment Name: Zm_5mM_NO_P Parameter: Age (day) Value: 8
  misc_feature: MA Experiment 108527 PARAMETER Experiment Name: Zm_5mM_NO_P Parameter: Organism Value: Zea mays
  misc_feature: MA Experiment 108527 PARAMETER Experiment Name: Zm_5mM_NO_P Parameter: Plant Line Value: 35A19
  misc_feature: MA Experiment 108527 PARAMETER Experiment Name: Zm_5mM_NO_P Parameter: Timepoint (hr) Value: 6
  misc_feature: MA Experiment 108527 PARAMETER Experiment Name: Zm_5mM_NO_P Parameter: Tissue Value: Aerial
  misc_feature: MA Experiment 108527 PARAMETER Experiment Name: Zm_5mM_NO_P Parameter: Treatment Value: 5mM NO vs. No Treatment
  misc_feature: MA Experiment ID: 108528 Result: Up-regulated in Transcription
  misc_feature: MA Experiment 108528 PARAMETER Experiment Name: Zm_Imbibed_Seeds_P Parameter: Age (day) Value: 5 vs. 2
  misc_feature: MA Experiment 108528 PARAMETER Experiment Name: Zm_Imbibed_Seeds_P Parameter: Organism Value: Zea mays
  misc_feature: MA Experiment 108528 PARAMETER Experiment Name: Zm_Imbibed_Seeds_P Parameter: Plant Line Value: 35A19
  misc_feature: MA Experiment 108528 PARAMETER Experiment Name: Zm_Imbibed_Seeds_P Parameter: Tissue Value: Aerial vs. Embryo
  misc_feature: MA Experiment ID: 108529 Result: Down-regulated in Transcription
  misc_feature: MA Experiment 108529 PARAMETER Experiment Name: Zm_Imbibed_Seeds_P Parameter: Age (day) Value: 5 vs. 2
  misc_feature: MA Experiment 108529 PARAMETER Experiment Name: Zm_Imbibed_Seeds_P Parameter: Organism Value: Zea mays
  misc_feature: MA Experiment 108529 PARAMETER Experiment Name: Zm_Imbibed_Seeds_P Parameter: Plant Line Value: 35A19
  misc_feature: MA Experiment 108529 PARAMETER Experiment Name: Zm_Imbibed_Seeds_P Parameter: Tissue Value: Roots vs. Embryo
  misc_feature: MA Experiment ID: 108530 Result: Up-regulated in Transcription
  misc_feature: MA Experiment 108530 PARAMETER Experiment Name: Zm_Imbibed_Seeds_P Parameter: Age (day) Value: 6 vs. 2
  misc_feature: MA Experiment 108530 PARAMETER Experiment Name: Zm_Imbibed_Seeds_P Parameter: Organism Value: Zea mays
  misc_feature: MA Experiment 108530 PARAMETER Experiment Name: Zm_Imbibed_Seeds_P Parameter: Plant Line Value: 35A19
  misc_feature: MA Experiment 108530 PARAMETER Experiment Name: Zm_Imbibed_Seeds_P Parameter: Tissue Value: Aerial vs. Embryo
  misc_feature: MA Experiment ID: 108535 Result: Down-regulated in Transcription
  misc_feature: MA Experiment 108535 PARAMETER Experiment Name: Zm_Meristem_P Parameter: Age (day) Value: 8
  misc_feature: MA Experiment 108535 PARAMETER Experiment Name: Zm_Meristem_P Parameter: Organism Value: Zea mays
  misc_feature: MA Experiment 108535 PARAMETER Experiment Name: Zm_Meristem_P Parameter: Plant Line Value: 35A19
  misc_feature: MA Experiment 108535 PARAMETER Experiment Name: Zm_Meristem_P Parameter: Tissue Value: Root Meristem vs. Above Root Meristem
  misc_feature: MA Experiment ID: 108536 Result: Down-regulated in Transcription
  misc_feature: MA Experiment 108536 PARAMETER Experiment Name: Zm_Meristem_P Parameter: Age (day) Value: 8
  misc_feature: MA Experiment 108536 PARAMETER Experiment Name: Zm_Meristem_P Parameter: Organism Value: Zea mays
  misc_feature: MA Experiment 108536 PARAMETER Experiment Name: Zm_Meristem_P Parameter: Plant Line Value: 35A19
  misc_feature: MA Experiment 108536 PARAMETER Experiment Name: Zm_Meristem_P Parameter: Tissue Value: Shoot Meristem vs. Above Shoot Meristem
  misc_feature: MA Experiment ID: 108543 Result: Up-regulated in Transcription
  misc_feature: MA Experiment ID: 108545 Result: Up-regulated in Transcription
  misc_feature: MA Experiment 108545 PARAMETER Experiment Name: Zm_Imbibed_Seeds_P Parameter: Age (day) Value: 3 vs. 2
  misc_feature: MA Experiment 108545 PARAMETER Experiment Name: Zm_Imbibed_Seeds_P Parameter: Organism Value: Zea mays
  misc_feature: MA Experiment 108545 PARAMETER Experiment Name: Zm_Imbibed_Seeds_P Parameter: Plant Line Value: 35A19
  misc_feature: MA Experiment 108545 PARAMETER Experiment Name: Zm_Imbibed_Seeds_P Parameter: Tissue Value: Aerial vs. Embryo
  misc_feature: MA Experiment ID: 108546 Result: Down-regulated in Transcription
  misc_feature: MA Experiment 108546 PARAMETER Experiment Name: Zm_Imbibed_Seeds_P Parameter: Age (day) Value: 3 vs. 2
  misc_feature: MA Experiment 108546 PARAMETER Experiment Name: Zm_Imbibed_Seeds_P Parameter: Organism Value: Zea mays
  misc_feature: MA Experiment 108546 PARAMETER Experiment Name: Zm_Imbibed_Seeds_P Parameter: Plant Line Value: 35A19
  misc_feature: MA Experiment 108546 PARAMETER Experiment Name: Zm_Imbibed_Seeds_P Parameter: Tissue Value: Roots vs. Embryo
  misc_feature: MA Experiment ID: 108547 Result: Up-regulated in Transcription
  misc_feature: MA Experiment 108547 PARAMETER Experiment Name: Zm_Imbibed_Seeds_P Parameter: Age (day) Value: 4 vs. 2
  misc_feature: MA Experiment 108547 PARAMETER Experiment Name: Zm_Imbibed_Seeds_P Parameter: Organism Value: Zea mays
  misc_feature: MA Experiment 108547 PARAMETER Experiment Name: Zm_Imbibed_Seeds_P Parameter: Plant Line Value: 35A19
  misc_feature: MA Experiment 108547 PARAMETER Experiment Name: Zm_Imbibed_Seeds_P Parameter: Tissue Value: Aerial vs. Embryo
  misc_feature: MA Experiment ID: 108559 Result: Down-regulated in Transcription
  misc_feature: MA Experiment 108559 PARAMETER Experiment Name: Zm_5mM_NO_P Parameter: Age (day) Value: 8
  misc_feature: MA Experiment 108559 PARAMETER Experiment Name: Zm_5mM_NO_P Parameter: Organism Value: Zea mays
  misc_feature: MA Experiment 108559 PARAMETER Experiment Name: Zm_5mM_NO_P Parameter: Plant Line Value: 35A19
  misc_feature: MA Experiment 108559 PARAMETER Experiment Name: Zm_5mM_NO_P Parameter: Timepoint (hr) Value: 12
  misc_feature: MA Experiment 108559 PARAMETER Experiment Name: Zm_5mM_NO_P Parameter: Tissue Value: Aerial
  misc_feature: MA Experiment 108559 PARAMETER Experiment Name: Zm_5mM_NO_P Parameter: Treatment Value: 5mM NO vs. No Treatment
  misc_feature: MA Experiment ID: 108687 Result: Down-regulated in Transcription
  misc_feature: MA Experiment 108687 PARAMETER Experiment Name: Zm_Embryos-Flowers__P Parameter: Tissue Value: Embryo vs. Aerial+
  misc_feature: MA Experiment ID: 108689 Result: Down-regulated in Transcription
  misc_feature: MA Experiment 108689 PARAMETER Experiment Name: Zm_Drought_Roots_P Parameter: Age (day) Value: 9
  misc_feature: MA Experiment 108689 PARAMETER Experiment Name: Zm_Drought_Roots_P Parameter: Organism Value: Zea mays
  misc_feature: MA Experiment 108689 PARAMETER Experiment Name: Zm_Drought_Roots_P Parameter: Plant Line Value: 35A19
  misc_feature: MA Experiment 108689 PARAMETER Experiment Name: Zm_Drought_Roots_P Parameter: Timepoint (hr) Value: 24
  misc_feature: MA Experiment 108689 PARAMETER Experiment Name: Zm_Drought_Roots_P Parameter: Tissue Value: Roots
  misc_feature: MA Experiment 108689 PARAMETER Experiment Name: Zm_Drought_Roots_P Parameter: Treatment Value: Drought vs. No Drought
  misc_feature: MA Experiment ID: 20000479 Result: Down-regulated in Transcription
  misc_feature: MA Experiment 20000479 PARAMETER Experiment Name: Zm_Drought_P Parameter: Age (day) Value: 10
  misc_feature: MA Experiment 20000479 PARAMETER Experiment Name: Zm_Drought_P Parameter: Organism Value: Zea mays
  misc_feature: MA Experiment 20000479 PARAMETER Experiment Name: Zm_Drought_P Parameter: Plant Line Value: 35A19
  misc_feature: MA Experiment 20000479 PARAMETER Experiment Name: Zm_Drought_P Parameter: Timepoint (hr) Value: 48
  misc_feature: MA Experiment 20000479 PARAMETER Experiment Name: Zm_Drought_P Parameter: Tissue Value: Aerial
  misc_feature: MA Experiment 20000479 PARAMETER Experiment Name: Zm_Drought_P Parameter: Treatment Value: Drought vs. No Drought
  misc_feature: MA Experiment ID: 20000480 Result: Down-regulated in Transcription
  misc_feature: MA Experiment 20000480 PARAMETER Experiment Name: Zm_Drought_P Parameter: Age (day) Value: 11
  misc_feature: MA Experiment 20000480 PARAMETER Experiment Name: Zm_Drought_P Parameter: Organism Value: Zea mays
  misc_feature: MA Experiment 20000480 PARAMETER Experiment Name: Zm_Drought_P Parameter: Plant Line Value: 35A19
  misc_feature: MA Experiment 20000480 PARAMETER Experiment Name: Zm_Drought_P Parameter: Timepoint (hr) Value: 72
  misc_feature: MA Experiment 20000480 PARAMETER Experiment Name: Zm_Drought_P Parameter: Tissue Value: Aerial
  misc_feature: MA Experiment 20000480 PARAMETER Experiment Name: Zm_Drought_P Parameter: Treatment Value: Drought vs. No Drought
  misc_feature: MA Experiment ID: 20000626 Result: Down-regulated in Transcription
  misc_feature: MA Experiment 20000626 PARAMETER Experiment Name: Zm_Herbicide-Treatments_P Parameter: Timepoint (hr) Value: 12
  misc_feature: MA Experiment 20000626 PARAMETER Experiment Name: Zm_Herbicide-Treatments_P Parameter: Tissue Value: Aerial
  misc_feature: MA Experiment 20000626 PARAMETER Experiment Name: Zm_Herbicide-Treatments_P Parameter: Treatment Value: Roundup vs. No Treatment
gggcaactcgaagaagccgcgtgcgttatcctttgagcagtttgggcgctgagcaagtccagtgagagagggagagcggcgagaggatggctgggatggcatcgctgcagggcgccatggcgtcgctctccatctccgcgctaggcgcggcgacggcgagcagcagcagcttctggggcaaccggctcgccacctactccgcgccgcagcctggggtaaggtttatggtcaagatatgcccaattgaaatgagacttaagagatgggagcgaaagaagtgtaaaccaaacagtcttcctgtgctgcacaagatgcatgttaggatcggggacacggtacaggttattgcaggccgtgagaaaggaaaggttggagaagtcacacgccttttcaagcacaacagcacggtgatcgtgaaggacctgaacttgaagtcgaagcacaagaaaggcacagacgatgaacccggtgaaatcgtcatgattgaaggccccattcatagctcaaatgtgatgctctactctaaggagaagagtgtggtaagcagggttggccacaaattcctggaggacgggaccaaggtccgatacctggtcaagaccggtgaagtaatcgacagtgttgagaagtgggtaaaggtttttaaggaaggaaattcggagtaacagttttagcatgaaaacctgcaaaatgctctgaacgctgactgcgtcttgcatgttgaattgagcctgtttatccctctatgttgttatttacgccagtttttccccctgt

SEQ ID NO: 3791 - protein, 192 aa, Zea mays subsp. mays
  peptide (1)..(192): Ceres Seq. ID no. 12342770
  misc_feature (78)..(111): Pfam Name: KOW motif Pfam Description: KOW motif
  misc_feature (66)..(177): Homolog of NCBI NO: 23124117 NR Description: hypothetical protein [Nostoc punctiforme]
  misc_feature (66)..(177): Homolog of NCBI NO: 22297636 NR Description: 50S ribosomal protein L24 [Thermosynechococcus
  misc_feature (62)..(177): Homolog of NCBI NO: 23042779 NR Description: hypothetical protein [Trichodesmium erythraeum
  misc_feature (11)..(192): Homolog of NCBI NO: 132821 NR Description: 50S RIBOSOMAL PROTEIN L24, CHLOROPLAST PRECURSOR
  misc_feature (127)..(192): Homolog of NCBI NO: 30696487 NR Description: 50S ribosomal protein L24, chloroplast precursor
  misc_feature (1)..(108): Homolog of NCBI NO: 30696487 NR Description: 50S ribosomal protein L24, chloroplast precursor
  misc_feature (11)..(188): Homolog of NCBI NO: 400989 NR Description: 50S RIBOSOMAL PROTEIN L24, CHLOROPLAST PRECURSOR
  misc_feature (4)..(192): Homolog of NCBI NO: 132819 NR Description: 50S RIBOSOMAL PROTEIN L24, CHLOROPLAST PRECURSOR
  misc_feature (1)..(192): Homolog of NCBI NO: 1694974 NR Description: plastid ribosomal protein [Arabidopsis thaliana]
  misc_feature (1)..(192): Homolog of NCBI NO: 30696483 NR Description: 50S ribosomal protein L24, chloroplast precursor
MAGMASLQGAMASLSISALGAATASSSSFWGNRLATYSAPQPGVRFMVKICPIEMRLKRWERKKCKPNSLPVLHKMHVRIGDTVQVIAGREKGKVGEVTRLFKHNSTVIVKDLNLKSKHKKGTDDEPGEIVMIEGPIHSSNVMLYSKEKSVVSRVGHKFLEDGTKVRYLVKTGEVIDSVEKWVKVFKEGNSE

SEQ ID NO: 3792 - protein, 189 aa, Zea mays subsp. mays
  peptide (1)..(189): Ceres Seq. ID no. 12342771
  misc_feature (75)..(108): Pfam Name: KOW motif Pfam Description: KOW motif
  misc_feature (63)..(174): Homolog of NCBI NO: 23124117 NR Description: hypothetical protein [Nostoc punctiforme]
  misc_feature (63)..(174): Homolog of NCBI NO: 22297636 NR Description: 50S ribosomal protein L24 [Thermosynechococcus
  misc_feature (59)..(174): Homolog of NCBI NO: 23042779 NR Description: hypothetical protein [Trichodesmium erythraeum
  misc_feature (8)..(189): Homolog of NCBI NO: 132821 NR Description: 50S RIBOSOMAL PROTEIN L24, CHLOROPLAST PRECURSOR
  misc_feature (124)..(189): Homolog of NCBI NO: 30696487 NR Description: 50S ribosomal protein L24, chloroplast precursor
  misc_feature (1)..(105): Homolog of NCBI NO: 30696487 NR Description: 50S ribosomal protein L24, chloroplast precursor
  misc_feature (8)..(185): Homolog of NCBI NO: 400989 NR Description: 50S RIBOSOMAL PROTEIN L24, CHLOROPLAST PRECURSOR
  misc_feature (1)..(189): Homolog of NCBI NO: 132819 NR Description: 50S RIBOSOMAL PROTEIN L24, CHLOROPLAST PRECURSOR
  misc_feature (1)..(189): Homolog of NCBI NO: 1694974 NR Description: plastid ribosomal protein [Arabidopsis thaliana]
  misc_feature (1)..(189): Homolog of NCBI NO: 30696483 NR Description: 50S ribosomal protein L24, chloroplast precursor
MASLQGAMASLSISALGAATASSSSFWGNRLATYSAPQPGVRFMVKICPIEMRLKRWERKKCKPNSLPVLHKMHVRIGDTVQVIAGREKGKVGEVTRLFKHNSTVIVKDLNLKSKHKKGTDDEPGEIVMIEGPIHSSNVMLYSKEKSVVSRVGHKFLEDGTKVRYLVKTGEVIDSVEKWVKVFKEGNSE

SEQ ID NO: 3793 - protein, 182 aa, Zea mays subsp. mays
  peptide (1)..(182): Ceres Seq. ID no. 12342772
  misc_feature (68)..(101): Pfam Name: KOW motif Pfam Description: KOW motif
  misc_feature (56)..(167): Homolog of NCBI NO: 23124117 NR Description: hypothetical protein [Nostoc punctiforme]
  misc_feature (56)..(167): Homolog of NCBI NO: 22297636 NR Description: 50S ribosomal protein L24 [Thermosynechococcus
  misc_feature (52)..(167): Homolog of NCBI NO: 23042779 NR Description: hypothetical protein [Trichodesmium erythraeum
  misc_feature (1)..(182): Homolog of NCBI NO: 132821 NR Description: 50S RIBOSOMAL PROTEIN L24, CHLOROPLAST PRECURSOR
  misc_feature (117)..(182): Homolog of NCBI NO: 30696487 NR Description: 50S ribosomal protein L24, chloroplast precursor
  misc_feature (1)..(98): Homolog of NCBI NO: 30696487 NR Description: 50S ribosomal protein L24, chloroplast precursor
  misc_feature (1)..(178): Homolog of NCBI NO: 400989 NR Description: 50S RIBOSOMAL PROTEIN L24, CHLOROPLAST PRECURSOR
  misc_feature (1)..(182): Homolog of NCBI NO: 132819 NR Description: 50S RIBOSOMAL PROTEIN L24, CHLOROPLAST PRECURSOR
  misc_feature (1)..(182): Homolog of NCBI NO: 1694974 NR Description: plastid ribosomal protein [Arabidopsis thaliana]
  misc_feature (1)..(182): Homolog of NCBI NO: 30696483 NR Description: 50S ribosomal protein L24, chloroplast precursor
MASLSISALGAATASSSSFWGNRLATYSAPQPGVRFMVKICPIEMRLKRWERKKCKPNSLPVLHKMHVRIGDTVQVIAGREKGKVGEVTRLFKHNSTVIVKDLNLKSKHKKGTDDEPGEIVMIEGPIHSSNVMLYSKEKSVVSRVGHKFLEDGTKVRYLVKTGEVIDSVEKWVKVFKEGNSE

SEQ ID NO: 3794 - DNA, 674 bp, Zea mays subsp. mays
  misc_feature (1)..(674): Ceres Seq. ID no. 12353693
  misc_feature: MA Experiment ID: 108523 Result: Down-regulated in Transcription
  misc_feature: MA Experiment 108523 PARAMETER Experiment Name: Zm_42deg_Heat_P Parameter: Age (day) Value: 8
  misc_feature: MA Experiment 108523 PARAMETER Experiment Name: Zm_42deg_Heat_P Parameter: Organism Value: Zea mays
  misc_feature: MA Experiment 108523 PARAMETER Experiment Name: Zm_42deg_Heat_P Parameter: Plant Line Value: 35A19
  misc_feature: MA Experiment 108523 PARAMETER Experiment Name: Zm_42deg_Heat_P Parameter: Temperature (deg C) Value: 42 vs. 22
  misc_feature: MA Experiment 108523 PARAMETER Experiment Name: Zm_42deg_Heat_P Parameter: Timepoint (hr) Value: 6
  misc_feature: MA Experiment 108523 PARAMETER Experiment Name: Zm_42deg_Heat_P Parameter: Tissue Value: Aerial
  misc_feature: MA Experiment ID: 108528 Result: Up-regulated in Transcription
  misc_feature: MA Experiment 108528 PARAMETER Experiment Name: Zm_Imbibed_Seeds_P Parameter: Age (day) Value: 5 vs. 2
  misc_feature: MA Experiment 108528 PARAMETER Experiment Name: Zm_Imbibed_Seeds_P Parameter: Organism Value: Zea mays
  misc_feature: MA Experiment 108528 PARAMETER Experiment Name: Zm_Imbibed_Seeds_P Parameter: Plant Line Value: 35A19
  misc_feature: MA Experiment 108528 PARAMETER Experiment Name: Zm_Imbibed_Seeds_P Parameter: Tissue Value: Aerial vs. Embryo
  misc_feature: MA Experiment ID: 108529 Result: Down-regulated in Transcription
  misc_feature: MA Experiment 108529 PARAMETER Experiment Name: Zm_Imbibed_Seeds_P Parameter: Age (day) Value: 5 vs. 2
  misc_feature: MA Experiment 108529 PARAMETER Experiment Name: Zm_Imbibed_Seeds_P Parameter: Organism Value: Zea mays
  misc_feature: MA Experiment 108529 PARAMETER Experiment Name: Zm_Imbibed_Seeds_P Parameter: Plant Line Value: 35A19
  misc_feature: MA Experiment 108529 PARAMETER Experiment Name: Zm_Imbibed_Seeds_P Parameter: Tissue Value: Roots vs. Embryo
  misc_feature: MA Experiment ID: 108530 Result: Up-regulated in Transcription
  misc_feature: MA Experiment 108530 PARAMETER Experiment Name: Zm_Imbibed_Seeds_P Parameter: Age (day) Value: 6 vs. 2
  misc_feature: MA Experiment 108530 PARAMETER Experiment Name: Zm_Imbibed_Seeds_P Parameter: Organism Value: Zea mays
  misc_feature: MA Experiment 108530 PARAMETER Experiment Name: Zm_Imbibed_Seeds_P Parameter: Plant Line Value: 35A19
  misc_feature: MA Experiment 108530 PARAMETER Experiment Name: Zm_Imbibed_Seeds_P Parameter: Tissue Value: Aerial vs. Embryo
  misc_feature: MA Experiment ID: 108546 Result: Down-regulated in Transcription
  misc_feature: MA Experiment 108546 PARAMETER Experiment Name: Zm_Imbibed_Seeds_P Parameter: Age (day) Value: 3 vs. 2
  misc_feature: MA Experiment 108546 PARAMETER Experiment Name: Zm_Imbibed_Seeds_P Parameter: Organism Value: Zea mays
  misc_feature: MA Experiment 108546 PARAMETER Experiment Name: Zm_Imbibed_Seeds_P Parameter: Plant Line Value: 35A19
  misc_feature: MA Experiment 108546 PARAMETER Experiment Name: Zm_Imbibed_Seeds_P Parameter: Tissue Value: Roots vs. Embryo
  misc_feature: MA Experiment ID: 108547 Result: Up-regulated in Transcription
  misc_feature: MA Experiment 108547 PARAMETER Experiment Name: Zm_Imbibed_Seeds_P Parameter: Age (day) Value: 4 vs. 2
  misc_feature: MA Experiment 108547 PARAMETER Experiment Name: Zm_Imbibed_Seeds_P Parameter: Organism Value: Zea mays
  misc_feature: MA Experiment 108547 PARAMETER Experiment Name: Zm_Imbibed_Seeds_P Parameter: Plant Line Value: 35A19
  misc_feature: MA Experiment 108547 PARAMETER Experiment Name: Zm_Imbibed_Seeds_P Parameter: Tissue Value: Aerial vs. Embryo
  misc_feature: MA Experiment ID: 108559 Result: Down-regulated in Transcription
  misc_feature: MA Experiment 108559 PARAMETER Experiment Name: Zm_5mM_NO_P Parameter: Age (day) Value: 8
  misc_feature: MA Experiment 108559 PARAMETER Experiment Name: Zm_5mM_NO_P Parameter: Organism Value: Zea mays
  misc_feature: MA Experiment 108559 PARAMETER Experiment Name: Zm_5mM_NO_P Parameter: Plant Line Value: 35A19
  misc_feature: MA Experiment 108559 PARAMETER Experiment Name: Zm_5mM_NO_P Parameter: Timepoint (hr) Value: 12
  misc_feature: MA Experiment 108559 PARAMETER Experiment Name: Zm_5mM_NO_P Parameter: Tissue Value: Aerial
  misc_feature: MA Experiment 108559 PARAMETER Experiment Name: Zm_5mM_NO_P Parameter: Treatment Value: 5mM NO vs. No Treatment
  misc_feature: MA Experiment ID: 108689 Result: Up-regulated in Transcription
  misc_feature: MA Experiment 108689 PARAMETER Experiment Name: Zm_Drought_Roots_P Parameter: Age (day) Value: 9
  misc_feature: MA Experiment 108689 PARAMETER Experiment Name: Zm_Drought_Roots_P Parameter: Organism Value: Zea mays
  misc_feature: MA Experiment 108689 PARAMETER Experiment Name: Zm_Drought_Roots_P Parameter: Plant Line Value: 35A19
  misc_feature: MA Experiment 108689 PARAMETER Experiment Name: Zm_Drought_Roots_P Parameter: Timepoint (hr) Value: 24
  misc_feature: MA Experiment 108689 PARAMETER Experiment Name: Zm_Drought_Roots_P Parameter: Tissue Value: Roots
  misc_feature: MA Experiment 108689 PARAMETER Experiment Name: Zm_Drought_Roots_P Parameter: Treatment Value: Drought vs. No Drought
gatttcgtgtccctgcagccacggccaccgcccaatctccacttctttatcttctccgaggtgagagagcccaggcgatccaattccaccctcgttctcaggcactgtcacacagacacagctgacctgccactgccaggaaagtaggtcgaggatgccccgcagcggcttctcggggtccttcaggtcgcccaagatcgacgtcgtcatcgacatgggaaaccccttcctcaaccgcaccgtcgacggcttcctcaagatcggcgccgtcggcgcctgcaaggtggctgccgaggagaccttcgagtgcctccacaggggggatgtttcgaagcacaaggttgagcatgccctgaggaagatgtgcaaggagggcgcatattggggcactgttgctggagtttatgtgggcatggtgtacggcgtggaaagggtccgtggccgcagtgactggaagaacgcgatgatcgggggcgccttgtccggcgccctgatctccggcgccagcaacagcgacagaggcaaggtcgtcaaggacgccatcaccgccggcgcggtcgccacagccgtcgagttcatcaactgcattacctagccgagcaaggagcaactgcatttgcagtgccattgtcgtgcaaaaatatgaataaagtacttcgtcatgtccagttcat

SEQ ID NO: 3795 - protein, 146 aa, Zea mays subsp. mays
  peptide (1)..(146): Ceres Seq. ID no. 12353694
  misc_feature (19)..(146): Pfam Name: Tim17/Tim22/Tim23 family Pfam Description: Tim17/Tim22/Tim23 family
  misc_feature (18)..(50): Homolog of NCBI NO: 30683558 NR Description: pore protein homolog [Arabidopsis thaliana]
  misc_feature (55)..(145): Homolog of NCBI NO: 30683558 NR Description: pore protein homolog [Arabidopsis thaliana]
  misc_feature (18)..(50): Homolog of NCBI NO: 16555405 NR Description: stress-inducible membrane pore protein [Bromus
  misc_feature (55)..(145): Homolog of NCBI NO: 16555405 NR Description: stress-inducible membrane pore protein [Bromus
  misc_feature (1)..(41): Homolog of NCBI NO: 34906056 NR Description: P0698H10.23 [Oryza sativa (japonica
  misc_feature (101)..(146): Homolog of NCBI NO: 34906056 NR Description: P0698H10.23 [Oryza sativa (japonica
  misc_feature (1)..(143): Homolog of NCBI NO: 15226998 NR Description: putative membrane channel protein
  misc_feature (1)..(143): Homolog of NCBI NO: 21536521 NR Description: putative membrane channel protein [Arabidopsis
  misc_feature (1)..(146): Homolog of NCBI NO: 7488792 NR Description: core protein - garden pea
  misc_feature (1)..(146): Homolog of NCBI NO: 3758827 NR Description: amino acid selective channel protein
MPRSGFSGSFRSPKIDVVIDMGNPFLNRTVDGFLKIGAVGACKVAAEETFECLHRGDVSKHKVEHALRKMCKEGAYWGTVAGVYVGMVYGVERVRGRSDWKNAMIGGALSGALISGASNSDRGKVVKDAITAGAVATAVEFINCIT

SEQ ID NO: 3796 - protein, 126 aa, Zea mays subsp. mays
  peptide (1)..(126): Ceres Seq. ID no. 12353695
  misc_feature (1)..(126): Pfam Name: Tim17/Tim22/Tim23 family Pfam Description: Tim17/Tim22/Tim23 family
  misc_feature (1)..(30): Homolog of NCBI NO: 30683558 NR Description: pore protein homolog [Arabidopsis thaliana]
  misc_feature (35)..(125): Homolog of NCBI NO: 30683558 NR Description: pore protein homolog [Arabidopsis thaliana]
  misc_feature (1)..(30): Homolog of NCBI NO: 16555405 NR Description: stress-inducible membrane pore protein [Bromus
  misc_feature (35)..(125): Homolog of NCBI NO: 16555405 NR Description: stress-inducible membrane pore protein [Bromus
  misc_feature (1)..(21): Homolog of NCBI NO: 34906056 NR Description: P0698H10.23 [Oryza sativa (japonica
  misc_feature (81)..(126): Homolog of NCBI NO: 34906056 NR Description: P0698H10.23 [Oryza sativa (japonica
  misc_feature (1)..(123): Homolog of NCBI NO: 15226998 NR Description: putative membrane channel protein
  misc_feature (1)..(123): Homolog of NCBI NO: 21536521 NR Description: putative membrane channel protein [Arabidopsis
  misc_feature (1)..(126): Homolog of NCBI NO: 7488792 NR Description: core protein - garden pea
  misc_feature (1)..(126): Homolog of NCBI NO: 3758827 NR Description: amino acid selective channel protein
MGNPFLNRTVDGFLKIGAVGACKVAAEETFECLHRGDVSKHKVEHALRKMCKEGAYWGTVAGVYVGMVYGVERVRGRSDWKNAMIGGALSGALISGASNSDRGKVVKDAITAGAVATAVEFINCIT

SEQ ID NO: 3797 - protein, 77 aa, Zea mays subsp. mays
  peptide (1)..(77): Ceres Seq. ID no. 12353696
  misc_feature (1)..(77): Pfam Name: Tim17/Tim22/Tim23 family Pfam Description: Tim17/Tim22/Tim23 family
  misc_feature (1)..(76): Homolog of NCBI NO: 18414605 NR Description: pore protein homolog
  misc_feature (1)..(76): Homolog of NCBI NO: 7485023 NR Description: hypothetical protein - Arabidopsis thaliana
  misc_feature (1)..(76): Homolog of NCBI NO: 34905526 NR Description: B1146F03.20 [Oryza sativa (japonica
  misc_feature (1)..(76): Homolog of NCBI NO: 30683558 NR Description: pore protein homolog [Arabidopsis thaliana]
  misc_feature (1)..(76): Homolog of NCBI NO: 16555405 NR Description: stress-inducible membrane pore protein [Bromus
  misc_feature (32)..(77): Homolog of NCBI NO: 34906056 NR Description: P0698H10.23 [Oryza sativa (japonica
  misc_feature (1)..(74): Homolog of NCBI NO: 15226998 NR Description: putative membrane channel protein
  misc_feature (1)..(74): Homolog of NCBI NO: 21536521 NR Description: putative membrane channel protein [Arabidopsis
  misc_feature (1)..(77): Homolog of NCBI NO: 7488792 NR Description: core protein - garden pea
  misc_feature (1)..(77): Homolog of NCBI NO: 3758827 NR Description: amino acid selective channel protein
MCKEGAYWGTVAGVYVGMVYGVERVRGRSDWKNAMIGGALSGALISGASNSDRGKVVKDAITAGAVATAVEFINCIT

SEQ ID NO: 3798 - DNA, 1029 bp, Zea mays subsp. mays
  misc_feature (1)..(1029): Ceres Seq. ID no. 13564872
  misc_feature: MA Experiment ID: 108504 Result: Up-regulated in Transcription
  misc_feature: MA Experiment 108504 PARAMETER Experiment Name: Zm_Drought_P Parameter: Age (day) Value: 8
  misc_feature: MA Experiment 108504 PARAMETER Experiment Name: Zm_Drought_P Parameter: Organism Value: Zea mays
  misc_feature: MA Experiment 108504 PARAMETER Experiment Name: Zm_Drought_P Parameter: Plant Line Value: 35A19
  misc_feature: MA Experiment 108504 PARAMETER Experiment Name: Zm_Drought_P Parameter: Timepoint (hr) Value: 12
  misc_feature: MA Experiment 108504 PARAMETER Experiment Name: Zm_Drought_P Parameter: Tissue Value: Aerial
  misc_feature: MA Experiment 108504 PARAMETER Experiment Name: Zm_Drought_P Parameter: Treatment Value: Drought vs. No Drought
  misc_feature: MA Experiment ID: 108513 Result: Up-regulated in Transcription
  misc_feature: MA Experiment 108513 PARAMETER Experiment Name: Zm_100uM_ABA_P Parameter: Age (day) Value: 8
  misc_feature: MA Experiment 108513 PARAMETER Experiment Name: Zm_100uM_ABA_P Parameter: Organism Value: Zea mays
  misc_feature: MA Experiment 108513 PARAMETER Experiment Name: Zm_100uM_ABA_P Parameter: Plant Line Value: 35A19
  misc_feature: MA Experiment 108513 PARAMETER Experiment Name: Zm_100uM_ABA_P Parameter: Timepoint (hr) Value: 6
  misc_feature: MA Experiment 108513 PARAMETER Experiment Name: Zm_100uM_ABA_P Parameter: Tissue Value: Aerial
  misc_feature: MA Experiment 108513 PARAMETER Experiment Name: Zm_100uM_ABA_P Parameter: Treatment Value: 100uM ABA vs. No Treatment
  misc_feature: MA Experiment ID: 108523 Result: Up-regulated in Transcription
  misc_feature: MA Experiment 108523 PARAMETER Experiment Name: Zm_42deg_Heat_P Parameter: Age (day) Value: 8
  misc_feature: MA Experiment 108523 PARAMETER Experiment Name: Zm_42deg_Heat_P Parameter: Organism Value: Zea mays
  misc_feature: MA Experiment 108523 PARAMETER Experiment Name: Zm_42deg_Heat_P Parameter: Plant Line Value: 35A19
  misc_feature: MA Experiment 108523 PARAMETER Experiment Name: Zm_42deg_Heat_P Parameter: Temperature (deg C) Value: 42 vs. 22
  misc_feature: MA Experiment 108523 PARAMETER Experiment Name: Zm_42deg_Heat_P Parameter: Timepoint (hr) Value: 6
  misc_feature: MA Experiment 108523 PARAMETER Experiment Name: Zm_42deg_Heat_P Parameter: Tissue Value: Aerial
  misc_feature: MA Experiment ID: 108526 Result: Up-regulated in Transcription
  misc_feature: MA Experiment 108526 PARAMETER Experiment Name: Zm_5mM_NO_P Parameter: Age (day) Value: 8
  misc_feature: MA Experiment 108526 PARAMETER Experiment Name: Zm_5mM_NO_P Parameter: Organism Value: Zea mays
  misc_feature: MA Experiment 108526 PARAMETER Experiment Name: Zm_5mM_NO_P Parameter: Plant Line Value: 35A19
  misc_feature: MA Experiment 108526 PARAMETER Experiment Name: Zm_5mM_NO_P Parameter: Timepoint (hr) Value: 1
  misc_feature: MA Experiment 108526 PARAMETER Experiment Name: Zm_5mM_NO_P Parameter: Tissue Value: Aerial
  misc_feature: MA Experiment 108526 PARAMETER Experiment Name: Zm_5mM_NO_P Parameter: Treatment Value: 5mM NO vs. No Treatment
  misc_feature: MA Experiment ID: 108527 Result: Up-regulated in Transcription
  misc_feature: MA Experiment 108527 PARAMETER Experiment Name: Zm_5mM_NO_P Parameter: Age (day) Value: 8
  misc_feature: MA Experiment 108527 PARAMETER Experiment Name: Zm_5mM_NO_P Parameter: Organism Value: Zea mays
  misc_feature: MA Experiment 108527 PARAMETER Experiment Name: Zm_5mM_NO_P Parameter: Plant Line Value: 35A19
  misc_feature: MA Experiment 108527 PARAMETER Experiment Name: Zm_5mM_NO_P Parameter: Timepoint (hr) Value: 6
  misc_feature: MA Experiment 108527 PARAMETER Experiment Name: Zm_5mM_NO_P Parameter: Tissue Value: Aerial
  misc_feature: MA Experiment 108527 PARAMETER Experiment Name: Zm_5mM_NO_P Parameter: Treatment Value: 5mM NO vs. No Treatment
  misc_feature: MA Experiment ID: 108530 Result: Down-regulated in Transcription
  misc_feature: MA Experiment 108530 PARAMETER Experiment Name: Zm_Imbibed_Seeds_P Parameter: Age (day) Value: 6 vs. 2
  misc_feature: MA Experiment 108530 PARAMETER Experiment Name: Zm_Imbibed_Seeds_P Parameter: Organism Value: Zea mays
  misc_feature: MA Experiment 108530 PARAMETER Experiment Name: Zm_Imbibed_Seeds_P Parameter: Plant Line Value: 35A19
  misc_feature: MA Experiment 108530 PARAMETER Experiment Name: Zm_Imbibed_Seeds_P Parameter: Tissue Value: Aerial vs. Embryo
  misc_feature: MA Experiment ID: 108536 Result: Up-regulated in Transcription
  misc_feature: MA Experiment 108536 PARAMETER Experiment Name: Zm_Meristem_P Parameter: Age (day) Value: 8
  misc_feature: MA Experiment 108536 PARAMETER Experiment Name: Zm_Meristem_P Parameter: Organism Value: Zea mays
  misc_feature: MA Experiment 108536 PARAMETER Experiment Name: Zm_Meristem_P Parameter: Plant Line Value: 35A19
  misc_feature: MA Experiment 108536 PARAMETER Experiment Name: Zm_Meristem_P Parameter: Tissue Value: Shoot Meristem vs. Above Shoot Meristem
  misc_feature: MA Experiment ID: 108540 Result: Up-regulated in Transcription
  misc_feature: MA Experiment 108540 PARAMETER Experiment Name: Zm_20percent_PEG_P Parameter: Age (day) Value: 8
  misc_feature: MA Experiment 108540 PARAMETER Experiment Name: Zm_20percent_PEG_P Parameter: Organism Value: Zea mays
  misc_feature: MA Experiment 108540 PARAMETER Experiment Name: Zm_20percent_PEG_P Parameter: Plant Line Value: 35A19
  misc_feature: MA Experiment 108540 PARAMETER Experiment Name: Zm_20percent_PEG_P Parameter: Timepoint (hr) Value: 6
  misc_feature: MA Experiment 108540 PARAMETER Experiment Name: Zm_20percent_PEG_P Parameter: Tissue Value: Aerial
  misc_feature: MA Experiment 108540 PARAMETER Experiment Name: Zm_20percent_PEG_P Parameter: Treatment Value: 20percent PEG vs. No Treatment
  misc_feature: MA Experiment ID: 108556 Result: Up-regulated in Transcription
  misc_feature: MA Experiment 108556 PARAMETER Experiment Name: Zm_Drought_P Parameter: Age (day) Value: 9
  misc_feature: MA Experiment 108556 PARAMETER Experiment Name: Zm_Drought_P Parameter: Organism Value: Zea mays
  misc_feature: MA Experiment 108556 PARAMETER Experiment Name: Zm_Drought_P Parameter: Plant Line Value: 35A19
  misc_feature: MA Experiment 108556 PARAMETER Experiment Name: Zm_Drought_P Parameter: Timepoint (hr) Value: 24
  misc_feature: MA Experiment 108556 PARAMETER Experiment Name: Zm_Drought_P Parameter: Tissue Value: Aerial
  misc_feature: MA Experiment 108556 PARAMETER Experiment Name: Zm_Drought_P Parameter: Treatment Value: Drought vs. No Drought
  misc_feature: MA Experiment ID: 108559 Result: Up-regulated in Transcription
  misc_feature: MA Experiment 108559 PARAMETER Experiment Name: Zm_5mM_NO_P Parameter: Age (day) Value: 8
  misc_feature: MA Experiment 108559 PARAMETER Experiment Name: Zm_5mM_NO_P Parameter: Organism Value: Zea mays
  misc_feature: MA Experiment 108559 PARAMETER Experiment Name: Zm_5mM_NO_P Parameter: Plant Line Value: 35A19
  misc_feature: MA Experiment 108559 PARAMETER Experiment Name: Zm_5mM_NO_P Parameter: Timepoint (hr) Value: 12
  misc_feature: MA Experiment 108559 PARAMETER Experiment Name: Zm_5mM_NO_P Parameter: Tissue Value: Aerial
  misc_feature: MA Experiment 108559 PARAMETER Experiment Name: Zm_5mM_NO_P Parameter: Treatment Value: 5mM NO vs. No Treatment
  misc_feature: MA Experiment ID: 108597 Result: Up-regulated in Transcription
  misc_feature: MA Experiment 108597 PARAMETER Experiment Name: Zm_100uM_ABA_P Parameter: Age (day) Value: 9
  misc_feature: MA Experiment 108597 PARAMETER Experiment Name: Zm_100uM_ABA_P Parameter: Organism Value: Zea mays
  misc_feature: MA Experiment 108597 PARAMETER Experiment Name: Zm_100uM_ABA_P Parameter: Plant Line Value: 35A19
  misc_feature: MA Experiment 108597 PARAMETER Experiment Name: Zm_100uM_ABA_P Parameter: Timepoint (hr) Value: 24
  misc_feature: MA Experiment 108597 PARAMETER Experiment Name: Zm_100uM_ABA_P Parameter: Tissue Value: Aerial
  misc_feature: MA Experiment 108597 PARAMETER Experiment Name: Zm_100uM_ABA_P Parameter: Treatment Value: 100uM ABA vs. No Treatment
  misc_feature: MA Experiment ID: 20000479 Result: Up-regulated in Transcription
  misc_feature: MA Experiment 20000479 PARAMETER Experiment Name: Zm_Drought_P Parameter: Age (day) Value: 10
  misc_feature: MA Experiment 20000479 PARAMETER Experiment Name: Zm_Drought_P Parameter: Organism Value: Zea mays
  misc_feature: MA Experiment 20000479 PARAMETER Experiment Name: Zm_Drought_P Parameter: Plant Line Value: 35A19
  misc_feature: MA Experiment 20000479 PARAMETER Experiment Name: Zm_Drought_P Parameter: Timepoint (hr) Value: 48
  misc_feature: MA Experiment 20000479 PARAMETER Experiment Name: Zm_Drought_P Parameter: Tissue Value: Aerial
  misc_feature: MA Experiment 20000479 PARAMETER Experiment Name: Zm_Drought_P Parameter: Treatment Value: Drought vs. No Drought
  misc_feature: MA Experiment ID: 20000480 Result: Up-regulated in Transcription
  misc_feature: MA Experiment 20000480 PARAMETER Experiment Name: Zm_Drought_P Parameter: Age (day) Value: 11
  misc_feature: MA Experiment 20000480 PARAMETER Experiment Name: Zm_Drought_P Parameter: Organism Value: Zea mays
  misc_feature: MA Experiment 20000480 PARAMETER Experiment Name: Zm_Drought_P Parameter: Plant Line Value: 35A19
  misc_feature: MA Experiment 20000480 PARAMETER Experiment Name: Zm_Drought_P Parameter: Timepoint (hr) Value: 72
  misc_feature: MA Experiment 20000480 PARAMETER Experiment Name: Zm_Drought_P Parameter: Tissue Value: Aerial
  misc_feature: MA Experiment 20000480 PARAMETER Experiment Name: Zm_Drought_P Parameter: Treatment Value: Drought vs. No Drought
  misc_feature: MA Experiment ID: 20000534 Result: Down-regulated in Transcription
  misc_feature: MA Experiment 20000534 PARAMETER Experiment Name: Zm_Hybrid_Pollen_P Parameter: Age (day) Value: 8
  misc_feature: MA Experiment 20000534 PARAMETER Experiment Name: Zm_Hybrid_Pollen_P Parameter: Organism Value: Zea mays
  misc_feature: MA Experiment 20000534 PARAMETER Experiment Name: Zm_Hybrid_Pollen_P Parameter: Plant Line Value: 35A19
  misc_feature: MA Experiment 20000534 PARAMETER Experiment Name: Zm_Hybrid_Pollen_P Parameter: Tissue Value: Pollen vs. Aerial
  misc_feature: MA Experiment ID: 20000535 Result: Up-regulated in Transcription
  misc_feature: MA Experiment 20000535 PARAMETER Experiment Name: Zm_Hybrid_Seed_Dev_P Parameter: DAP Value: 30 vs. 12
  misc_feature: MA Experiment 20000535 PARAMETER Experiment Name: Zm_Hybrid_Seed_Dev_P Parameter: Organism Value: Zea mays
  misc_feature: MA Experiment 20000535 PARAMETER Experiment Name: Zm_Hybrid_Seed_Dev_P Parameter: Plant Line Value: 35A19
  misc_feature: MA Experiment 20000535 PARAMETER Experiment Name: Zm_Hybrid_Seed_Dev_P Parameter: Tissue Value: Embryo vs. Unfert Floret
  misc_feature: MA Experiment ID: 20000627 Result: Down-regulated in Transcription
  misc_feature: MA Experiment 20000627 PARAMETER Experiment Name: Zm_Herbicide-Treatments_P Parameter: Timepoint (hr) Value: 12
  misc_feature: MA Experiment 20000627 PARAMETER Experiment Name: Zm_Herbicide-Treatments_P Parameter: Tissue Value: Aerial
  misc_feature: MA Experiment 20000627 PARAMETER Experiment Name: Zm_Herbicide-Treatments_P Parameter: Treatment Value: Finale vs. No Treatment
  misc_feature: MA Experiment ID: 20000629 Result: Down-regulated in Transcription
  misc_feature: MA Experiment 20000629 PARAMETER Experiment Name: Zm_Herbicide-Treatments_P Parameter: Timepoint (hr) Value: 12
  misc_feature: MA Experiment 20000629 PARAMETER Experiment Name: Zm_Herbicide-Treatments_P Parameter: Tissue Value: Aerial
  misc_feature: MA Experiment 20000629 PARAMETER Experiment Name: Zm_Herbicide-Treatments_P Parameter: Treatment Value: Trimec vs. No Treatment
  misc_feature: MA Experiment ID: 20000632 Result: Down-regulated in Transcription
  misc_feature: MA Experiment 20000632 PARAMETER Experiment Name: Zm_Herbicide-Treatments_P Parameter: Timepoint (hr) Value: 4
  misc_feature: MA Experiment 20000632 PARAMETER Experiment Name: Zm_Herbicide-Treatments_P Parameter: Tissue Value: Aerial
  misc_feature: MA Experiment 20000632 PARAMETER Experiment Name: Zm_Herbicide-Treatments_P Parameter: Treatment Value: Glean vs. No Treatment
  misc_feature: MA Experiment ID: 20000633 Result: Down-regulated in Transcription
  misc_feature: MA Experiment 20000633 PARAMETER Experiment Name: Zm_Herbicide-Treatments_P Parameter: Timepoint (hr) Value: 4
  misc_feature: MA Experiment 20000633 PARAMETER Experiment Name: Zm_Herbicide-Treatments_P Parameter: Tissue Value: Aerial
  misc_feature: MA Experiment 20000633 PARAMETER Experiment Name: Zm_Herbicide-Treatments_P Parameter: Treatment Value: Trimec vs. No Treatment
  misc_feature: MA Experiment ID: 20001608 Result: Up-regulated in Transcription
  misc_feature: MA Experiment 20001608 PARAMETER Experiment Name: Zm_50ppm_KNO3_L-to-H_P Parameter: Age (day) Value: 21
  misc_feature: MA Experiment 20001608 PARAMETER Experiment Name: Zm_50ppm_KNO3_L-to-H_P Parameter: Organism Value: Zea mays
  misc_feature: MA Experiment 20001608 PARAMETER Experiment Name: Zm_50ppm_KNO3_L-to-H_P Parameter: Plant Line Value: 35A19
  misc_feature: MA Experiment 20001608 PARAMETER Experiment Name: Zm_50ppm_KNO3_L-to-H_P Parameter: Timepoint (hr) Value: 48
  misc_feature: MA Experiment 20001608 PARAMETER Experiment Name: Zm_50ppm_KNO3_L-to-H_P Parameter: Tissue Value: Shoots
  misc_feature: MA Experiment 20001608 PARAMETER Experiment Name: Zm_50ppm_KNO3_L-to-H_P Parameter: Treatment Value: 50ppm KNO3 vs. 50ppm KCl
ctcgcaccaccaccgtcactcaacacagcacaggcagctcgagagagagagagaaagatgtcgtggttcgggcaccaccaccacaaccagccggctcccccggcgtcgggccccaaccaggtgttcaagatcttctgccgcgccaacgagaactactgcctggccgtccgcgacggcgccgtcgtgctggccccggtcaaccccaaggacgaccaccagcactggtacaaggacatgcgcttcagcacccgggtcaaggacgaggaaggcatgccggcgttcgcgctcgtcaacaaggccacggggctcgccatcaagcactccctcggccagtcccacccggtcaagctcgcgcctttcagcccggaccaggaggacgcgtcggtgctgtggacggagagcaaggacgtgggcaagggcttccgctgcatccgcatggtcaacaacacccgcctcaacttcgacgccttccacggcgacaaggaccacggcggcgtgcacgacggcaccaccgtggtgctgtgggagtgggccaagggcgacaaccagagctggaagatcctgccctggggcgacgaggcctacgccgggggcggcancagcgccgccaacgcgccccgcttcggcggcggcgagcccaccgtccgcatntactgcaaggccgacgaagggttcagcgccacggtccgcaacggcgccgtgtgcctcgcgcccaccaacccgcgcgacgagtaccagcactggatcaaggacatgcgccacatcaacagcgtcaaggacgaggaagggtacccggccttcgcgctcgtcaacagggtcaccggcgaggccatcaagcactccctgtgtgtttgtgtttagttccagtcgtttgtgaggaagtcagttatgtttgagtgagaggggtacttcgctcttcggttaactctgtacttgtcatgaggagagttttcatacccggagtgtagaactctgtactgtactcggatccttcctttttcatccaagtgggttttattttatcaaccg

SEQ ID NO: 3799 - protein, 297 aa, Zea mays subsp. mays
  peptide (1)..(297): Ceres Seq. ID no. 13564873
  misc_feature (23)..(265): Pfam Name: High molecular weight glutenin subunit Pfam Description: High molecular weight glutenin subunit
  misc_feature (199)..(199): Xaa is any aa, unknown or other
  misc_feature (217)..(217): Xaa is any aa, unknown or other
RTTTVTQHSTGSSREREKDVVVRAPPPQPAGSPGVGPQPGVQDLLPRQRELLPGRPRRRRRAGPGQPQGRPPALVQGHALQHPGQGRGRHAGVRARQQGHGARHQALPRPVPPGQARAFQPGPGGRVGAVDGEQGRGQGLPLHPHGQQHPPQLRRLPRRQGPRRRARRHHRGAVGVGQGRQPELEDPALGRRGLRRGRXQRRQRAPLRRRRAHRPHXLQGRRRVQRHGPQRRRVPRAHQPARRVPALDQGHAPHQQRQGRGRVPGLRARQQGHRRGHQALPVCLCLVPVVCEEVSYV

SEQ ID NO: 3800 - protein, 291 aa, Zea mays subsp. mays
  peptide (1)..(291): Ceres Seq. ID no. 13564874
  misc_feature (23)..(280): Pfam Name: Equine herpesvirus glycoprotein gp2 Pfam Description: Equine herpesvirus glycoprotein gp2
  misc_feature (26)..(280): Homolog of NCBI NO: 28574039 NR Description: Salivary gland secretion 1 CG3047-PA [Drosophila
  misc_feature (23)..(280): Homolog of NCBI NO: 28574039 NR Description: Salivary gland secretion 1 CG3047-PA [Drosophila
  misc_feature (25)..(280): Homolog of NCBI NO: 28574039 NR Description: Salivary gland secretion 1 CG3047-PA [Drosophila
  misc_feature (25)..(280): Homolog of NCBI NO: 28574039 NR Description: Salivary gland secretion 1 CG3047-PA [Drosophila
  misc_feature (23)..(291): Homolog of NCBI NO: 13592175 NR Description: ppg3 [Leishmania major]
  misc_feature (25)..(280): Homolog of NCBI NO: 28574039 NR Description: Salivary gland secretion 1 CG3047-PA [Drosophila
  misc_feature (25)..(282): Homolog of NCBI NO: 28574039 NR Description: Salivary gland secretion 1 CG3047-PA [Drosophila
  misc_feature (34)..(228): Homolog of NCBI NO: 34394516 NR Description: putative r40c1 protein [Oryza sativa (japonica
  misc_feature (25)..(282): Homolog of NCBI NO: 28574039 NR Description: Salivary gland secretion 1 CG3047-PA [Drosophila
  misc_feature (120)..(282): Homolog of NCBI NO: 34394516 NR Description: putative r40c1 protein [Oryza sativa (japonica
  misc_feature (200)..(200): Xaa is any aa, unknown or other
  misc_feature (217)..(217): Xaa is any aa, unknown or other
SHHHRHSTQHRQLERERERCRGSGTTTTTSRLPRRRAPTRCSRSSAAPTRTTAWPSATAPSCWPRSTPRTTTSTGTRTCASAPGSRTRKACRRSRSSTRPRGSPSSTPSASPTRSSSRLSARTRRTRRCCGRRARTWARASAASAWSTTPASTSTPSTATRTTAACTTAPPWCCGSGPRATTRAGRSCPGATRPTPGAAXAPPTRPASAAASPPSAXTARPTKGSAPRSATAPCASRPPTRATSTSTGSRTCATSTASRTRKGTRPSRSSTGSPARPSSTPCVFVFSSSRL

SEQ ID NO: 3801 - protein, 286 aa, Zea mays subsp. mays
  peptide (1)..(286): Ceres Seq. ID no. 13564875
  misc_feature (142)..(190): Pfam Name: QXW lectin repeat Pfam Description: QXW lectin repeat
  misc_feature (20)..(190): Homolog of NCBI NO: 7489572 NR Description: r40g2 protein - rice (fragment)
  misc_feature (38)..(190): Homolog of NCBI NO: 7489573 NR Description: r40g3 protein - rice
  misc_feature (23)..(115): Homolog of NCBI NO: 34394516 NR Description: putative r40c1 protein [Oryza sativa (japonica
  misc_feature (20)..(190): Homolog of NCBI NO: 34394518 NR Description: putative r40c2 protein [Oryza sativa (japonica
  misc_feature (20)..(190): Homolog of NCBI NO: 34394517 NR Description: r40g2 protein [Oryza sativa (japonica
  misc_feature (79)..(281): Homolog of NCBI NO: 34394518 NR Description: putative r40c2 protein [Oryza sativa (japonica
  misc_feature (20)..(281): Homolog of NCBI NO: 7489572 NR Description: r40g2 protein - rice (fragment)
  misc_feature (20)..(281): Homolog of NCBI NO: 34394517 NR Description: r40g2 protein [Oryza sativa (japonica
  misc_feature (20)..(281): Homolog of NCBI NO: 34902150 NR Description: Putative r40c1 protein - rice
  misc_feature (20)..(281): Homolog of NCBI NO: 7489571 NR Description: r40c1 protein - rice
  misc_feature (200)..(200): Xaa is any aa, unknown or other
  misc_feature (217)..(217): Xaa is any aa, unknown or other
LAPPPSLNTAQAARERERKMSWFGHHHHNQPAPPASGPNQVFKIFCRANENYCLAVRDGAVVLAPVNPKDDHQHWYKDMRFSTRVKDEEGMPAFALVNKATGLAIKHSLGQSHPVKLAPFSPDQEDASVLWTESKDVGKGFRCIRMVNNTRLNFDAFHGDKDHGGVHDGTTVVLWEWAKGDNQSWKILPWGDEAYAGGGXSAANAPRFGGGEPTVRXYCKADEGFSATVRNGAVCLAPTNPRDEYQHWIKDMRHINSVKDEEGYPAFALVNRVTGEAIKHSLCVCV

SEQ ID NO: 3802 - protein, 267 aa, Zea mays subsp. mays
  peptide (1)..(267): Ceres Seq. ID no. 13564876
  misc_feature (123)..(171): Pfam Name: QXW lectin repeat Pfam Description: QXW lectin repeat
  misc_feature (1)..(171): Homolog of NCBI NO: 7489572 NR Description: r40g2 protein - rice (fragment)
  misc_feature (19)..(171): Homolog of NCBI NO: 7489573 NR Description: r40g3 protein - rice
  misc_feature (4)..(96): Homolog of NCBI NO: 34394516 NR Description: putative r40c1 protein [Oryza sativa (japonica
  misc_feature (1)..(171): Homolog of NCBI NO: 34394518 NR Description: putative r40c2 protein [Oryza sativa (japonica
  misc_feature (1)..(171): Homolog of NCBI NO: 34394517 NR Description: r40g2 protein [Oryza sativa (japonica
  misc_feature (60)..(262): Homolog of NCBI NO: 34394518 NR Description: putative r40c2 protein [Oryza sativa (japonica
  misc_feature (1)..(262): Homolog of NCBI NO: 7489572 NR Description: r40g2 protein - rice (fragment)
  misc_feature (1)..(262): Homolog of NCBI NO: 34394517 NR Description: r40g2 protein [Oryza sativa (japonica
  misc_feature (1)..(262): Homolog of NCBI NO: 34902150 NR Description: Putative r40c1 protein - rice
  misc_feature (1)..(262): Homolog of NCBI NO: 7489571 NR Description: r40c1 protein - rice
  misc_feature (181)..(181): Xaa is any aa, unknown or other
  misc_feature (198)..(198): Xaa is any aa, unknown or other
MSWFGHHHHNQPAPPASGPNQVFKIFCRANENYCLAVRDGAVVLAPVNPKDDHQHWYKDMRFSTRVKDEEGMPAFALVNKATGLAIKHSLGQSHPVKLAPFSPDQEDASVLWTESKDVGKGFRCIRMVNNTRLNFDAFHGDKDHGGVHDGTTVVLWEWAKGDNQSWKILPWGDEAYAGGGXSAANAPRFGGGEPTVRXYCKADEGFSATVRNGAVCLAPTNPRDEYQHWIKDMRHINSVKDEEGYPAFALVNRVTGEAIKHSLCVCV

SEQ ID NO: 3803 - DNA, 901 bp, Zea mays subsp. mays
  misc_feature (1)..(901): Ceres Seq. ID no. 12342757
  misc_feature: MA Experiment ID: 108535 Result: Down-regulated in Transcription
  misc_feature: MA Experiment 108535 PARAMETER Experiment Name: Zm_Meristem_P Parameter: Age (day) Value: 8
  misc_feature: MA Experiment 108535 PARAMETER Experiment Name: Zm_Meristem_P Parameter: Organism Value: Zea mays
  misc_feature: MA Experiment 108535 PARAMETER Experiment Name: Zm_Meristem_P Parameter: Plant Line Value: 35A19
  misc_feature: MA Experiment 108535 PARAMETER Experiment Name: Zm_Meristem_P Parameter: Tissue Value: Root Meristem vs. Above Root Meristem
  misc_feature: MA Experiment ID: 108536 Result: Down-regulated in Transcription
  misc_feature: MA Experiment 108536 PARAMETER Experiment Name: Zm_Meristem_P Parameter: Age (day) Value: 8
  misc_feature: MA Experiment 108536 PARAMETER Experiment Name: Zm_Meristem_P Parameter: Organism Value: Zea mays
  misc_feature: MA Experiment 108536 PARAMETER Experiment Name: Zm_Meristem_P Parameter: Plant Line Value: 35A19
  misc_feature: MA Experiment 108536 PARAMETER Experiment Name: Zm_Meristem_P Parameter: Tissue Value: Shoot Meristem vs. Above Shoot Meristem
  misc_feature: MA Experiment ID: 108543 Result: Up-regulated in Transcription
  misc_feature: MA Experiment ID: 20000477 Result: Down-regulated in Transcription
  misc_feature: MA Experiment 20000477 PARAMETER Experiment Name: Zm_5mM_SA_P Parameter: Age (day) Value: 10
  misc_feature: MA Experiment 20000477 PARAMETER Experiment Name: Zm_5mM_SA_P Parameter: Organism Value: Zea mays
  misc_feature: MA Experiment 20000477 PARAMETER Experiment Name: Zm_5mM_SA_P Parameter: Plant Line Value: 35A19
  misc_feature: MA Experiment 20000477 PARAMETER Experiment Name: Zm_5mM_SA_P Parameter: Timepoint (hr) Value: 48
  misc_feature: MA Experiment 20000477 PARAMETER Experiment Name: Zm_5mM_SA_P Parameter: Tissue Value: Aerial
  misc_feature: MA Experiment 20000477 PARAMETER Experiment Name: Zm_5mM_SA_P Parameter: Treatment Value: 5mM SA vs. No Treatment
  misc_feature: MA Experiment ID: 20000478 Result: Down-regulated in Transcription
  misc_feature: MA Experiment 20000478 PARAMETER Experiment Name: Zm_5mM_SA_P Parameter: Age (day) Value: 11
  misc_feature: MA Experiment 20000478 PARAMETER Experiment Name: Zm_5mM_SA_P Parameter: Organism Value: Zea mays
  misc_feature: MA Experiment 20000478 PARAMETER Experiment Name: Zm_5mM_SA_P Parameter: Plant Line Value: 35A19
  misc_feature: MA Experiment 20000478 PARAMETER Experiment Name: Zm_5mM_SA_P Parameter: Timepoint (hr) Value: 72
  misc_feature: MA Experiment 20000478 PARAMETER Experiment Name: Zm_5mM_SA_P Parameter: Tissue Value: Aerial
  misc_feature: MA Experiment 20000478 PARAMETER Experiment Name: Zm_5mM_SA_P Parameter: Treatment Value: 5mM SA vs. No Treatment
  misc_feature: MA Experiment ID: 20000480 Result: Down-regulated in Transcription
  misc_feature: MA Experiment 20000480 PARAMETER Experiment Name: Zm_Drought_P Parameter: Age (day) Value: 11
  misc_feature: MA Experiment 20000480 PARAMETER Experiment Name: Zm_Drought_P Parameter: Organism Value: Zea mays
  misc_feature: MA Experiment 20000480 PARAMETER Experiment Name: Zm_Drought_P Parameter: Plant Line Value: 35A19
  misc_feature: MA Experiment 20000480 PARAMETER Experiment Name: Zm_Drought_P Parameter: Timepoint (hr) Value: 72
  misc_feature: MA Experiment 20000480 PARAMETER Experiment Name: Zm_Drought_P Parameter: Tissue Value: Aerial
  misc_feature: MA Experiment 20000480 PARAMETER Experiment Name: Zm_Drought_P Parameter: Treatment Value: Drought vs. No Drought
aaccaacccactcatcactcctcactcactcactcaaaacgaaagccagctcagctcagctctgctcagctcatctgctcacacctcacacccacaggccggccgccacagcaccgcggatagcagagcggcagctaggtcggtcgtcgtcgtcgtcgtcagccatgagcaaggacaagcaccacaagcacgagcaccacctgcggcgttgctgcgggtgcatggcgtcgtgcctcctggcgctggtcctcatcgtggccttcgtctcgctggtggtgtacctggcgctgcgcccctcgaagccgtccttctacctgcaggacctgcagctgcgcaggcccatctcgctgggcgacccgtcgctgacggcgtcggcgcaggtgacgctggcctcccgcaaccccaacgaccgcgtgggcatcttctacaagcgcctggacgtgttcgtcacctaccgcgacgaggccgtgacggtgcccgtgtctctgccgccgcagtaccagggccaccgcgacttcaccgtctggtcccccgtgctgtcggccgagtccgtgcccgtggccgcctacgtcgccgacgccatgaagcaggacgtcgccgcgggcttcgtcgcgctgcaggtcaaggtggacggccgcgtcaagtggaaggtcggcagctgggtctccggcagctaccacctcttcgtcagctgccccgccgtgctctccgcgggctaccccggcgtcaacaacaccgtgtcgtcgctcaagttcgcccagcccacaggatgcagcgtcgaggtgtgagtttgtgaccaaacaagtgccctgccctgccccctacgtattgttgcgtgctactcaaatttcatcttttgggtgcgacggccgccgttaactgggctcttttaattttgtcc

SEQ ID NO: 3804 - protein, 264 aa, Zea mays subsp. mays
  peptide (1)..(264): Ceres Seq. ID no. 12342758
TNPLITPHSLTQNESQLSSALLSSSAHTSHPQAGRHSTADSRAAARSVVVVVVSHEQGQAPQARAPPAALLRVHGVVPPGAGPHRGLRLAGGVPGAAPLEAVLLPAGPAAAQAHLAGRPVADGVGAGDAGLPQPQRPRGHLLQAPGRVRHLPRRGRDGARVSAAAVPGPPRLHRLVPRAVGRVRARGRLRRRRHEAGRRRGLRRAAGQGGRPRQVEGRQLGLRQLPPLRQLPRRALRGLPRRQQHRVVAQVRPAHRMQRRGVSL

SEQ ID NO: 3805 - protein, 261 aa, Zea mays subsp. mays
  peptide (1)..(261): Ceres Seq. ID no. 12342759
  misc_feature (69)..(261): Homolog of NCBI NO: 15227538 NR Description: hairpin-induced protein, putative (HIN1)
  misc_feature (55)..(261): Homolog of NCBI NO: 15231227 NR Description: hairpin-induced protein, putative (HIN1)
  misc_feature (68)..(261): Homolog of NCBI NO: 38637038 NR Description: harpin-induced protein 1 family (HIN1)-like
  misc_feature (56)..(261): Homolog of NCBI NO: 15240001 NR Description: hairpin-induced protein, putative (HIN1); protein
  misc_feature (63)..(261): Homolog of NCBI NO: 28392929 NR Description: putative VAMP protein SEC22 [Arabidopsis thaliana]
  misc_feature (63)..(261): Homolog of NCBI NO: 18399308 NR Description: VAMP protein SEC22
  misc_feature (62)..(261): Homolog of NCBI NO: 32488715 NR Description: OSJNBa0088H09.16 [Oryza sativa (japonica
  misc_feature (58)..(261): Homolog of NCBI NO: 15229906 NR Description: hairpin-induced protein, putative (HIN1); protein
  misc_feature (58)..(261): Homolog of NCBI NO: 22326984 NR Description: similar to hairpin-induced protein, putative
  misc_feature (55)..(261): Homolog of NCBI NO: 38344036 NR Description: OJ991214_12.17 [Oryza sativa (japonica
PTHSSLLTHSLKTKASSAQLCSAHLLTPHTHRPAATAPRIAERQLGRSSSSSSAMSKDKHHKHEHHLRRCCGCMASCLLALVLIVAFVSLVVYLALRPSKPSFYLQDLQLRRPISLGDPSLTASAQVTLASRNPNDRVGIFYKRLDVFVTYRDEAVTVPVSLPPQYQGHRDFTVWSPVLSAESVPVAAYVADAMKQDVAAGFVALQVKVDGRVKWKVGSWVSGSYHLFVSCPAVLSAGYPGVNNTVSSLKFAQPTGCSVEV

SEQ ID NO: 3806 - protein, 207 aa, Zea mays subsp. mays
  peptide (1)..(207): Ceres Seq. ID no. 12342760
  misc_feature (15)..(207): Homolog of NCBI NO: 15227538 NR Description: hairpin-induced protein, putative (HIN1)
  misc_feature (1)..(207): Homolog of NCBI NO: 15231227 NR Description: hairpin-induced protein, putative (HIN1)
  misc_feature (14)..(207): Homolog of NCBI NO: 38637038 NR Description: harpin-induced protein 1 family (HIN1)-like
  misc_feature (2)..(207): Homolog of NCBI NO: 15240001 NR Description: hairpin-induced protein, putative (HIN1); protein
  misc_feature (9)..(207): Homolog of NCBI NO: 28392929 NR Description: putative VAMP protein SEC22 [Arabidopsis thaliana]
  misc_feature (9)..(207): Homolog of NCBI NO: 18399308 NR Description: VAMP protein SEC22
  misc_feature (8)..(207): Homolog of NCBI NO: 32488715 NR Description: OSJNBa0088H09.16 [Oryza sativa (japonica
  misc_feature (4)..(207): Homolog of NCBI NO: 15229906 NR Description: hairpin-induced protein, putative (HIN1); protein
  misc_feature (4)..(207): Homolog of NCBI NO: 22326984 NR Description: similar to hairpin-induced protein, putative
  misc_feature (1)..(207): Homolog of NCBI NO: 38344036 NR Description: OJ991214_12.17 [Oryza sativa (japonica
MSKDKHHKHEHHLRRCCGCMASCLLALVLIVAFVSLVVYLALRPSKPSFYLQDLQLRRPISLGDPSLTASAQVTLASRNPNDRVGIFYKRLDVFVTYRDEAVTVPVSLPPQYQGHRDFTVWSPVLSAESVPVAAYVADAMKQDVAAGFVALQVKVDGRVKWKVGSWVSGSYHLFVSCPAVLSAGYPGVNNTVSSLKFAQPTGCSVEV

SEQ ID NO: 3807 - DNA, 1097 bp, Zea mays subsp. mays
  misc_feature (1)..(1097): Ceres Seq. ID no. 13494437
  misc_feature: MA Experiment ID: 108504 Result: Up-regulated in Transcription
  misc_feature: MA Experiment 108504 PARAMETER Experiment Name: Zm_Drought_P Parameter: Age (day) Value: 8
  misc_feature: MA Experiment 108504 PARAMETER Experiment Name: Zm_Drought_P Parameter: Organism Value: Zea mays
  misc_feature: MA Experiment 108504 PARAMETER Experiment Name: Zm_Drought_P Parameter: Plant Line Value: 35A19
  misc_feature: MA Experiment 108504 PARAMETER Experiment Name: Zm_Drought_P Parameter: Timepoint (hr) Value: 12
  misc_feature: MA Experiment 108504 PARAMETER Experiment Name: Zm_Drought_P Parameter: Tissue Value: Aerial
  misc_feature: MA Experiment 108504 PARAMETER Experiment Name: Zm_Drought_P Parameter: Treatment Value: Drought vs. No Drought
  misc_feature: MA Experiment ID: 108513 Result: Up-regulated in Transcription
  misc_feature: MA Experiment 108513 PARAMETER Experiment Name: Zm_100uM_ABA_P Parameter: Age (day) Value: 8
  misc_feature: MA Experiment 108513 PARAMETER Experiment Name: Zm_100uM_ABA_P Parameter: Organism Value: Zea mays
  misc_feature: MA Experiment 108513 PARAMETER Experiment Name: Zm_100uM_ABA_P Parameter: Plant Line Value: 35A19
  misc_feature: MA Experiment 108513 PARAMETER Experiment Name: Zm_100uM_ABA_P Parameter: Timepoint (hr) Value: 6
  misc_feature: MA Experiment 108513 PARAMETER Experiment Name: Zm_100uM_ABA_P Parameter: Tissue Value: Aerial
  misc_feature: MA Experiment 108513 PARAMETER Experiment Name: Zm_100uM_ABA_P Parameter: Treatment Value: 100uM ABA vs. No Treatment
  misc_feature: MA Experiment ID: 108522 Result: Up-regulated in Transcription
  misc_feature: MA Experiment 108522 PARAMETER Experiment Name: Zm_42deg_Heat_P Parameter: Age (day) Value: 8
  misc_feature: MA Experiment 108522 PARAMETER Experiment Name: Zm_42deg_Heat_P Parameter: Organism Value: Zea mays
  misc_feature: MA Experiment 108522 PARAMETER Experiment Name: Zm_42deg_Heat_P Parameter: Plant Line Value: 35A19
  misc_feature: MA Experiment 108522 PARAMETER Experiment Name: Zm_42deg_Heat_P Parameter: Temperature (deg C) Value: 42 vs. 22
  misc_feature: MA Experiment 108522 PARAMETER Experiment Name: Zm_42deg_Heat_P Parameter: Timepoint (hr) Value: 1
  misc_feature: MA Experiment 108522 PARAMETER Experiment Name: Zm_42deg_Heat_P Parameter: Tissue Value: Aerial
  misc_feature: MA Experiment ID: 108523 Result: Up-regulated in Transcription
  misc_feature: MA Experiment 108523 PARAMETER Experiment Name: Zm_42deg_Heat_P Parameter: Age (day) Value: 8
  misc_feature: MA Experiment 108523 PARAMETER Experiment Name: Zm_42deg_Heat_P Parameter: Organism Value: Zea mays
  misc_feature: MA Experiment 108523 PARAMETER Experiment Name: Zm_42deg_Heat_P Parameter: Plant Line Value: 35A19
  misc_feature: MA Experiment 108523 PARAMETER Experiment Name: Zm_42deg_Heat_P Parameter: Temperature (deg C) Value: 42 vs. 22
  misc_feature: MA Experiment 108523 PARAMETER Experiment Name: Zm_42deg_Heat_P Parameter: Timepoint (hr) Value: 6
  misc_feature: MA Experiment 108523 PARAMETER Experiment Name: Zm_42deg_Heat_P Parameter: Tissue Value: Aerial
  misc_feature: MA Experiment ID: 108532 Result: Up-regulated in Transcription
  misc_feature: MA Experiment 108532 PARAMETER Experiment Name: Zm_20uM_KNO3_H-to-L_P Parameter: Age (day) Value: 11
  misc_feature: MA Experiment 108532 PARAMETER Experiment Name: Zm_20uM_KNO3_H-to-L_P Parameter: Organism Value: Zea mays
  misc_feature: MA Experiment 108532 PARAMETER Experiment Name: Zm_20uM_KNO3_H-to-L_P Parameter: Plant Line Value: 35A19
  misc_feature: MA Experiment 108532 PARAMETER Experiment Name: Zm_20uM_KNO3_H-to-L_P Parameter: Timepoint (hr) Value: 16
  misc_feature: MA Experiment 108532 PARAMETER Experiment Name: Zm_20uM_KNO3_H-to-L_P Parameter: Tissue Value: Roots
  misc_feature: MA Experiment 108532 PARAMETER Experiment Name: Zm_20uM_KNO3_H-to-L_P Parameter: Treatment Value: 20uM KNO3 vs. 60mM KNO3
  misc_feature: MA Experiment ID: 108534 Result: Down-regulated in Transcription
  misc_feature: MA Experiment 108534 PARAMETER Experiment Name: Zm_4deg_Cold_P Parameter: Age (hr) Value: 8
  misc_feature: MA Experiment 108534 PARAMETER Experiment Name: Zm_4deg_Cold_P Parameter: Organism Value: Zea mays
  misc_feature: MA Experiment 108534 PARAMETER Experiment Name: Zm_4deg_Cold_P Parameter: Plant Line Value: 35A19
  misc_feature: MA Experiment 108534 PARAMETER Experiment Name: Zm_4deg_Cold_P Parameter: Temperature (deg C) Value: 4 vs. 22
  misc_feature: MA Experiment 108534 PARAMETER Experiment Name: Zm_4deg_Cold_P Parameter: Timepoint (hr) Value: 6
  misc_feature: MA Experiment 108534 PARAMETER Experiment Name: Zm_4deg_Cold_P Parameter: Tissue Value: Aerial
  misc_feature: MA Experiment ID: 108540 Result: Up-regulated in Transcription
  misc_feature: MA Experiment 108540 PARAMETER Experiment Name: Zm_20percent_PEG_P Parameter: Age (day) Value: 8
  misc_feature: MA Experiment 108540 PARAMETER Experiment Name: Zm_20percent_PEG_P Parameter: Organism Value: Zea mays
  misc_feature: MA Experiment 108540 PARAMETER Experiment Name: Zm_20percent_PEG_P Parameter: Plant Line Value: 35A19
  misc_feature: MA Experiment 108540 PARAMETER Experiment Name: Zm_20percent_PEG_P Parameter: Timepoint (hr) Value: 6
  misc_feature: MA Experiment 108540 PARAMETER Experiment Name: Zm_20percent_PEG_P Parameter: Tissue Value: Aerial
  misc_feature: MA Experiment 108540 PARAMETER Experiment Name: Zm_20percent_PEG_P Parameter: Treatment Value: 20percent PEG vs. No Treatment
  misc_feature: MA Experiment ID: 108543 Result: Up-regulated in Transcription
  misc_feature: MA Experiment ID: 108544 Result: Up-regulated in Transcription
  misc_feature: MA Experiment ID: 108548 Result: Up-regulated in Transcription
  misc_feature: MA Experiment 108548 PARAMETER Experiment Name: Zm_20uM_KNO3_H-to-L_P Parameter: Age (day) Value: 11
  misc_feature: MA Experiment 108548 PARAMETER Experiment Name: Zm_20uM_KNO3_H-to-L_P Parameter: Organism Value: Zea mays
  misc_feature: MA Experiment 108548 PARAMETER Experiment Name: Zm_20uM_KNO3_H-to-L_P Parameter: Plant Line Value: 35A19
  misc_feature: MA Experiment 108548 PARAMETER Experiment Name: Zm_20uM_KNO3_H-to-L_P Parameter: Timepoint (hr) Value: 4
  misc_feature: MA Experiment 108548 PARAMETER Experiment Name: Zm_20uM_KNO3_H-to-L_P Parameter: Tissue Value: Roots
  misc_feature: MA Experiment 108548 PARAMETER Experiment Name: Zm_20uM_KNO3_H-to-L_P Parameter: Treatment Value: 20uM KNO3 vs. 60mM KNO3
  misc_feature: MA Experiment ID: 108689 Result: Up-regulated in Transcription
  misc_feature: MA Experiment 108689 PARAMETER Experiment Name: Zm_Drought_Roots_P Parameter: Age (day) Value: 9
  misc_feature: MA Experiment 108689 PARAMETER Experiment Name: Zm_Drought_Roots_P Parameter: Organism Value: Zea mays
  misc_feature: MA Experiment 108689 PARAMETER Experiment Name: Zm_Drought_Roots_P Parameter: Plant Line Value: 35A19
  misc_feature: MA Experiment 108689 PARAMETER Experiment Name: Zm_Drought_Roots_P Parameter: Timepoint (hr) Value: 24
  misc_feature: MA Experiment 108689 PARAMETER Experiment Name: Zm_Drought_Roots_P Parameter: Tissue Value: Roots
  misc_feature: MA Experiment 108689 PARAMETER Experiment Name: Zm_Drought_Roots_P Parameter: Treatment Value: Drought vs. No Drought
  misc_feature: MA Experiment ID: 20000480 Result: Up-regulated in Transcription
  misc_feature: MA Experiment 20000480 PARAMETER Experiment Name: Zm_Drought_P Parameter: Age (day) Value: 11
  misc_feature: MA Experiment 20000480 PARAMETER Experiment Name: Zm_Drought_P Parameter: Organism Value: Zea mays
  misc_feature: MA Experiment 20000480 PARAMETER Experiment Name: Zm_Drought_P Parameter: Plant Line Value: 35A19
  misc_feature: MA Experiment 20000480 PARAMETER Experiment Name: Zm_Drought_P Parameter: Timepoint (hr) Value: 72
  misc_feature: MA Experiment 20000480 PARAMETER Experiment Name: Zm_Drought_P Parameter: Tissue Value: Aerial
  misc_feature: MA Experiment 20000480 PARAMETER Experiment Name: Zm_Drought_P Parameter: Treatment Value: Drought vs. No Drought
  misc_feature: MA Experiment ID: 20000487 Result: Down-regulated in Transcription
  misc_feature: MA Experiment 20000487 PARAMETER Experiment Name: Zm_50mM_NH4NO3_L_to_H_P Parameter: Organism Value: Zea mays
  misc_feature: MA Experiment 20000487 PARAMETER Experiment Name: Zm_50mM_NH4NO3_L_to_H_P Parameter: Timepoint (hr) Value: 4
  misc_feature: MA Experiment 20000487 PARAMETER Experiment Name: Zm_50mM_NH4NO3_L_to_H_P Parameter: Tissue Value: Leaves
  misc_feature: MA Experiment 20000487 PARAMETER Experiment Name: Zm_50mM_NH4NO3_L_to_H_P Parameter: Treatment Value: 50mM NH4NO3 vs. 100mM Mannitol
  misc_feature: MA Experiment ID: 20000535 Result: Up-regulated in Transcription
  misc_feature: MA Experiment 20000535 PARAMETER Experiment Name: Zm_Hybrid_Seed_Dev_P Parameter: DAP Value: 30 vs. 12
  misc_feature: MA Experiment 20000535 PARAMETER Experiment Name: Zm_Hybrid_Seed_Dev_P Parameter: Organism Value: Zea mays
  misc_feature: MA Experiment 20000535 PARAMETER Experiment Name: Zm_Hybrid_Seed_Dev_P Parameter: Plant Line Value: 35A19
  misc_feature: MA Experiment 20000535 PARAMETER Experiment Name: Zm_Hybrid_Seed_Dev_P Parameter: Tissue Value: Embryo vs. Unfert Floret
  misc_feature: MA Experiment ID: 20000626 Result: Up-regulated in Transcription
  misc_feature: MA Experiment 20000626 PARAMETER Experiment Name: Zm_Herbicide-Treatments_P Parameter: Timepoint (hr) Value: 12
  misc_feature: MA Experiment 20000626 PARAMETER Experiment Name: Zm_Herbicide-Treatments_P Parameter: Tissue Value: Aerial
  misc_feature: MA Experiment 20000626 PARAMETER Experiment Name: Zm_Herbicide-Treatments_P Parameter: Treatment Value: Roundup vs. No Treatment
  misc_feature: MA Experiment ID: 20001606 Result: Down-regulated in Transcription
  misc_feature: MA Experiment 20001606 PARAMETER Experiment Name: Zm_50ppm_KNO3_L-to-H_P Parameter: Age (day) Value: 19
  misc_feature: MA Experiment 20001606 PARAMETER Experiment Name: Zm_50ppm_KNO3_L-to-H_P Parameter: Organism Value: Zea mays
  misc_feature: MA Experiment 20001606 PARAMETER Experiment Name: Zm_50ppm_KNO3_L-to-H_P Parameter: Plant Line Value: 35A19
  misc_feature: MA Experiment 20001606 PARAMETER Experiment Name: Zm_50ppm_KNO3_L-to-H_P Parameter: Timepoint (hr) Value: 8
  misc_feature: MA Experiment 20001606 PARAMETER Experiment Name: Zm_50ppm_KNO3_L-to-H_P Parameter: Tissue Value: Shoots
  misc_feature: MA Experiment 20001606 PARAMETER Experiment Name: Zm_50ppm_KNO3_L-to-H_P Parameter: Treatment Value: 50ppm KNO3 vs. 50ppm KCl
  misc_feature: MA Experiment ID: 20001608 Result: Down-regulated in Transcription
  misc_feature: MA Experiment 20001608 PARAMETER Experiment Name: Zm_50ppm_KNO3_L-to-H_P Parameter: Age (day) Value: 21
  misc_feature: MA Experiment 20001608 PARAMETER Experiment Name: Zm_50ppm_KNO3_L-to-H_P Parameter: Organism Value: Zea mays
  misc_feature: MA Experiment 20001608 PARAMETER Experiment Name: Zm_50ppm_KNO3_L-to-H_P Parameter: Plant Line Value: 35A19
  misc_feature: MA Experiment 20001608 PARAMETER Experiment Name: Zm_50ppm_KNO3_L-to-H_P Parameter: Timepoint (hr) Value: 48
  misc_feature: MA Experiment 20001608 PARAMETER Experiment Name: Zm_50ppm_KNO3_L-to-H_P Parameter: Tissue Value: Shoots
  misc_feature: MA Experiment 20001608 PARAMETER Experiment Name: Zm_50ppm_KNO3_L-to-H_P Parameter: Treatment Value: 50ppm KNO3 vs. 50ppm KCl
gcacgagaccattacctagaacatcctaatcgaaaaacagcgagtaccgagtaggagcaaccgcttgcgtcagacgcacactgacggagagtgatcactgatttctggtcatggcaaccgtaactgaggaagttgctccggtcgtcaccgtctccgaggagccggcgccggaagcggcgaaggaggtggtggagaagccggaggaggggaagaagcccgacgaggagggtgacgagaggaagaaggccgaccccgccgccgagaaggagaagaaggcgaggaagccgcggagcaggaagcccaagtccgccgggctgcaccacccgccctatttcgagatgatcaaggaggcgatcctgtcgcaggacggcgggaaggtcggggcgagcccgtacgcgatcgccaagcacatgggggagaagcaccgggacgtgctcccgcccaattaccgcaaggtgctggcagtgcagctgcgcggcttcgccgccaagggccgcctcgtcaaggtcaaggcttccttcaagctcgccgccgccgaggagaggaagccctccgcggccgcgaaggcgaagaagaaggcgtcggcgggaatggccaagcgcaagagggccgccgcgccggccaagaagaagccggcggccgctgcctcggcgccgtcgagggaggcacgtaaggtgcgcgcgaagcgagcgaggaaggtggccccggcgcccgcgcagcccaagcccaagccagcccgcgccgccgcttccggtgccggcaagaaggtcaacaaggccagcgcctgattagcggcggccgtcctggtccccccgcgcgcgcctccgtgtattatactagccggtagtagcagtaggagttgcaagtactagcagcgtggtagtcgtgatgatgttgtggtcgtcgtctccgccggcccgatcgatcgggcgctctgttccgccgtgtggcagagttttgtaaataactagtctggtgtgatgcgctcatggcaataaagcgcgcgcttctagcttccttgatgaaacatccatgatccattatcagtgcagtcttgtggttatcgtgttggttagttcgatcactggaactggctc

SEQ ID NO: 3808 - protein, 225 aa, Zea mays subsp. mays
  peptide (1)..(225): Ceres Seq. ID no. 13494438
  misc_feature (70)..(141): Pfam Name: linker histone H1 and H5 family Pfam Description: linker histone H1 and H5 family
  misc_feature (70)..(141): Pfam Name: linker histone H1 and H5 family Pfam Description: linker histone H1 and H5 family
  misc_feature (70)..(141): Pfam Name: linker histone H1 and H5 family Pfam Description: linker histone H1 and H5 family
  misc_feature (1)..(225): Homolog of NCBI NO: 6006363 NR Description: ESTs AU078183(C62904),C73912(E21020) correspond a region of the predicted gene.~Similar to water stress inducible
  misc_feature (26)..(220): Homolog of NCBI NO: 7439658 NR Description: histone H1, stress-inducible - tomato
  misc_feature (27)..(220): Homolog of NCBI NO: 23506611 NR Description: histone H1D [Nicotiana tabacum]
  misc_feature (22)..(220): Homolog of NCBI NO: 7595978 NR Description: histone H1 variant [Lycopersicon chilense]
  misc_feature (21)..(220): Homolog of NCBI NO: 27529850 NR Description: stress-inducible H1 histone-like protein
  misc_feature (26)..(220): Homolog of NCBI NO: 7439658 NR Description: histone H1, stress-inducible - tomato
  misc_feature (22)..(220): Homolog of NCBI NO: 7595978 NR Description: histone H1 variant [Lycopersicon chilense]
  misc_feature (27)..(220): Homolog of NCBI NO: 23506611 NR Description: histone H1D [Nicotiana tabacum]
  misc_feature (26)..(220): Homolog of NCBI NO: 7439658 NR Description: histone H1, stress-inducible - tomato
  misc_feature (1)..(225): Homolog of NCBI NO: 6006363 NR Description: ESTs AU078183(C62904),C73912(E21020) correspond a region of the predicted gene.~Similar to water stress inducible
  misc_feature (15)..(225): Homolog of NCBI NO: 13540391 NR Description: histone H1 [Pisum sativum]
  misc_feature (1)..(225): Homolog of NCBI NO: 2623960 NR Description: histone H1 [Apium graveolens]
  misc_feature (77)..(215): Homolog of NCBI NO: 7489483 NR Description: histone H1 homolog - rice
  misc_feature (27)..(220): Homolog of NCBI NO: 5726575 NR Description: histone H1C [Nicotiana tabacum]
  misc_feature (27)..(220): Homolog of NCBI NO: 729668 NR Description: Histone H1 >gi|2147479|pir||S65059 histone H1,
  misc_feature (21)..(220): Homolog of NCBI NO: 27529850 NR Description: stress-inducible H1 histone-like protein
  misc_feature (15)..(225): Homolog of NCBI NO: 13540391 NR Description: histone H1 [Pisum sativum]
  misc_feature (1)..(225): Homolog of NCBI NO: 2623960 NR Description: histone H1 [Apium graveolens]
  misc_feature (77)..(215): Homolog of NCBI NO: 7489483 NR Description: histone H1 homolog - rice
  misc_feature (27)..(220): Homolog of NCBI NO: 5726575 NR Description: histone H1C [Nicotiana tabacum]
  misc_feature (27)..(220): Homolog of NCBI NO: 729668 NR Description: Histone H1 >gi|2147479|pir||S65059 histone H1,
  misc_feature (21)..(220): Homolog of NCBI NO: 27529850 NR Description: stress-inducible H1 histone-like protein
  misc_feature (22)..(220): Homolog of NCBI NO: 7595978 NR Description: histone H1 variant [Lycopersicon chilense]
  misc_feature (27)..(220): Homolog of NCBI NO: 23506611 NR Description: histone H1D [Nicotiana tabacum]
  misc_feature (1)..(225): Homolog of NCBI NO: 6006363 NR Description: ESTs AU078183(C62904),C73912(E21020) correspond a region of the predicted gene.~Similar to water stress inducible
  misc_feature (27)..(220): Homolog of NCBI NO: 729668 NR Description: Histone H1 >gi|2147479|pir||S65059 histone H1,
  misc_feature (27)..(220): Homolog of NCBI NO: 5726575 NR Description: histone H1C [Nicotiana tabacum]
  misc_feature (77)..(215): Homolog of NCBI NO: 7489483 NR Description: histone H1 homolog - rice
  misc_feature (1)..(225): Homolog of NCBI NO: 2623960 NR Description: histone H1 [Apium graveolens]
  misc_feature (15)..(225): Homolog of NCBI NO: 13540391 NR Description: histone H1 [Pisum sativum]
MATVTEEVAPVVTVSEEPAPEAAKEVVEKPEEGKKPDEEGDERKKADPAAEKEKKARKPRSRKPKSAGLHHPPYFEMIKEAILSQDGGKVGASPYAIAKHMGEKHRDVLPPNYRKVLAVQLRGFAAKGRLVKVKASFKLAAAEERKPSAAAKAKKKASAGMAKRKRAAAPAKKKPAAAASAPSREARKVRAKRARKVAPAPAQPKPKPARAAASGAGKKVNKASA

SEQ ID NO: 3809 - protein, 149 aa, Zea mays subsp. mays
  peptide (1)..(149): Ceres Seq. ID no. 13494439
  misc_feature (1)..(65): Pfam Name: linker histone H1 and H5 family Pfam Description: linker histone H1 and H5 family
  misc_feature (1)..(65): Pfam Name: linker histone H1 and H5 family Pfam Description: linker histone H1 and H5 family
  misc_feature (1)..(65): Pfam Name: linker histone H1 and H5 family Pfam Description: linker histone H1 and H5 family
  misc_feature (1)..(149): Homolog of NCBI NO: 6006363 NR Description: ESTs AU078183(C62904),C73912(E21020) correspond a region of the predicted gene.~Similar to water stress inducible
  misc_feature (1)..(144): Homolog of NCBI NO: 7439658 NR Description: histone H1, stress-inducible - tomato
  misc_feature (1)..(144): Homolog of NCBI NO: 23506611 NR Description: histone H1D [Nicotiana tabacum]
  misc_feature (1)..(144): Homolog of NCBI NO: 7595978 NR Description: histone H1 variant [Lycopersicon chilense]
  misc_feature (1)..(144): Homolog of NCBI NO: 27529850 NR Description: stress-inducible H1 histone-like protein
  misc_feature (1)..(144): Homolog of NCBI NO: 7439658 NR Description: histone H1, stress-inducible - tomato
  misc_feature (1)..(144): Homolog of NCBI NO: 7595978 NR Description: histone H1 variant [Lycopersicon chilense]
  misc_feature (1)..(144): Homolog of NCBI NO: 23506611 NR Description: histone H1D [Nicotiana tabacum]
  misc_feature (1)..(144): Homolog of NCBI NO: 7439658 NR Description: histone H1, stress-inducible - tomato
  misc_feature (1)..(149): Homolog of NCBI NO: 6006363 NR Description: ESTs AU078183(C62904),C73912(E21020) correspond a region of the predicted gene.~Similar to water stress inducible
  misc_feature (1)..(149): Homolog of NCBI NO: 13540391 NR Description: histone H1 [Pisum sativum]
  misc_feature (1)..(149): Homolog of NCBI NO: 2623960 NR Description: histone H1 [Apium graveolens]
  misc_feature (1)..(139): Homolog of NCBI NO: 7489483 NR Description: histone H1 homolog - rice
  misc_feature (1)..(144): Homolog of NCBI NO: 5726575 NR Description: histone H1C [Nicotiana tabacum]
  misc_feature (1)..(144): Homolog of NCBI NO: 729668 NR Description: Histone H1 >gi|2147479|pir||S65059 histone H1,
  misc_feature (1)..(144): Homolog of NCBI NO: 27529850 NR Description: stress-inducible H1 histone-like protein
  misc_feature (1)..(149): Homolog of NCBI NO: 13540391 NR Description: histone H1 [Pisum sativum]
  misc_feature (1)..(149): Homolog of NCBI NO: 2623960 NR Description: histone H1 [Apium graveolens]
  misc_feature (1)..(139): Homolog of NCBI NO: 7489483 NR Description: histone H1 homolog - rice
  misc_feature (1)..(144): Homolog of NCBI NO: 5726575 NR Description: histone H1C [Nicotiana tabacum]
  misc_feature (1)..(144): Homolog of NCBI NO: 729668 NR Description: Histone H1 >gi|2147479|pir||S65059 histone H1,
  misc_feature (1)..(144): Homolog of NCBI NO: 27529850 NR Description: stress-inducible H1 histone-like protein
  misc_feature (1)..(144): Homolog of NCBI NO: 7595978 NR Description: histone H1 variant [Lycopersicon chilense]
  misc_feature (1)..(144): Homolog of NCBI NO: 23506611 NR Description: histone H1D [Nicotiana tabacum]
  misc_feature (1)..(149): Homolog of NCBI NO: 6006363 NR Description: ESTs AU078183(C62904),C73912(E21020) correspond a region of the predicted gene.~Similar to water stress inducible
  misc_feature (1)..(144): Homolog of NCBI NO: 729668 NR Description: Histone H1 >gi|2147479|pir||S65059 histone H1,
  misc_feature (1)..(144): Homolog of NCBI NO: 5726575 NR Description: histone H1C [Nicotiana tabacum]
  misc_feature (1)..(139): Homolog of NCBI NO: 7489483 NR Description: histone H1 homolog - rice
  misc_feature (1)..(149): Homolog of NCBI NO: 2623960 NR Description: histone H1 [Apium graveolens]
  misc_feature (1)..(149): Homolog of NCBI NO: 13540391 NR Description: histone H1 [Pisum sativum]
MIKEAILSQDGGKVGASPYAIAKHMGEKHRDVLPPNYRKVLAVQLRGFAAKGRLVKVKASFKLAAAEERKPSAAAKAKKKASAGMAKRKRAAAPAKKKPAAAASAPSREARKVRAKRARKVAPAPAQPKPKPARAAASGAGKKVNKASA

SEQ ID NO: 3810 - protein, 125 aa, Zea mays subsp. mays
  peptide (1)..(125): Ceres Seq. ID no. 13494440
  misc_feature (1)..(125): Homolog of NCBI NO: 6006363 NR Description: ESTs AU078183(C62904),C73912(E21020) correspond a region of the predicted gene.~Similar to water stress inducible
  misc_feature (1)..(120): Homolog of NCBI NO: 7439658 NR Description: histone H1, stress-inducible - tomato
  misc_feature (1)..(120): Homolog of NCBI NO: 23506611 NR Description: histone H1D [Nicotiana tabacum]
  misc_feature (1)..(120): Homolog of NCBI NO: 7595978 NR Description: histone H1 variant [Lycopersicon chilense]
  misc_feature (1)..(120): Homolog of NCBI NO: 27529850 NR Description: stress-inducible H1 histone-like protein
  misc_feature (1)..(120): Homolog of NCBI NO: 729668 NR Description: Histone H1 >gi|2147479|pir||S65059 histone H1,
  misc_feature (1)..(120): Homolog of NCBI NO: 5726575 NR Description: histone H1C [Nicotiana tabacum]
  misc_feature (1)..(115): Homolog of NCBI NO: 7489483 NR Description: histone H1 homolog - rice
  misc_feature (1)..(125): Homolog of NCBI NO: 2623960 NR Description: histone H1 [Apium graveolens]
  misc_feature (1)..(125): Homolog of NCBI NO: 13540391 NR Description: histone H1 [Pisum sativum]
  misc_feature (1)..(125): Homolog of NCBI NO: 6006363 NR Description: ESTs AU078183(C62904),C73912(E21020) correspond a region of the predicted gene.~Similar to water stress inducible
  misc_feature (1)..(120): Homolog of NCBI NO: 7439658 NR Description: histone H1, stress-inducible - tomato
  misc_feature (1)..(120): Homolog of NCBI NO: 23506611 NR Description: histone H1D [Nicotiana tabacum]
  misc_feature (1)..(120): Homolog of NCBI NO: 7595978 NR Description: histone H1 variant [Lycopersicon chilense]
  misc_feature (1)..(120): Homolog of NCBI NO: 27529850 NR Description: stress-inducible H1 histone-like protein
  misc_feature (1)..(120): Homolog of NCBI NO: 729668 NR Description: Histone H1 >gi|2147479|pir||S65059 histone H1,
  misc_feature (1)..(120): Homolog of NCBI NO: 5726575 NR Description: histone H1C [Nicotiana tabacum]
  misc_feature (1)..(115): Homolog of NCBI NO: 7489483 NR Description: histone H1 homolog - rice
  misc_feature (1)..(125): Homolog of NCBI NO: 2623960 NR Description: histone H1 [Apium graveolens]
  misc_feature (1)..(125): Homolog of NCBI NO: 13540391 NR Description: histone H1 [Pisum sativum]
  misc_feature (1)..(120): Homolog of NCBI NO: 23506611 NR Description: histone H1D [Nicotiana tabacum]
  misc_feature (1)..(120): Homolog of NCBI NO: 7595978 NR Description: histone H1 variant [Lycopersicon chilense]
  misc_feature (1)..(120): Homolog of NCBI NO: 27529850 NR Description: stress-inducible H1 histone-like protein
  misc_feature (1)..(120): Homolog of NCBI NO: 729668 NR Description: Histone H1 >gi|2147479|pir||S65059 histone H1,
  misc_feature (1)..(120): Homolog of NCBI NO: 5726575 NR Description: histone H1C [Nicotiana tabacum]
  misc_feature (1)..(115): Homolog of NCBI NO: 7489483 NR Description: histone H1 homolog - rice
  misc_feature (1)..(125): Homolog of NCBI NO: 2623960 NR Description: histone H1 [Apium graveolens]
  misc_feature (1)..(125): Homolog of NCBI NO: 13540391 NR Description: histone H1 [Pisum sativum]
  misc_feature (1)..(125): Homolog of NCBI NO: 6006363 NR Description: ESTs AU078183(C62904),C73912(E21020) correspond a region of the predicted gene.~Similar to water stress inducible
  misc_feature (1)..(120): Homolog of NCBI NO: 7439658 NR Description: histone H1, stress-inducible - tomato
MGEKHRDVLPPNYRKVLAVQLRGFAAKGRLVKVKASFKLAAAEERKPSAAAKAKKKASAGMAKRKRAAAPAKKKPAAAASAPSREARKVRAKRARKVAPAPAQPKPKPARAAASGAGKKVNKASA

SEQ ID NO: 3811 - DNA, 986 bp, Zea mays subsp. mays
  misc_feature (1)..(986): Ceres Seq. ID no. 12368544
  misc_feature: MA Experiment ID: 108535 Result: Up-regulated in Transcription
  misc_feature: MA Experiment 108535 PARAMETER Experiment Name: Zm_Meristem_P Parameter: Age (day) Value: 8
  misc_feature: MA Experiment 108535 PARAMETER Experiment Name: Zm_Meristem_P Parameter: Organism Value: Zea mays
  misc_feature: MA Experiment 108535 PARAMETER Experiment Name: Zm_Meristem_P Parameter: Plant Line Value: 35A19
  misc_feature: MA Experiment 108535 PARAMETER Experiment Name: Zm_Meristem_P Parameter: Tissue Value: Root Meristem vs. Above Root Meristem
  misc_feature: MA Experiment ID: 108540 Result: Down-regulated in Transcription
  misc_feature: MA Experiment 108540 PARAMETER Experiment Name: Zm_20percent_PEG_P Parameter: Age (day) Value: 8
  misc_feature: MA Experiment 108540 PARAMETER Experiment Name: Zm_20percent_PEG_P Parameter: Organism Value: Zea mays
  misc_feature: MA Experiment 108540 PARAMETER Experiment Name: Zm_20percent_PEG_P Parameter: Plant Line Value: 35A19
  misc_feature: MA Experiment 108540 PARAMETER Experiment Name: Zm_20percent_PEG_P Parameter: Timepoint (hr) Value: 6
  misc_feature: MA Experiment 108540 PARAMETER Experiment Name: Zm_20percent_PEG_P Parameter: Tissue Value: Aerial
  misc_feature: MA Experiment 108540 PARAMETER Experiment Name: Zm_20percent_PEG_P Parameter: Treatment Value: 20percent PEG vs. No Treatment
  misc_feature: MA Experiment ID: 108544 Result: Down-regulated in Transcription
  misc_feature: MA Experiment ID: 108556 Result: Down-regulated in Transcription
  misc_feature: MA Experiment 108556 PARAMETER Experiment Name: Zm_Drought_P Parameter: Age (day) Value: 9
  misc_feature: MA Experiment 108556 PARAMETER Experiment Name: Zm_Drought_P Parameter: Organism Value: Zea mays
  misc_feature: MA Experiment 108556 PARAMETER Experiment Name: Zm_Drought_P Parameter: Plant Line Value: 35A19
  misc_feature: MA Experiment 108556 PARAMETER Experiment Name: Zm_Drought_P Parameter: Timepoint (hr) Value: 24
  misc_feature: MA Experiment 108556 PARAMETER Experiment Name: Zm_Drought_P Parameter: Tissue Value: Aerial
  misc_feature: MA Experiment 108556 PARAMETER Experiment Name: Zm_Drought_P Parameter: Treatment Value: Drought vs. No Drought
  misc_feature: MA Experiment ID: 108559 Result: Down-regulated in Transcription
  misc_feature: MA Experiment 108559 PARAMETER Experiment Name: Zm_5mM_NO_P Parameter: Age (day) Value: 8
  misc_feature: MA Experiment 108559 PARAMETER Experiment Name: Zm_5mM_NO_P Parameter: Organism Value: Zea mays
  misc_feature: MA Experiment 108559 PARAMETER Experiment Name: Zm_5mM_NO_P Parameter: Plant Line Value: 35A19
  misc_feature: MA Experiment 108559 PARAMETER Experiment Name: Zm_5mM_NO_P Parameter: Timepoint (hr) Value: 12
  misc_feature: MA Experiment 108559 PARAMETER Experiment Name: Zm_5mM_NO_P Parameter: Tissue Value: Aerial
  misc_feature: MA Experiment 108559 PARAMETER Experiment Name: Zm_5mM_NO_P Parameter: Treatment Value: 5mM NO vs. No Treatment
  misc_feature: MA Experiment ID: 108597 Result: Down-regulated in Transcription
  misc_feature: MA Experiment 108597 PARAMETER Experiment Name: Zm_100uM_ABA_P Parameter: Age (day) Value: 9
  misc_feature: MA Experiment 108597 PARAMETER Experiment Name: Zm_100uM_ABA_P Parameter: Organism Value: Zea mays
  misc_feature: MA Experiment 108597 PARAMETER Experiment Name: Zm_100uM_ABA_P Parameter: Plant Line Value: 35A19
  misc_feature: MA Experiment 108597 PARAMETER Experiment Name: Zm_100uM_ABA_P Parameter: Timepoint (hr) Value: 24
  misc_feature: MA Experiment 108597 PARAMETER Experiment Name: Zm_100uM_ABA_P Parameter: Tissue Value: Aerial
  misc_feature: MA Experiment 108597 PARAMETER Experiment Name: Zm_100uM_ABA_P Parameter: Treatment Value: 100uM ABA vs. No Treatment
  misc_feature: MA Experiment ID: 20000477 Result: Down-regulated in Transcription
  misc_feature: MA Experiment 20000477 PARAMETER Experiment Name: Zm_5mM_SA_P Parameter: Age (day) Value: 10
  misc_feature: MA Experiment 20000477 PARAMETER Experiment Name: Zm_5mM_SA_P Parameter: Organism Value: Zea mays
  misc_feature: MA Experiment 20000477 PARAMETER Experiment Name: Zm_5mM_SA_P Parameter: Plant Line Value: 35A19
  misc_feature: MA Experiment 20000477 PARAMETER Experiment Name: Zm_5mM_SA_P Parameter: Timepoint (hr) Value: 48
  misc_feature: MA Experiment 20000477 PARAMETER Experiment Name: Zm_5mM_SA_P Parameter: Tissue Value: Aerial
  misc_feature: MA Experiment 20000477 PARAMETER Experiment Name: Zm_5mM_SA_P Parameter: Treatment Value: 5mM SA vs. No Treatment
  misc_feature: MA Experiment ID: 20000480 Result: Down-regulated in Transcription
  misc_feature: MA Experiment 20000480 PARAMETER Experiment Name: Zm_Drought_P Parameter: Age (day) Value: 11
  misc_feature: MA Experiment 20000480 PARAMETER Experiment Name: Zm_Drought_P Parameter: Organism Value: Zea mays
  misc_feature: MA Experiment 20000480 PARAMETER Experiment Name: Zm_Drought_P Parameter: Plant Line Value: 35A19
  misc_feature: MA Experiment 20000480 PARAMETER Experiment Name: Zm_Drought_P Parameter: Timepoint (hr) Value: 72
  misc_feature: MA Experiment 20000480 PARAMETER Experiment Name: Zm_Drought_P Parameter: Tissue Value: Aerial
  misc_feature: MA Experiment 20000480 PARAMETER Experiment Name: Zm_Drought_P Parameter: Treatment Value: Drought vs. No Drought
  misc_feature: MA Experiment ID: 20000487 Result: Down-regulated in Transcription
  misc_feature: MA Experiment 20000487 PARAMETER Experiment Name: Zm_50mM_NH4NO3_L_to_H_P Parameter: Organism Value: Zea mays
  misc_feature: MA Experiment 20000487 PARAMETER Experiment Name: Zm_50mM_NH4NO3_L_to_H_P Parameter: Timepoint (hr) Value: 4
  misc_feature: MA Experiment 20000487 PARAMETER Experiment Name: Zm_50mM_NH4NO3_L_to_H_P Parameter: Tissue Value: Leaves
  misc_feature: MA Experiment 20000487 PARAMETER Experiment Name: Zm_50mM_NH4NO3_L_to_H_P Parameter: Treatment Value: 50mM NH4NO3 vs. 100mM Mannitol
  misc_feature: MA Experiment ID: 20000492 Result: Up-regulated in Transcription
  misc_feature: MA Experiment 20000492 PARAMETER Experiment Name: Zm_Hybrid_Seed_Dev_P Parameter: DAP Value: 12
  misc_feature: MA Experiment 20000492 PARAMETER Experiment Name: Zm_Hybrid_Seed_Dev_P Parameter: Organism Value: Zea mays
  misc_feature: MA Experiment 20000492 PARAMETER Experiment Name: Zm_Hybrid_Seed_Dev_P Parameter: Plant Line Value: 35A19
  misc_feature: MA Experiment 20000492 PARAMETER Experiment Name: Zm_Hybrid_Seed_Dev_P Parameter: Tissue Value: Fert Kernel vs. Unfert Floret
  misc_feature: MA Experiment ID: 20000632 Result: Down-regulated in Transcription
  misc_feature: MA Experiment 20000632 PARAMETER Experiment Name: Zm_Herbicide-Treatments_P Parameter: Timepoint (hr) Value: 4
  misc_feature: MA Experiment 20000632 PARAMETER Experiment Name: Zm_Herbicide-Treatments_P Parameter: Tissue Value: Aerial
  misc_feature: MA Experiment 20000632 PARAMETER Experiment Name: Zm_Herbicide-Treatments_P Parameter: Treatment Value: Glean vs. No Treatment
acagaccacgccacgttcgcaattacagagatctagagagagagagagagagagggcagatctacgctagagcgacagagccacaactaaccgagagggacagtccagtatggtggtggcgctcgggcccggccggttctacggcagcggcctgccgaggccgcgcttcttcccgggcgaccgcgtggacccgccggcgtccgtcaccgacccgctgctcgagtgggcgcgcgaagcgcactggtccatgggcggcatcagcgtgaagcgcctccgcctgcagggccgcatcgagggctccgtcgacaagctccgccgccgcgcgcaccgcgatgccagggtcaaggccaaggccaaggcccgcgccgctggccacatgccggcttcgctcgccgcgcttgggtccgacgacgacgcctccagcggcgactccgaggacgagcaggaggtggcggcgcgggagcgggccctgaagcgtgagcttgtcgacgacgacgaggactccgacgggtccggcgagtcggaggaggacgagcccctcgcggccatcgtcaccgccgccaagaagaggcgcgcgaggaagctcagcgacgagttcgaccgcatcgccgcggagcagcagcagcagctggtgttggagagcaagcagaagccgggtgccgcgacgccggcgacgacgtcaacaaagaggaaggctaccgtgccgagggcttcgccaaagaggaaggcttctgtacccgctgctggggcgccggcgaggttgtcgccaaagaggaaggctgctgcaacagccgcggcgcccttgtcggcggctgggtcaaggaggacctcgccgaggaataagcactgagtggtggtcgccgtatgtgctgctctagttcctgatctgtttcttggcgatcgtggagtcctgaaaatgtattgtgtggttgggtgtctactgctggattgaaacgatgatgaaatggaatcgaattgatggttat

SEQ ID NO: 3812 - protein, 246 aa, Zea mays subsp. mays
  peptide (1)..(246): Ceres Seq. ID no. 12368545
  misc_feature (61)..(141): Pfam Name: 60s Acidic ribosomal protein Pfam Description: 60s Acidic ribosomal protein
  misc_feature (3)..(128): Homolog of NCBI NO: 18417168 NR Description: expressed protein
  misc_feature (3)..(128): Homolog of NCBI NO: 7486199 NR Description: hypothetical protein F26K10.190 - Arabidopsis
  misc_feature (1)..(246): Homolog of NCBI NO: 34897956 NR Description: contains ESTs
MVVALGPGRFYGSGLPRPRFFPGDRVDPPASVTDPLLEWAREAHWSMGGISVKRLRLQGRIEGSVDKLRRRAHRDARVKAKAKARAAGHMPASLAALGSDDDASSGDSEDEQEVAARERALKRELVDDDEDSDGSGESEEDEPLAAIVTAAKKRRARKLSDEFDRIAAEQQQQLVLESKQKPGAATPATTSTKRKATVPRASPKRKASVPAAGAPARLSPKRKAAATAAAPLSAAGSRRTSPRNKH

SEQ ID NO: 3813 - protein, 200 aa, Zea mays subsp. mays
  peptide (1)..(200): Ceres Seq. ID no. 12368546
  misc_feature (15)..(95): Pfam Name: 60s Acidic ribosomal protein Pfam Description: 60s Acidic ribosomal protein
  misc_feature (1)..(82): Homolog of NCBI NO: 18417168 NR Description: expressed protein
  misc_feature (1)..(82): Homolog of NCBI NO: 7486199 NR Description: hypothetical protein F26K10.190 - Arabidopsis
  misc_feature (1)..(200): Homolog of NCBI NO: 34897956 NR Description: contains ESTs
MGGISVKRLRLQGRIEGSVDKLRRRAHRDARVKAKAKARAAGHMPASLAALGSDDDASSGDSEDEQEVAARERALKRELVDDDEDSDGSGESEEDEPLAAIVTAAKKRRARKLSDEFDRIAAEQQQQLVLESKQKPGAATPATTSTKRKATVPRASPKRKASVPAAGAPARLSPKRKAAATAAAPLSAAGSRRTSPRNKH

SEQ ID NO: 3814 - protein, 157 aa, Zea mays subsp. mays
  peptide (1)..(157): Ceres Seq. ID no. 12368547
  misc_feature (1)..(52): Pfam Name: 60s Acidic ribosomal protein Pfam Description: 60s Acidic ribosomal protein
  misc_feature (1)..(39): Homolog of NCBI NO: 18417168 NR Description: expressed protein
  misc_feature (1)..(39): Homolog of NCBI NO: 7486199 NR Description: hypothetical protein F26K10.190 - Arabidopsis
  misc_feature (1)..(157): Homolog of NCBI NO: 34897956 NR Description: contains ESTs
MPASLAALGSDDDASSGDSEDEQEVAARERALKRELVDDDEDSDGSGESEEDEPLAAIVTAAKKRRARKLSDEFDRIAAEQQQQLVLESKQKPGAATPATTSTKRKATVPRASPKRKASVPAAGAPARLSPKRKAAATAAAPLSAAGSRRTSPRNKH

SEQ ID NO: 3815 - DNA, 1240 bp, Zea mays subsp. mays
  misc_feature (1)..(1240): Ceres Seq. ID no. 12403575
  misc_feature: MA Experiment ID: 108522 Result: Up-regulated in Transcription
  misc_feature: MA Experiment 108522 PARAMETER Experiment Name: Zm_42deg_Heat_P Parameter: Age (day) Value: 8
  misc_feature: MA Experiment 108522 PARAMETER Experiment Name: Zm_42deg_Heat_P Parameter: Organism Value: Zea mays
  misc_feature: MA Experiment 108522 PARAMETER Experiment Name: Zm_42deg_Heat_P Parameter: Plant Line Value: 35A19
  misc_feature: MA Experiment 108522 PARAMETER Experiment Name: Zm_42deg_Heat_P Parameter: Temperature (deg C) Value: 42 vs. 22
  misc_feature: MA Experiment 108522 PARAMETER Experiment Name: Zm_42deg_Heat_P Parameter: Timepoint (hr) Value: 1
  misc_feature: MA Experiment 108522 PARAMETER Experiment Name: Zm_42deg_Heat_P Parameter: Tissue Value: Aerial
  misc_feature: MA Experiment ID: 108533 Result: Up-regulated in Transcription
  misc_feature: MA Experiment 108533 PARAMETER Experiment Name: Zm_4deg_Cold_P Parameter: Age (hr) Value: 8
  misc_feature: MA Experiment 108533 PARAMETER Experiment Name: Zm_4deg_Cold_P Parameter: Organism Value: Zea mays
  misc_feature: MA Experiment 108533 PARAMETER Experiment Name: Zm_4deg_Cold_P Parameter: Plant Line Value: 35A19
  misc_feature: MA Experiment 108533 PARAMETER Experiment Name: Zm_4deg_Cold_P Parameter: Temperature (deg C) Value: 4 vs. 22
  misc_feature: MA Experiment 108533 PARAMETER Experiment Name: Zm_4deg_Cold_P Parameter: Timepoint (hr) Value: 1
  misc_feature: MA Experiment 108533 PARAMETER Experiment Name: Zm_4deg_Cold_P Parameter: Tissue Value: Aerial
  misc_feature: MA Experiment ID: 108687 Result: Up-regulated in Transcription
  misc_feature: MA Experiment 108687 PARAMETER Experiment Name: Zm_Embryos-Flowers__P Parameter: Tissue Value: Embryo vs. Aerial+
  misc_feature: MA Experiment ID: 20000626 Result: Down-regulated in Transcription
  misc_feature: MA Experiment 20000626 PARAMETER Experiment Name: Zm_Herbicide-Treatments_P Parameter: Timepoint (hr) Value: 12
  misc_feature: MA Experiment 20000626 PARAMETER Experiment Name: Zm_Herbicide-Treatments_P Parameter: Tissue Value: Aerial
  misc_feature: MA Experiment 20000626 PARAMETER Experiment Name: Zm_Herbicide-Treatments_P Parameter: Treatment Value: Roundup vs. No Treatment
tggatggttggaacggacaaccgtggaggatatggacattgctgttagggcacatctccatggctggaagtttatattcctgaatgacgttgagtgccagtgcgaattgcccgagtcttatgaggcttacaggaagcagcagcatcggtggcattcgggtccaatgcagctattcaggctttgtttaccggacatcatcaaatgcaagattgcattttggaagaaggcgaacctgatattccttttcttcctgctccggaagctcatactgcctttctactccttcacgctgttctgcatcatcctcccgatgacgatgttcgtgccggaggccgagctccccgactgggtggtgtgctacgtcccggccctgatgtccctgctgaacatcctgccgtcccccaagtcgttccccttcatcatcccgtacctgctcttcgagaacaccatgtccgtgaccaagttcaacgcgatgatctccgggctgttccagctggggagcgcgtacgagtgggtggtaccaagaagtcgggccgctcgtcggagggcgacctcatcgcgctggccccgcccaaggagcccgtgaagcttcacgcgacgaggacgggctccgcgccgaacctcgacgccgtcgccaaggaggagcacctggcggcggcatcgaggaaggacgctgccgccgccgccgccaccgtgaagaagaagaaggagaagcacaaccggatatacaagaaggagctggcgctgtcgatgctgctcctgaccgcggccgcccggagcctgctgtcgaagcagggcatacacttctacttcctcctgttccagggcgtgtccttcttgctagtaggccttgacctcataggcgagcaggtcgagtgaaatgtgtaaaacaggaaattgataggtgtggggaaaaaaaaacggtgagtcaccatggatggaagtgctgggagaggagggggatgtgttatttctggctggctgccatggcacggcggcatggcatggcatggcagcagctcttgggcgcttcttggctgagattcggaacatgcgttgtgcggttgagccttcccggatctgtcctggctgcacggcatggtatcccacacgtgaggagagcaacctcctccgcctgtacggaggtgtagatacagttttctcttgttttttcatgtgtgtgggcctgttcgcctgtacgaatggtgaaggtaaacagagagtcgccgctggattaggg

SEQ ID NO: 3816 - protein, 225 aa, Zea mays subsp. mays
  peptide (1)..(225): Ceres Seq. ID no. 12403576
  misc_feature (107)..(225): Homolog of NCBI NO: 15235900 NR Description: putative glucosyltransferase
  misc_feature (107)..(225): Homolog of NCBI NO: 28201308 NR Description: putative CSLC9(cellulose synthase-like)
  misc_feature (127)..(225): Homolog of NCBI NO: 17385963 NR Description: CSLC9 [Oryza sativa]
  misc_feature (127)..(225): Homolog of NCBI NO: 16974749 NR Description: CSLC9 [Oryza sativa]
  misc_feature (107)..(225): Homolog of NCBI NO: 17385981 NR Description: CSLC2 [Oryza sativa]
  misc_feature (107)..(225): Homolog of NCBI NO: 17385965 NR Description: CSLC7 [Oryza sativa]
  misc_feature (107)..(224): Homolog of NCBI NO: 15236004 NR Description: putative protein; protein id: At4g31590.1
  misc_feature (107)..(224): Homolog of NCBI NO: 18405677 NR Description: expressed protein
  misc_feature (107)..(224): Homolog of NCBI NO: 34419220 NR Description: TPA: cellulose synthase-like C3
  misc_feature (134)..(225): Homolog of NCBI NO: 34909854 NR Description: putative glucosyltransferase
MQDCILEEGEPDIPFLPAPEAHTAFLLLHAVLHHPPDDDVRAGGRAPRLGGVLRPGPDVPAEHPAVPQVVPLHHPVPALREHHVRDQVQRDDLRAVPAGERVRVGGTKKSGRSSEGDLIALAPPKEPVKLHATRTGSAPNLDAVAKEEHLAAASRKDAAAAAATVKKKKEKHNRIYKKELALSMLLLTAAARSLLSKQGIHFYFLLFQGVSFLLVGLDLIGEQVE

SEQ ID NO: 3817 - protein, 194 aa, Zea mays subsp. mays
  peptide (1)..(194): Ceres Seq. ID no. 12403577
  misc_feature (1)..(175): Homolog of NCBI NO: 17385981 NR Description: CSLC2 [Oryza sativa]
  misc_feature (25)..(175): Homolog of NCBI NO: 17385965 NR Description: CSLC7 [Oryza sativa]
  misc_feature (1)..(180): Homolog of NCBI NO: 15236004 NR Description: putative protein; protein id: At4g31590.1
  misc_feature (1)..(175): Homolog of NCBI NO: 18405677 NR Description: expressed protein
  misc_feature (1)..(185): Homolog of NCBI NO: 34419220 NR Description: TPA: cellulose synthase-like C3
  misc_feature (1)..(194): Homolog of NCBI NO: 34909854 NR Description: putative glucosyltransferase
  misc_feature (1)..(175): Homolog of NCBI NO: 15235900 NR Description: putative glucosyltransferase
  misc_feature (1)..(175): Homolog of NCBI NO: 28201308 NR Description: putative CSLC9(cellulose synthase-like)
  misc_feature (1)..(175): Homolog of NCBI NO: 17385963 NR Description: CSLC9 [Oryza sativa]
  misc_feature (1)..(175): Homolog of NCBI NO: 16974749 NR Description: CSLC9 [Oryza sativa]
GWLERTTVEDMDIAVRAHLHGWKFIFLNDVECQCELPESYEAYRKQQHRWHSGPMQLFRLCLPDIIKCKIAFWKKANLIFLFFLLRKLILPFYSFTLFCIILPMTMFVPEAELPDWVVCYVPALMSLLNILPSPKSFPFIIPYLLFENTMSVTKFNAMISGLFQLGSAYEWVVPRSRAARRRATSSRWPRPRSP

SEQ ID NO: 3818 - protein, 184 aa, Zea mays subsp. mays
  peptide (1)..(184): Ceres Seq. ID no. 12403578
  misc_feature (1)..(165): Homolog of NCBI NO: 17385981 NR Description: CSLC2 [Oryza sativa]
  misc_feature (15)..(165): Homolog of NCBI NO: 17385965 NR Description: CSLC7 [Oryza sativa]
  misc_feature (1)..(170): Homolog of NCBI NO: 15236004 NR Description: putative protein; protein id: At4g31590.1
  misc_feature (1)..(165): Homolog of NCBI NO: 18405677 NR Description: expressed protein
  misc_feature (1)..(175): Homolog of NCBI NO: 34419220 NR Description: TPA: cellulose synthase-like C3
  misc_feature (1)..(184): Homolog of NCBI NO: 34909854 NR Description: putative glucosyltransferase
  misc_feature (1)..(165): Homolog of NCBI NO: 15235900 NR Description: putative glucosyltransferase
  misc_feature (1)..(165): Homolog of NCBI NO: 28201308 NR Description: putative CSLC9(cellulose synthase-like)
  misc_feature (1)..(165): Homolog of NCBI NO: 17385963 NR Description: CSLC9 [Oryza sativa]
  misc_feature (1)..(165): Homolog of NCBI NO: 16974749 NR Description: CSLC9 [Oryza sativa]
MDIAVRAHLHGWKFIFLNDVECQCELPESYEAYRKQQHRWHSGPMQLFRLCLPDIIKCKIAFWKKANLIFLFFLLRKLILPFYSFTLFCIILPMTMFVPEAELPDWVVCYVPALMSLLNILPSPKSFPFIIPYLLFENTMSVTKFNAMISGLFQLGSAYEWVVPRSRAARRRATSSRWPRPRSP

SEQ ID NO: 3819 - DNA, 1146 bp, Zea mays subsp. mays
  misc_feature (1)..(1146): Ceres Seq. ID no. 12368495
  misc_feature: MA Experiment ID: 108522 Result: Down-regulated in Transcription
  misc_feature: MA Experiment 108522 PARAMETER Experiment Name: Zm_42deg_Heat_P Parameter: Age (day) Value: 8
  misc_feature: MA Experiment 108522 PARAMETER Experiment Name: Zm_42deg_Heat_P Parameter: Organism Value: Zea mays
  misc_feature: MA Experiment 108522 PARAMETER Experiment Name: Zm_42deg_Heat_P Parameter: Plant Line Value: 35A19
  misc_feature: MA Experiment 108522 PARAMETER Experiment Name: Zm_42deg_Heat_P Parameter: Temperature (deg C) Value: 42 vs. 22
  misc_feature: MA Experiment 108522 PARAMETER Experiment Name: Zm_42deg_Heat_P Parameter: Timepoint (hr) Value: 1
  misc_feature: MA Experiment 108522 PARAMETER Experiment Name: Zm_42deg_Heat_P Parameter: Tissue Value: Aerial
  misc_feature: MA Experiment ID: 108535 Result: Up-regulated in Transcription
  misc_feature: MA Experiment 108535 PARAMETER Experiment Name: Zm_Meristem_P Parameter: Age (day) Value: 8
  misc_feature: MA Experiment 108535 PARAMETER Experiment Name: Zm_Meristem_P Parameter: Organism Value: Zea mays
  misc_feature: MA Experiment 108535 PARAMETER Experiment Name: Zm_Meristem_P Parameter: Plant Line Value: 35A19
  misc_feature: MA Experiment 108535 PARAMETER Experiment Name: Zm_Meristem_P Parameter: Tissue Value: Root Meristem vs. Above Root Meristem
gcacgagaccattacctagaacatcctaatcgaaaagaaacaaaaaacattcggggacgcgcctgcttgcttctttccccaaaccccaaaccgcaggtaggaagcaaaccgcacgccccgctccagaacggatcctcatctctcacgttgtcaccacagtctgaatccagaatccaactagtagctccataaaagcggcaatgatccagctgctgttcgtcgtgctggtggcggaggcgtccctgacggcggcgctgctcttcaagacgccgctgcggaagctcgccgtgctagtgatcgaccggctcaagcgcggccgccacgcgcccgtcgtcgtcaagacggtcgcgggcgtcatccttgccctgctcgcttcaacgctctacagcatgacacagatcgccggcagcacgagcgactccgactctggcggcgggcccacccccaccgaccaggtgctcttctcgcgtcacctcctggaggcgtgcctcatggggtactccttatttcttgctctagtgattgaccggctccaccaatacatcagagatttgcgccggtttaaaaaggacttagaggctgtacgtaagcataataaaatgttggaggaggcaaaacatggaaactcggaggaggcaaagaaataccaggaagagattgccactctgaacaaggagatgaagaaactgaagctacaagtccaagaaaagacagaagaggtccatgtttcagaggacaaggcacttgctatccaaaaacaatccgaaggcttgctgactgaatatgaccgcctgctggaggataatcagcatcttcggacacagctgctgtcaattgaccgcaggctttccaactcttcttgaacgaagagtctatttaggggatgctgaagaatttctgtggaagatcatgttaccacccaaagtgtatggcagctacctgcttcctcacttgttagtcttagcatcttcaattaactagctattgcattatattgttggcaaaactagtgcaagcattatatggtctagaactttggagtttctcttgtgtgtttcttgtaatgcctactttttatgtgtgcttatagtgattactgttttgaacagaattttatgattattgcagacgggcattcacatgttg

SEQ ID NO: 3820 - protein, 220 aa, Zea mays subsp. mays
  peptide (1)..(220): Ceres Seq. ID no. 12368496
  misc_feature (4)..(196): Pfam Name: B-cell receptor-associated protein 31-like Pfam Description: B-cell receptor-associated protein 31-like
  misc_feature (1)..(130): Homolog of NCBI NO: 18402620 NR Description: expressed protein
  misc_feature (1)..(169): Homolog of NCBI NO: 30682503 NR Description: expressed protein [Arabidopsis thaliana]
  misc_feature (1)..(210): Homolog of NCBI NO: 15231412 NR Description: unknown protein; protein id: At3g07190.1
  misc_feature (1)..(210): Homolog of NCBI NO: 15239667 NR Description: putative protein; protein id: At5g48660.1
  misc_feature (1)..(209): Homolog of NCBI NO: 34897474 NR Description: unknown protein [Oryza sativa (japonica
  misc_feature (1)..(220): Homolog of NCBI NO: 22655198 NR Description: unknown protein [Arabidopsis thaliana]
  misc_feature (1)..(212): Homolog of NCBI NO: 21553655 NR Description: unknown [Arabidopsis thaliana]
  misc_feature (1)..(212): Homolog of NCBI NO: 18422225 NR Description: expressed protein
  misc_feature (1)..(212): Homolog of NCBI NO: 9759015 NR Description: gene_id:K16E1.4~unknown protein [Arabidopsis
MIQLLFVVLVAEASLTAALLFKTPLRKLAVLVIDRLKRGRHAPVVVKTVAGVILALLASTLYSMTQIAGSTSDSDSGGGPTPTDQVLFSRHLLEACLMGYSLFLALVIDRLHQYIRDLRRFKKDLEAVRKHNKMLEEAKHGNSEEAKKYQEEIATLNKEMKKLKLQVQEKTEEVHVSEDKALAIQKQSEGLLTEYDRLLEDNQHLRTQLLSIDRRLSNSS

SEQ ID NO: 3821 - protein, 157 aa, Zea mays subsp. mays
  peptide (1)..(157): Ceres Seq. ID no. 12368497
  misc_feature (1)..(133): Pfam Name: B-cell receptor-associated protein 31-like Pfam Description: B-cell receptor-associated protein 31-like
  misc_feature (1)..(67): Homolog of NCBI NO: 18402620 NR Description: expressed protein
  misc_feature (1)..(106): Homolog of NCBI NO: 30682503 NR Description: expressed protein [Arabidopsis thaliana]
  misc_feature (1)..(147): Homolog of NCBI NO: 15231412 NR Description: unknown protein; protein id: At3g07190.1
  misc_feature (1)..(147): Homolog of NCBI NO: 15239667 NR Description: putative protein; protein id: At5g48660.1
  misc_feature (1)..(146): Homolog of NCBI NO: 34897474 NR Description: unknown protein [Oryza sativa (japonica
  misc_feature (1)..(157): Homolog of NCBI NO: 22655198 NR Description: unknown protein [Arabidopsis thaliana]
  misc_feature (1)..(149): Homolog of NCBI NO: 21553655 NR Description: unknown [Arabidopsis thaliana]
  misc_feature (1)..(149): Homolog of NCBI NO: 18422225 NR Description: expressed protein
  misc_feature (1)..(149): Homolog of NCBI NO: 9759015 NR Description: gene_id:K16E1.4~unknown protein [Arabidopsis
MTQIAGSTSDSDSGGGPTPTDQVLFSRHLLEACLMGYSLFLALVIDRLHQYIRDLRRFKKDLEAVRKHNKMLEEAKHGNSEEAKKYQEEIATLNKEMKKLKLQVQEKTEEVHVSEDKALAIQKQSEGLLTEYDRLLEDNQHLRTQLLSIDRRLSNSS

SEQ ID NO: 3822 - protein, 123 aa, Zea mays subsp. mays
  peptide (1)..(123): Ceres Seq. ID no. 12368498
  misc_feature (1)..(99): Pfam Name: B-cell receptor-associated protein 31-like Pfam Description: B-cell receptor-associated protein 31-like
  misc_feature (1)..(33): Homolog of NCBI NO: 18402620 NR Description: expressed protein
  misc_feature (1)..(72): Homolog of NCBI NO: 30682503 NR Description: expressed protein [Arabidopsis thaliana]
  misc_feature (1)..(113): Homolog of NCBI NO: 15231412 NR Description: unknown protein; protein id: At3g07190.1
  misc_feature (1)..(113): Homolog of NCBI NO: 15239667 NR Description: putative protein; protein id: At5g48660.1
  misc_feature (1)..(112): Homolog of NCBI NO: 34897474 NR Description: unknown protein [Oryza sativa (japonica
  misc_feature (1)..(123): Homolog of NCBI NO: 22655198 NR Description: unknown protein [Arabidopsis thaliana]
  misc_feature (1)..(115): Homolog of NCBI NO: 21553655 NR Description: unknown [Arabidopsis thaliana]
  misc_feature (1)..(115): Homolog of NCBI NO: 18422225 NR Description: expressed protein
  misc_feature (1)..(115): Homolog of NCBI NO: 9759015 NR Description: gene_id:K16E1.4~unknown protein [Arabidopsis
MGYSLFLALVIDRLHQYIRDLRRFKKDLEAVRKHNKMLEEAKHGNSEEAKKYQEEIATLNKEMKKLKLQVQEKTEEVHVSEDKALAIQKQSEGLLTEYDRLLEDNQHLRTQLLSIDRRLSNSS

SEQ ID NO: 3823 - DNA, 897 bp, Zea mays subsp. mays
  misc_feature (1)..(897): Ceres Seq. ID no. 12365275
  misc_feature: MA Experiment ID: 108522 Result: Up-regulated in Transcription
  misc_feature: MA Experiment 108522 PARAMETER Experiment Name: Zm_42deg_Heat_P Parameter: Age (day) Value: 8
  misc_feature: MA Experiment 108522 PARAMETER Experiment Name: Zm_42deg_Heat_P Parameter: Organism Value: Zea mays
  misc_feature: MA Experiment 108522 PARAMETER Experiment Name: Zm_42deg_Heat_P Parameter: Plant Line Value: 35A19
  misc_feature: MA Experiment 108522 PARAMETER Experiment Name: Zm_42deg_Heat_P Parameter: Temperature (deg C) Value: 42 vs. 22
  misc_feature: MA Experiment 108522 PARAMETER Experiment Name: Zm_42deg_Heat_P Parameter: Timepoint (hr) Value: 1
  misc_feature: MA Experiment 108522 PARAMETER Experiment Name: Zm_42deg_Heat_P Parameter: Tissue Value: Aerial
  misc_feature: MA Experiment ID: 108528 Result: Up-regulated in Transcription
  misc_feature: MA Experiment 108528 PARAMETER Experiment Name: Zm_Imbibed_Seeds_P Parameter: Age (day) Value: 5 vs. 2
  misc_feature: MA Experiment 108528 PARAMETER Experiment Name: Zm_Imbibed_Seeds_P Parameter: Organism Value: Zea mays
  misc_feature: MA Experiment 108528 PARAMETER Experiment Name: Zm_Imbibed_Seeds_P Parameter: Plant Line Value: 35A19
  misc_feature: MA Experiment 108528 PARAMETER Experiment Name: Zm_Imbibed_Seeds_P Parameter: Tissue Value: Aerial vs. Embryo
  misc_feature: MA Experiment ID: 108530 Result: Up-regulated in Transcription
  misc_feature: MA Experiment 108530 PARAMETER Experiment Name: Zm_Imbibed_Seeds_P Parameter: Age (day) Value: 6 vs. 2
  misc_feature: MA Experiment 108530 PARAMETER Experiment Name: Zm_Imbibed_Seeds_P Parameter: Organism Value: Zea mays
  misc_feature: MA Experiment 108530 PARAMETER Experiment Name: Zm_Imbibed_Seeds_P Parameter: Plant Line Value: 35A19
  misc_feature: MA Experiment 108530 PARAMETER Experiment Name: Zm_Imbibed_Seeds_P Parameter: Tissue Value: Aerial vs. Embryo
  misc_feature: MA Experiment ID: 108535 Result: Down-regulated in Transcription
  misc_feature: MA Experiment 108535 PARAMETER Experiment Name: Zm_Meristem_P Parameter: Age (day) Value: 8
  misc_feature: MA Experiment 108535 PARAMETER Experiment Name: Zm_Meristem_P Parameter: Organism Value: Zea mays
  misc_feature: MA Experiment 108535 PARAMETER Experiment Name: Zm_Meristem_P Parameter: Plant Line Value: 35A19
  misc_feature: MA Experiment 108535 PARAMETER Experiment Name: Zm_Meristem_P Parameter: Tissue Value: Root Meristem vs. Above Root Meristem
  misc_feature: MA Experiment ID: 108536 Result: Down-regulated in Transcription
  misc_feature: MA Experiment 108536 PARAMETER Experiment Name: Zm_Meristem_P Parameter: Age (day) Value: 8
  misc_feature: MA Experiment 108536 PARAMETER Experiment Name: Zm_Meristem_P Parameter: Organism Value: Zea mays
  misc_feature: MA Experiment 108536 PARAMETER Experiment Name: Zm_Meristem_P Parameter: Plant Line Value: 35A19
  misc_feature: MA Experiment 108536 PARAMETER Experiment Name: Zm_Meristem_P Parameter: Tissue Value: Shoot Meristem vs. Above Shoot Meristem
  misc_feature: MA Experiment ID: 108543 Result: Down-regulated in Transcription
  misc_feature: MA Experiment ID: 108544 Result: Down-regulated in Transcription
  misc_feature: MA Experiment ID: 108545 Result: Up-regulated in Transcription
  misc_feature: MA Experiment 108545 PARAMETER Experiment Name: Zm_Imbibed_Seeds_P Parameter: Age (day) Value: 3 vs. 2
  misc_feature: MA Experiment 108545 PARAMETER Experiment Name: Zm_Imbibed_Seeds_P Parameter: Organism Value: Zea mays
  misc_feature: MA Experiment 108545 PARAMETER Experiment Name: Zm_Imbibed_Seeds_P Parameter: Plant Line Value: 35A19
  misc_feature: MA Experiment 108545 PARAMETER Experiment Name: Zm_Imbibed_Seeds_P Parameter: Tissue Value: Aerial vs. Embryo
  misc_feature: MA Experiment ID: 108547 Result: Up-regulated in Transcription
  misc_feature: MA Experiment 108547 PARAMETER Experiment Name: Zm_Imbibed_Seeds_P Parameter: Age (day) Value: 4 vs. 2
  misc_feature: MA Experiment 108547 PARAMETER Experiment Name: Zm_Imbibed_Seeds_P Parameter: Organism Value: Zea mays
  misc_feature: MA Experiment 108547 PARAMETER Experiment Name: Zm_Imbibed_Seeds_P Parameter: Plant Line Value: 35A19
  misc_feature: MA Experiment 108547 PARAMETER Experiment Name: Zm_Imbibed_Seeds_P Parameter: Tissue Value: Aerial vs. Embryo
  misc_feature: MA Experiment ID: 108687 Result: Down-regulated in Transcription
  misc_feature: MA Experiment 108687 PARAMETER Experiment Name: Zm_Embryos-Flowers__P Parameter: Tissue Value: Embryo vs. Aerial+
  misc_feature: MA Experiment ID: 108688 Result: Down-regulated in Transcription
  misc_feature: MA Experiment 108688 PARAMETER Experiment Name: Zm_Embryos-Flowers__P Parameter: Tissue Value: Immature Flowers vs. Aerial+
  misc_feature: MA Experiment ID: 20000477 Result: Up-regulated in Transcription
  misc_feature: MA Experiment 20000477 PARAMETER Experiment Name: Zm_5mM_SA_P Parameter: Age (day) Value: 10
  misc_feature: MA Experiment 20000477 PARAMETER Experiment Name: Zm_5mM_SA_P Parameter: Organism Value: Zea mays
  misc_feature: MA Experiment 20000477 PARAMETER Experiment Name: Zm_5mM_SA_P Parameter: Plant Line Value: 35A19
  misc_feature: MA Experiment 20000477 PARAMETER Experiment Name: Zm_5mM_SA_P Parameter: Timepoint (hr) Value: 48
  misc_feature: MA Experiment 20000477 PARAMETER Experiment Name: Zm_5mM_SA_P Parameter: Tissue Value: Aerial
  misc_feature: MA Experiment 20000477 PARAMETER Experiment Name: Zm_5mM_SA_P Parameter: Treatment Value: 5mM SA vs. No Treatment
  misc_feature: MA Experiment ID: 20000478 Result: Up-regulated in Transcription
  misc_feature: MA Experiment 20000478 PARAMETER Experiment Name: Zm_5mM_SA_P Parameter: Age (day) Value: 11
  misc_feature: MA Experiment 20000478 PARAMETER Experiment Name: Zm_5mM_SA_P Parameter: Organism Value: Zea mays
  misc_feature: MA Experiment 20000478 PARAMETER Experiment Name: Zm_5mM_SA_P Parameter: Plant Line Value: 35A19
  misc_feature: MA Experiment 20000478 PARAMETER Experiment Name: Zm_5mM_SA_P Parameter: Timepoint (hr) Value: 72
  misc_feature: MA Experiment 20000478 PARAMETER Experiment Name: Zm_5mM_SA_P Parameter: Tissue Value: Aerial
  misc_feature: MA Experiment 20000478 PARAMETER Experiment Name: Zm_5mM_SA_P Parameter: Treatment Value: 5mM SA vs. No Treatment
  misc_feature: MA Experiment ID: 20000492 Result: Down-regulated in Transcription
  misc_feature: MA Experiment 20000492 PARAMETER Experiment Name: Zm_Hybrid_Seed_Dev_P Parameter: DAP Value: 12
  misc_feature: MA Experiment 20000492 PARAMETER Experiment Name: Zm_Hybrid_Seed_Dev_P Parameter: Organism Value: Zea mays
  misc_feature: MA Experiment 20000492 PARAMETER Experiment Name: Zm_Hybrid_Seed_Dev_P Parameter: Plant Line Value: 35A19
  misc_feature: MA Experiment 20000492 PARAMETER Experiment Name: Zm_Hybrid_Seed_Dev_P Parameter: Tissue Value: Fert Kernel vs. Unfert Floret
  misc_feature: MA Experiment ID: 20000535 Result: Down-regulated in Transcription
  misc_feature: MA Experiment 20000535 PARAMETER Experiment Name: Zm_Hybrid_Seed_Dev_P Parameter: DAP Value: 30 vs. 12
  misc_feature: MA Experiment 20000535 PARAMETER Experiment Name: Zm_Hybrid_Seed_Dev_P Parameter: Organism Value: Zea mays
  misc_feature: MA Experiment 20000535 PARAMETER Experiment Name: Zm_Hybrid_Seed_Dev_P Parameter: Plant Line Value: 35A19
  misc_feature: MA Experiment 20000535 PARAMETER Experiment Name: Zm_Hybrid_Seed_Dev_P Parameter: Tissue Value: Embryo vs. Unfert Floret
  misc_feature: MA Experiment ID: 20000626 Result: Up-regulated in Transcription
  misc_feature: MA Experiment 20000626 PARAMETER Experiment Name: Zm_Herbicide-Treatments_P Parameter: Timepoint (hr) Value: 12
  misc_feature: MA Experiment 20000626 PARAMETER Experiment Name: Zm_Herbicide-Treatments_P Parameter: Tissue Value: Aerial
  misc_feature: MA Experiment 20000626 PARAMETER Experiment Name: Zm_Herbicide-Treatments_P Parameter: Treatment Value: Roundup vs. No Treatment
aaagcattgaagcaaagaaccctgcaactgcaacaagccctgacgcttaatacatcggccggcactcgatcggcagcagatcaaagatggcggcggaggagggggagaaggcgaagagcggcggcggcgggcagcagatgacggtggtgcgggggctggacgtggcgcggtacatggggcggtggtacgagatcgcgtcgttcccgtccttcttccagccgcgggacggccgcgacacgcgcgccacctaccggctgctggaggacggcgccacggtgcacgtgctcaacgagacgtggagcaagggcaagcgcgactacatcgagggcacggcctacaaggccgaccccggcagcgacgaggccaagctcaaggtcaagttctacctcccgcccttcctccccatcgtccccgtcgtcggcgactactgggtgctctacgtcgacgatgactaccagtacgcgctcgtcggcgagccgcgccgcaagaacctctggatcctgtgcaggaagacgagcatcgacgaggacgtgtacaaccagctggtggagcgggccaaggaggaaggctacgacgtgagcaagctgcacaggacgccgcaggacgacccgccgccggagagcgacgccgcgcccaccgacaccaagggggtgtggtggttcaagtcgctcttcgggaaatgactgcccgtcaccgcacgcgcgcgtgctccggtactgtgcttgcagttgcagcaaataaaaccaggcctgagtgagtgaggattggtattttagctttgtagtatctgtctcgctatctgtgtgtgtggaactgtggactgtgctgttacgttatacgtgcatgtatttttaagatttctctagctaattgcatcgatcggcgaggtagtcacgc

SEQ ID NO: 3824 - protein, 198 aa, Zea mays subsp. mays
  peptide (1)..(198): Ceres Seq. ID no. 12365276
  misc_feature (9)..(169): Homolog of NCBI NO: 39997424 NR Description: outer membrane lipoprotein [Geobacter
  misc_feature (24)..(167): Homolog of NCBI NO: 26990735 NR Description: outer membrane lipoprotein Blc, putative
  misc_feature (9)..(167): Homolog of NCBI NO: 23058021 NR Description: hypothetical protein [Pseudomonas fluorescens
  misc_feature (24)..(171): Homolog of NCBI NO: 15600300 NR Description: outer membrane lipoprotein Blc [Pseudomonas
  misc_feature (15)..(172): Homolog of NCBI NO: 33598585 NR Description: outer membrane lipoprotein [Bordetella
  misc_feature (17)..(171): Homolog of NCBI NO: 21244675 NR Description: outer membrane lipoprotein Blc
  misc_feature (18)..(171): Homolog of NCBI NO: 21233298 NR Description: outer membrane lipoprotein Blc
  misc_feature (18)..(198): Homolog of NCBI NO: 21553811 NR Description: outer membrane lipoprotein-like [Arabidopsis
  misc_feature (16)..(198): Homolog of NCBI NO: 15242942 NR Description: outer membrane lipoprotein - like
  misc_feature (15)..(198): Homolog of NCBI NO: 18650668 NR Description: temperature stress-induced lipocalin [Triticum
MAAEEGEKAKSGGGGQQMTVVRGLDVARYMGRWYEIASFPSFFQPRDGRDTRATYRLLEDGATVHVLNETWSKGKRDYIEGTAYKADPGSDEAKLKVKFYLPPFLPIVPVVGDYWVLYVDDDYQYALVGEPRRKNLWILCRKTSIDEDVYNQLVERAKEEGYDVSKLHRTPQDDPPPESDAAPTDTKGVWWFKSLFGK

SEQ ID NO: 3825 - protein, 181 aa, Zea mays subsp. mays
  peptide (1)..(181): Ceres Seq. ID no. 12365277
  misc_feature (1)..(152): Homolog of NCBI NO: 39997424 NR Description: outer membrane lipoprotein [Geobacter
  misc_feature (7)..(150): Homolog of NCBI NO: 26990735 NR Description: outer membrane lipoprotein Blc, putative
  misc_feature (1)..(150): Homolog of NCBI NO: 23058021 NR Description: hypothetical protein [Pseudomonas fluorescens
  misc_feature (7)..(154): Homolog of NCBI NO: 15600300 NR Description: outer membrane lipoprotein Blc [Pseudomonas
  misc_feature (1)..(155): Homolog of NCBI NO: 33598585 NR Description: outer membrane lipoprotein [Bordetella
  misc_feature (1)..(154): Homolog of NCBI NO: 21244675 NR Description: outer membrane lipoprotein Blc
  misc_feature (1)..(154): Homolog of NCBI NO: 21233298 NR Description: outer membrane lipoprotein Blc
  misc_feature (1)..(181): Homolog of NCBI NO: 21553811 NR Description: outer membrane lipoprotein-like [Arabidopsis
  misc_feature (1)..(181): Homolog of NCBI NO: 15242942 NR Description: outer membrane lipoprotein - like
  misc_feature (1)..(181): Homolog of NCBI NO: 18650668 NR Description: temperature stress-induced lipocalin [Triticum
MTVVRGLDVARYMGRWYEIASFPSFFQPRDGRDTRATYRLLEDGATVHVLNETWSKGKRDYIEGTAYKADPGSDEAKLKVKFYLPPFLPIVPVVGDYWVLYVDDDYQYALVGEPRRKNLWILCRKTSIDEDVYNQLVERAKEEGYDVSKLHRTPQDDPPPESDAAPTDTKGVWWFKSLFGK

SEQ ID NO: 3826 - protein, 169 aa, Zea mays subsp. mays
  peptide (1)..(169): Ceres Seq. ID no. 12365278
  misc_feature (1)..(138): Homolog of NCBI NO: 23058021 NR Description: hypothetical protein [Pseudomonas fluorescens
  misc_feature (1)..(142): Homolog of NCBI NO: 15600300 NR Description: outer membrane lipoprotein Blc [Pseudomonas
  misc_feature (1)..(143): Homolog of NCBI NO: 33598585 NR Description: outer membrane lipoprotein [Bordetella
  misc_feature (1)..(142): Homolog of NCBI NO: 21244675 NR Description: outer membrane lipoprotein Blc
  misc_feature (1)..(142): Homolog of NCBI NO: 21233298 NR Description: outer membrane lipoprotein Blc
  misc_feature (1)..(169): Homolog of NCBI NO: 21553811 NR Description: outer membrane lipoprotein-like [Arabidopsis
  misc_feature (1)..(169): Homolog of NCBI NO: 15242942 NR Description: outer membrane lipoprotein - like
  misc_feature (1)..(169): Homolog of NCBI NO: 18650668 NR Description: temperature stress-induced lipocalin [Triticum
  misc_feature (1)..(140): Homolog of NCBI NO: 39997424 NR Description: outer membrane lipoprotein [Geobacter
  misc_feature (1)..(138): Homolog of NCBI NO: 26990735 NR Description: outer membrane lipoprotein Blc, putative
MGRWYEIASFPSFFQPRDGRDTRATYRLLEDGATVHVLNETWSKGKRDYIEGTAYKADPGSDEAKLKVKFYLPPFLPIVPVVGDYWVLYVDDDYQYALVGEPRRKNLWILCRKTSIDEDVYNQLVERAKEEGYDVSKLHRTPQDDPPPESDAAPTDTKGVWWFKSLFGK

SEQ ID NO: 3827 - DNA, 970 bp, Zea mays subsp. mays
  misc_feature (1)..(970): Ceres Seq. ID no. 12365291
  misc_feature: MA Experiment ID: 108522 Result: Up-regulated in Transcription
  misc_feature: MA Experiment 108522 PARAMETER Experiment Name: Zm_42deg_Heat_P Parameter: Age (day) Value: 8
  misc_feature: MA Experiment 108522 PARAMETER Experiment Name: Zm_42deg_Heat_P Parameter: Organism Value: Zea mays
  misc_feature: MA Experiment 108522 PARAMETER Experiment Name: Zm_42deg_Heat_P Parameter: Plant Line Value: 35A19
  misc_feature: MA Experiment 108522 PARAMETER Experiment Name: Zm_42deg_Heat_P Parameter: Temperature (deg C) Value: 42 vs. 22
  misc_feature: MA Experiment 108522 PARAMETER Experiment Name: Zm_42deg_Heat_P Parameter: Timepoint (hr) Value: 1
  misc_feature: MA Experiment 108522 PARAMETER Experiment Name: Zm_42deg_Heat_P Parameter: Tissue Value: Aerial
aatgactcctcttttagcggcgagagactgagagcttggctcaacgcgtcctcggcttctgtggaaggccattccatgcgctccgtgtagccagccattcggtacaaccaactaccctagaagtaacttttcttttcttttttgctctcgagatggatccggttggccccttcctcgtcgcctctataagaagcatccccacacgttctctccacccatcactgcagctcaaacacaaagcagcatcacactgactccactgctctgcctccataataagcacagaagcgccccaataatcagcagcgcaggagcgagcgatcgctatggctcagggaagaggcagtgcgacgcgggggcttgccctcggcagcctactcgccgccgctttcctcctcctcctcggcgtcgccgacgcggccacccacagggtcgactggtccttcaacgcggacagctggtccaagggcaagagcttccgtgccggcgacgtcctcgagttcaactacgacccctccgtgcacaacgtggtggccgtggacgccggcggctacaacggctgccggccctccggcacgtcgtacggctccgggagcgaccgcatcacgctcggccccggcaccagctatttcatctgcagcctcaacgggcactgcgggatggggatgaagatggtcgtcaacgccagctgagcacgacgcttatatgttagtactgcaaaaatatatgggctagtggtggtccgatagatcgtgcaagaactcaatcgtgtgcatactcgtaccgtgtgttcgatggacacggttcatgtgttgtgtatgcatgcgactgctggtaggtcaggcatgatgtacgtgtggctgatggcgtgttagtaaagcgtcctgcagctttgttgttactttgttcgatcgaagcagcggcttcttttgtttgttcatcaataacatctttcattaaattttttttt

SEQ ID NO: 3828 - protein, 121 aa, Zea mays subsp. mays
  peptide (1)..(121): Ceres Seq. ID no. 12365292
  misc_feature (38)..(114): Pfam Name: Plastocyanin-like domain Pfam Description: Plastocyanin-like domain
  misc_feature (1)..(120): Homolog of NCBI NO: 3860333 NR Description: basic blue copper protein [Cicer arietinum]
  misc_feature (38)..(120): Homolog of NCBI NO: 114806 NR Description: Basic blue protein (Cusacyanin) (Plantacyanin)
  misc_feature (38)..(120): Homolog of NCBI NO: 2094888 NR Description: Cucumber Basic Protein, A Blue Copper Protein
  misc_feature (4)..(121): Homolog of NCBI NO: 27573337 NR Description: putative basic blue copper protein
  misc_feature (1)..(120): Homolog of NCBI NO: 7430872 NR Description: plantacyanin precursor [validated] - spinach
  misc_feature (1)..(120): Homolog of NCBI NO: 13702832 NR Description: putative disease resistance protein [Oryza sativa]
  misc_feature (1)..(121): Homolog of NCBI NO: 40288370 NR Description: chemocyanin [Lilium longiflorum]
  misc_feature (1)..(120): Homolog of NCBI NO: 15227048 NR Description: putative basic blue protein (plantacyanin)
  misc_feature (1)..(120): Homolog of NCBI NO: 21536649 NR Description: putative basic blue protein plantacyanin
  misc_feature (1)..(121): Homolog of NCBI NO: 13702826 NR Description: putative basic protein [Oryza sativa]
MAQGRGSATRGLALGSLLAAAFLLLLGVADAATHRVDWSFNADSWSKGKSFRAGDVLEFNYDPSVHNVVAVDAGGYNGCRPSGTSYGSGSDRITLGPGTSYFICSLNGHCGMGMKMVVNAS

SEQ ID NO: 3829 - DNA, 1029 bp, Zea mays subsp. mays
  misc_feature (1)..(1029): Ceres Seq. ID no. 12403756
  misc_feature: MA Experiment ID: 108687 Result: Down-regulated in Transcription
  misc_feature: MA Experiment 108687 PARAMETER Experiment Name: Zm_Embryos-Flowers__P Parameter: Tissue Value: Embryo vs. Aerial+
  misc_feature: MA Experiment ID: 20000535 Result: Down-regulated in Transcription
  misc_feature: MA Experiment 20000535 PARAMETER Experiment Name: Zm_Hybrid_Seed_Dev_P Parameter: DAP Value: 30 vs. 12
  misc_feature: MA Experiment 20000535 PARAMETER Experiment Name: Zm_Hybrid_Seed_Dev_P Parameter: Organism Value: Zea mays
  misc_feature: MA Experiment 20000535 PARAMETER Experiment Name: Zm_Hybrid_Seed_Dev_P Parameter: Plant Line Value: 35A19
  misc_feature: MA Experiment 20000535 PARAMETER Experiment Name: Zm_Hybrid_Seed_Dev_P Parameter: Tissue Value: Embryo vs. Unfert Floret
gcacgagaccattacctagaacatcctaatcgaaaaagactatcatgtctcggtactgcgtcaacgagcagtcgagcacccggcctcatcctgcctcggcaggcagttggcacggcagcaccccagcaggcagcagcccctccaatttaaagcaagcaacgacgggcaaagagcagctcggcgggggctgctgcagcgccgcgcgtttgcgagtccgggacgacgacatggggaggggccgcagcgagataaagcggatcgagaacccgacgcagcggcagtccaccttctacaagcgcagggacgggctcttcaagaaggcaagggagctcgccgtcctgtgcgacgtcgacctgctgctgctcctcttctccggctccgggaagctgtaccactacctctcgcccaccgtgcccactgtcaaggacctggtcgagaggtacgaggccgcgacgcacagcaaggtctgggccgacgttcgccaggagcggcgcgcggagctggagaaggcggagcggatgtgcgagctcatggagaaggagctgcggttcatgacggtggacgacggggagcagtacacggtgccgtcgctggagctgctggagcacagcctggaggcggccgtgcacagggtgcgctccgagaaggaccgcaagatcggcggcgagatcgactgcctccagaacattatcagaggacgccacgaggagcgctacgggttgtgcgacaagcttgctcattctcaggcctggaacaacggcggggaaggtggagggtcgaccccaccaagcggcggcggcggcctggaactcaaactgggtttcaactgacgctggctggcttggaagctcgaggatggatcgaagactatgagctccttcattgtgccctgtcaggctacctacccctgcaccctgttggttatggtttaaaatggttattgaccaaagttgtcctgcatcaaacaaggctcagcttgatgttaatgtgctgagggatctaatgtattattagcgttatccagctctt

SEQ ID NO: 3830 - protein, 261 aa, Zea mays subsp. mays
  peptide (1)..(261): Ceres Seq. ID no. 12403757
  misc_feature (133)..(232): Pfam Name: K-box region Pfam Description: K-box region
  misc_feature (62)..(245): Homolog of NCBI NO: 20513264 NR Description: MADS-box transcription factor [Lilium regale]
  misc_feature (62)..(244): Homolog of NCBI NO: 23304676 NR Description: MADS-box protein FUL-c [Brassica oleracea var.
  misc_feature (62)..(242): Homolog of NCBI NO: 16549070 NR Description: putative MADS-domain transcription factor MpMADS7
  misc_feature (62)..(242): Homolog of NCBI NO: 18424410 NR Description: MADS-box protein
  misc_feature (62)..(213): Homolog of NCBI NO: 27151620 NR Description: MADS box protein ZMM17
  misc_feature (62)..(226): Homolog of NCBI NO: 3170502 NR Description: APETALA3 homolog PnAP3-2 [Papaver nudicaule]
  misc_feature (62)..(244): Homolog of NCBI NO: 23304678 NR Description: MADS-box protein FUL-d [Brassica oleracea var.
  misc_feature (62)..(235): Homolog of NCBI NO: 27151621 NR Description: MADS box protein GGM13
  misc_feature (65)..(235): Homolog of NCBI NO: 40644782 NR Description: putative transcription factor MADS32 [Triticum
  misc_feature (62)..(261): Homolog of NCBI NO: 34910770 NR Description: P0042A10.14 [Oryza sativa (japonica
MSRYCVNEQSSTRPHPASAGSWHGSTPAGSSPSNLKQATTGKEQLGGGCCSAARLRVRDDDMGRGRSEIKRIENPTQRQSTFYKRRDGLFKKARELAVLCDVDLLLLLFSGSGKLYHYLSPTVPTVKDLVERYEAATHSKVWADVRQERRAELEKAERMCELMEKELRFMTVDDGEQYTVPSLELLEHSLEAAVHRVRSEKDRKIGGEIDCLQNIIRGRHEERYGLCDKLAHSQAWNNGGEGGGSTPPSGGGGLELKLGFN

SEQ ID NO: 3831 - protein, 200 aa, Zea mays subsp. mays
  peptide (1)..(200): Ceres Seq. ID no. 12403758
  misc_feature (72)..(171): Pfam Name: K-box region Pfam Description: K-box region
  misc_feature (1)..(184): Homolog of NCBI NO: 20513264 NR Description: MADS-box transcription factor [Lilium regale]
  misc_feature (1)..(183): Homolog of NCBI NO: 23304676 NR Description: MADS-box protein FUL-c [Brassica oleracea var.
  misc_feature (1)..(181): Homolog of NCBI NO: 16549070 NR Description: putative MADS-domain transcription factor MpMADS7
  misc_feature (1)..(181): Homolog of NCBI NO: 18424410 NR Description: MADS-box protein
  misc_feature (1)..(152): Homolog of NCBI NO: 27151620 NR Description: MADS box protein ZMM17
  misc_feature (1)..(165): Homolog of NCBI NO: 3170502 NR Description: APETALA3 homolog PnAP3-2 [Papaver nudicaule]
  misc_feature (1)..(183): Homolog of NCBI NO: 23304678 NR Description: MADS-box protein FUL-d [Brassica oleracea var.
  misc_feature (1)..(174): Homolog of NCBI NO: 27151621 NR Description: MADS box protein GGM13
  misc_feature (4)..(174): Homolog of NCBI NO: 40644782 NR Description: putative transcription factor MADS32 [Triticum
  misc_feature (1)..(200): Homolog of NCBI NO: 34910770 NR Description: P0042A10.14 [Oryza sativa (japonica
MGRGRSEIKRIENPTQRQSTFYKRRDGLFKKARELAVLCDVDLLLLLFSGSGKLYHYLSPTVPTVKDLVERYEAATHSKVWADVRQERRAELEKAERMCELMEKELRFMTVDDGEQYTVPSLELLEHSLEAAVHRVRSEKDRKIGGEIDCLQNIIRGRHEERYGLCDKLAHSQAWNNGGEGGGSTPPSGGGGLELKLGFN

SEQ ID NO: 3832 - DNA, 790 bp, Zea mays subsp. mays
  misc_feature (1)..(790): Ceres Seq. ID no. 12404755
  misc_feature: MA Experiment ID: 108522 Result: Up-regulated in Transcription
  misc_feature: MA Experiment 108522 PARAMETER Experiment Name: Zm_42deg_Heat_P Parameter: Age (day) Value: 8
  misc_feature: MA Experiment 108522 PARAMETER Experiment Name: Zm_42deg_Heat_P Parameter: Organism Value: Zea mays
  misc_feature: MA Experiment 108522 PARAMETER Experiment Name: Zm_42deg_Heat_P Parameter: Plant Line Value: 35A19
  misc_feature: MA Experiment 108522 PARAMETER Experiment Name: Zm_42deg_Heat_P Parameter: Temperature (deg C) Value: 42 vs. 22
  misc_feature: MA Experiment 108522 PARAMETER Experiment Name: Zm_42deg_Heat_P Parameter: Timepoint (hr) Value: 1
  misc_feature: MA Experiment 108522 PARAMETER Experiment Name: Zm_42deg_Heat_P Parameter: Tissue Value: Aerial
  misc_feature: MA Experiment ID: 108523 Result: Up-regulated in Transcription
  misc_feature: MA Experiment 108523 PARAMETER Experiment Name: Zm_42deg_Heat_P Parameter: Age (day) Value: 8
  misc_feature: MA Experiment 108523 PARAMETER Experiment Name: Zm_42deg_Heat_P Parameter: Organism Value: Zea mays
  misc_feature: MA Experiment 108523 PARAMETER Experiment Name: Zm_42deg_Heat_P Parameter: Plant Line Value: 35A19
  misc_feature: MA Experiment 108523 PARAMETER Experiment Name: Zm_42deg_Heat_P Parameter: Temperature (deg C) Value: 42 vs. 22
  misc_feature: MA Experiment 108523 PARAMETER Experiment Name: Zm_42deg_Heat_P Parameter: Timepoint (hr) Value: 6
  misc_feature: MA Experiment 108523 PARAMETER Experiment Name: Zm_42deg_Heat_P Parameter: Tissue Value: Aerial
  misc_feature: MA Experiment ID: 108543 Result: Down-regulated in Transcription
  misc_feature: MA Experiment ID: 108687 Result: Up-regulated in Transcription
  misc_feature: MA Experiment 108687 PARAMETER Experiment Name: Zm_Embryos-Flowers__P Parameter: Tissue Value: Embryo vs. Aerial+
  misc_feature: MA Experiment ID: 108689 Result: Down-regulated in Transcription
  misc_feature: MA Experiment 108689 PARAMETER Experiment Name: Zm_Drought_Roots_P Parameter: Age (day) Value: 9
  misc_feature: MA Experiment 108689 PARAMETER Experiment Name: Zm_Drought_Roots_P Parameter: Organism Value: Zea mays
  misc_feature: MA Experiment 108689 PARAMETER Experiment Name: Zm_Drought_Roots_P Parameter: Plant Line Value: 35A19
  misc_feature: MA Experiment 108689 PARAMETER Experiment Name: Zm_Drought_Roots_P Parameter: Timepoint (hr) Value: 24
  misc_feature: MA Experiment 108689 PARAMETER Experiment Name: Zm_Drought_Roots_P Parameter: Tissue Value: Roots
  misc_feature: MA Experiment 108689 PARAMETER Experiment Name: Zm_Drought_Roots_P Parameter: Treatment Value: Drought vs. No Drought
  misc_feature: MA Experiment ID: 20000492 Result: Up-regulated in Transcription
  misc_feature: MA Experiment 20000492 PARAMETER Experiment Name: Zm_Hybrid_Seed_Dev_P Parameter: DAP Value: 12
  misc_feature: MA Experiment 20000492 PARAMETER Experiment Name: Zm_Hybrid_Seed_Dev_P Parameter: Organism Value: Zea mays
  misc_feature: MA Experiment 20000492 PARAMETER Experiment Name: Zm_Hybrid_Seed_Dev_P Parameter: Plant Line Value: 35A19
  misc_feature: MA Experiment 20000492 PARAMETER Experiment Name: Zm_Hybrid_Seed_Dev_P Parameter: Tissue Value: Fert Kernel vs. Unfert Floret
gccttcaaccatcgttagagtttccttggtagtttttttccctcttgtcacagcaccccccacccacacacacccaaggccccaactgcagtgcccatccggcagacaggtcgatggcggcggaagcagcggcagcggggaaggagaagatgcggacgctagtcagcagcgacttcaagaagttcgatgtggaggagtctgtggcgagggaatcgctgattatcctgaacctgatggcggactgcgacgacagtgacatcccggtcttcaacgtcaacgccaatatcctcgacaaggtcatcgcgtactgcaggaagcacgcctcggcgccgcgcgccgatggcggtgatgcggagccaagtgctgcgagtaacaaggcctcagcggacgatctcaagtcctttgatgctgagttcgtcgatgttgacctggtcaccctcttggagctcattaaggctgcagactacctggagatcaatgggctgctggacctgacctgccaggccgtcgcggacatgatcaaggggaagactccagaggagatacgcgagacattcgacatcgagaatgacttcacacctgaggaagaggctaaagtgaggagggagaatcagtgggcctttgaatgaagaagctgcaggctagctttttttttttctaacaaaacaatagcaatatcatataaccaggccagagatgaagtgcttgttcaggatgttatgagtcgaaggtttggttggtcgtgagcagactatattgctgttccagtattttggctggtttggttccc

SEQ ID NO: 3833 - protein, 171 aa, Zea mays subsp. mays
  peptide (1)..(171): Ceres Seq. ID no. 12404756
  misc_feature (94)..(171): Pfam Name: Skp1 family, dimerisation domain Pfam Description: Skp1 family, dimerisation domain
  misc_feature (12)..(171): Homolog of NCBI NO: 3551838 NR Description: SKP1-like protein [Nicotiana clevelandii]
  misc_feature (12)..(171): Homolog of NCBI NO: 18958257 NR Description: kinetochore protein [Brassica juncea]
  misc_feature (12)..(171): Homolog of NCBI NO: 18958255 NR Description: kinetochore protein [Brassica juncea]
  misc_feature (12)..(171): Homolog of NCBI NO: 18958249 NR Description: kinetochore protein [Brassica juncea]
  misc_feature (15)..(171): Homolog of NCBI NO: 18422184 NR Description: E3 ubiquitin ligase SCF complex subunit,
  misc_feature (15)..(171): Homolog of NCBI NO: 3719211 NR Description: UIP2 [Arabidopsis thaliana]
  misc_feature (12)..(171): Homolog of NCBI NO: 7489300 NR Description: fimbriata-associated protein 2 - garden
  misc_feature (10)..(171): Homolog of NCBI NO: 7489299 NR Description: fimbriata-associated protein - garden snapdragon
  misc_feature (1)..(171): Homolog of NCBI NO: 7378764 NR Description: putative kinetochore protein [Hordeum vulgare
  misc_feature (1)..(171): Homolog of NCBI NO: 40644754 NR Description: putative SKP1 protein [Triticum aestivum]
MAAEAAAAGKEKMRTLVSSDFKKFDVEESVARESLIILNLMADCDDSDIPVFNVNANILDKVIAYCRKHASAPRADGGDAEPSAASNKASADDLKSFDAEFVDVDLVTLLELIKAADYLEINGLLDLTCQAVADMIKGKTPEEIRETFDIENDFTPEEEAKVRRENQWAFE

SEQ ID NO: 3834 - protein, 159 aa, Zea mays subsp. mays
  peptide (1)..(159): Ceres Seq. ID no. 12404757
  misc_feature (82)..(159): Pfam Name: Skp1 family, dimerisation domain Pfam Description: Skp1 family, dimerisation domain
  misc_feature (1)..(159): Homolog of NCBI NO: 3551838 NR Description: SKP1-like protein [Nicotiana clevelandii]
  misc_feature (1)..(159): Homolog of NCBI NO: 18958257 NR Description: kinetochore protein [Brassica juncea]
  misc_feature (1)..(159): Homolog of NCBI NO: 18958255 NR Description: kinetochore protein [Brassica juncea]
  misc_feature (1)..(159): Homolog of NCBI NO: 18958249 NR Description: kinetochore protein [Brassica juncea]
  misc_feature (3)..(159): Homolog of NCBI NO: 18422184 NR Description: E3 ubiquitin ligase SCF complex subunit,
  misc_feature (3)..(159): Homolog of NCBI NO: 3719211 NR Description: UIP2 [Arabidopsis thaliana]
  misc_feature (1)..(159): Homolog of NCBI NO: 7489300 NR Description: fimbriata-associated protein 2 - garden
  misc_feature (1)..(159): Homolog of NCBI NO: 7489299 NR Description: fimbriata-associated protein - garden snapdragon
  misc_feature (1)..(159): Homolog of NCBI NO: 7378764 NR Description: putative kinetochore protein [Hordeum vulgare
  misc_feature (1)..(159): Homolog of NCBI NO: 40644754 NR Description: putative SKP1 protein [Triticum aestivum]
MRTLVSSDFKKFDVEESVARESLIILNLMADCDDSDIPVFNVNANILDKVIAYCRKHASAPRADGGDAEPSAASNKASADDLKSFDAEFVDVDLVTLLELIKAADYLEINGLLDLTCQAVADMIKGKTPEEIRETFDIENDFTPEEEAKVRRENQWAFE

SEQ ID NO: 3835 - protein, 131 aa, Zea mays subsp. mays
  peptide (1)..(131): Ceres Seq. ID no. 12404758
  misc_feature (54)..(131): Pfam Name: Skp1 family, dimerisation domain Pfam Description: Skp1 family, dimerisation domain
  misc_feature (1)..(131): Homolog of NCBI NO: 3551838 NR Description: SKP1-like protein [Nicotiana clevelandii]
  misc_feature (1)..(131): Homolog of NCBI NO: 18958257 NR Description: kinetochore protein [Brassica juncea]
  misc_feature (1)..(131): Homolog of NCBI NO: 18958255 NR Description: kinetochore protein [Brassica juncea]
  misc_feature (1)..(131): Homolog of NCBI NO: 18958249 NR Description: kinetochore protein [Brassica juncea]
  misc_feature (1)..(131): Homolog of NCBI NO: 18422184 NR Description: E3 ubiquitin ligase SCF complex subunit,
  misc_feature (1)..(131): Homolog of NCBI NO: 3719211 NR Description: UIP2 [Arabidopsis thaliana]
  misc_feature (1)..(131): Homolog of NCBI NO: 7489300 NR Description: fimbriata-associated protein 2 - garden
  misc_feature (1)..(131): Homolog of NCBI NO: 7489299 NR Description: fimbriata-associated protein - garden snapdragon
  misc_feature (1)..(131): Homolog of NCBI NO: 7378764 NR Description: putative kinetochore protein [Hordeum vulgare
  misc_feature (1)..(131): Homolog of NCBI NO: 40644754 NR Description: putative SKP1 protein [Triticum aestivum]
MADCDDSDIPVFNVNANILDKVIAYCRKHASAPRADGGDAEPSAASNKASADDLKSFDAEFVDVDLVTLLELIKAADYLEINGLLDLTCQAVADMIKGKTPEEIRETFDIENDFTPEEEAKVRRENQWAFE

SEQ ID NO: 3836 - DNA, 1268 bp, Zea mays subsp. mays
  misc_feature (1)..(1268): Ceres Seq. ID no. 12410087
  misc_feature: MA Experiment ID: 20000535 Result: Up-regulated in Transcription
  misc_feature: MA Experiment 20000535 PARAMETER Experiment Name: Zm_Hybrid_Seed_Dev_P Parameter: DAP Value: 30 vs. 12
  misc_feature: MA Experiment 20000535 PARAMETER Experiment Name: Zm_Hybrid_Seed_Dev_P Parameter: Organism Value: Zea mays
  misc_feature: MA Experiment 20000535 PARAMETER Experiment Name: Zm_Hybrid_Seed_Dev_P Parameter: Plant Line Value: 35A19
  misc_feature: MA Experiment 20000535 PARAMETER Experiment Name: Zm_Hybrid_Seed_Dev_P Parameter: Tissue Value: Embryo vs. Unfert Floret
agggagaaaaatagcaggccgccttgagctggcataggatgcgacggtccggcaggggcagggctcggcggtcgacggaggccaattctttaacttccttcctccgtcgatcatccagcaccagcaggagaatcccgtcgaatccccctccccaacccaagggagcgcgcgcgtatgcctcctccagatccaaagcaacaagcaacagacagcgaggggcaccggggtccgccgcatgtgtgtggttcatggaggatcatgctttcctgcttactgcattagctcctgacgcgccaccctcccctcgcgttcattgatttctgttataattactcacattattattggtaaagaaagatagggcaccgcttctaatttgatgggcattccgttaccgtctcaacgtcaacaacaggtcttttcagcggctcgggcaaaaggcgacaagtcagtgcagagaagatagtgtttgatctaaccccactacaggaacagaggctgcaaagtctgaaggaaaggctaaatgtgccatatgacgaaactcggacagatcatcaagaatcgcttagggctctatggaatgcctcctttcccgatacggagctcactagcttagtttcagaacagtggaaagacatggggtggcagggcgtgaacccagcaactgatttcaggggctgtgggtttgtttcgctcgagaaccttttgttttttgcaagaacatacccggcttctttcaagaggctgatgctgaagcagcaaggaatgcgaactacatgggagtacccatttgcggtcgcgggtgtaaacatctcatacatgctgattcaactgctggagctcaactcagggcgcccgaagtctttgccagggattaacttcatcaaagtgttgacagaacacgaggatgcgttcgacgtgctgtactgcatagcgttcgagatgatggacgcccagtggctagcaatgcgagcctcgtacatgcagttcaaagaggtgctggaggccacaaggcagcagctcgagagggagctctccctggaggatctcaatggcatccatgacctccctgcctgcaacctcttgtacaaatagtgctactggtacttagattatattactgggatgcagtcaaaggaaaatttgatcaggttacatcgtaaccagcatcatcagcctgtaaaaaagaaaaaggaaaagaaaaggagagaagggagacacacatctctggttgtcagtaattcacgtacgccacagttttgcccagg

SEQ ID NO: 3837 - protein, 152 aa, Zea mays subsp. mays
  peptide (1)..(152): Ceres Seq. ID no. 12410088
  misc_feature (1)..(132): Pfam Name: Protein of unknown function, DUF609 Pfam Description: Protein of unknown function, DUF609
  misc_feature (1)..(150): Homolog of NCBI NO: 38345956 NR Description: OSJNBb0038F03.14 [Oryza sativa (japonica
  misc_feature (1)..(150): Homolog of NCBI NO: 15810014 NR Description: At2g44770/F16B22.26 [Arabidopsis thaliana]
  misc_feature (1)..(150): Homolog of NCBI NO: 18406626 NR Description: expressed protein
  misc_feature (1)..(150): Homolog of NCBI NO: 14140119 NR Description: putative protein [Oryza sativa]
  misc_feature (1)..(152): Homolog of NCBI NO: 21555509 NR Description: unknown [Arabidopsis thaliana]
  misc_feature (1)..(152): Homolog of NCBI NO: 18396599 NR Description: expressed protein
  misc_feature (1)..(152): Homolog of NCBI NO: 25363286 NR Description: protein F21B7.23 [imported] - Arabidopsis
  misc_feature (1)..(152): Homolog of NCBI NO: 15218859 NR Description: hypothetical protein; protein id: At1g03620.1
  misc_feature (1)..(152): Homolog of NCBI NO: 38567695 NR Description: B1160F02.16 [Oryza sativa (japonica
  misc_feature (1)..(152): Homolog of NCBI NO: 38344760 NR Description: OSJNBa0068L06.3 [Oryza sativa (japonica
MGWQGVNPATDFRGCGFVSLENLLFFARTYPASFKRLMLKQQGMRTTWEYPFAVAGVNISYMLIQLLELNSGRPKSLPGINFIKVLTEHEDAFDVLYCIAFEMMDAQWLAMRASYMQFKEVLEATRQQLERELSLEDLNGIHDLPACNLLYK

SEQ ID NO: 3838 - protein, 115 aa, Zea mays subsp. mays
  peptide (1)..(115): Ceres Seq. ID no. 12410089
  misc_feature (1)..(95): Pfam Name: Protein of unknown function, DUF609 Pfam Description: Protein of unknown function, DUF609
  misc_feature (1)..(113): Homolog of NCBI NO: 38345956 NR Description: OSJNBb0038F03.14 [Oryza sativa (japonica
  misc_feature (1)..(113): Homolog of NCBI NO: 15810014 NR Description: At2g44770/F16B22.26 [Arabidopsis thaliana]
  misc_feature (1)..(113): Homolog of NCBI NO: 18406626 NR Description: expressed protein
  misc_feature (1)..(113): Homolog of NCBI NO: 14140119 NR Description: putative protein [Oryza sativa]
  misc_feature (1)..(115): Homolog of NCBI NO: 21555509 NR Description: unknown [Arabidopsis thaliana]
  misc_feature (1)..(115): Homolog of NCBI NO: 18396599 NR Description: expressed protein
  misc_feature (1)..(115): Homolog of NCBI NO: 25363286 NR Description: protein F21B7.23 [imported] - Arabidopsis
  misc_feature (1)..(115): Homolog of NCBI NO: 15218859 NR Description: hypothetical protein; protein id: At1g03620.1
  misc_feature (1)..(115): Homolog of NCBI NO: 38567695 NR Description: B1160F02.16 [Oryza sativa (japonica
  misc_feature (1)..(115): Homolog of NCBI NO: 38344760 NR Description: OSJNBa0068L06.3 [Oryza sativa (japonica
MLKQQGMRTTWEYPFAVAGVNISYMLIQLLELNSGRPKSLPGINFIKVLTEHEDAFDVLYCIAFEMMDAQWLAMRASYMQFKEVLEATRQQLERELSLEDLNGIHDLPACNLLYK

SEQ ID NO: 3839 - protein, 109 aa, Zea mays subsp. mays
  peptide (1)..(109): Ceres Seq. ID no. 12410090
  misc_feature (1)..(89): Pfam Name: Protein of unknown function, DUF609 Pfam Description: Protein of unknown function, DUF609
  misc_feature (1)..(107): Homolog of NCBI NO: 38345956 NR Description: OSJNBb0038F03.14 [Oryza sativa (japonica
  misc_feature (1)..(107): Homolog of NCBI NO: 15810014 NR Description: At2g44770/F16B22.26 [Arabidopsis thaliana]
  misc_feature (1)..(107): Homolog of NCBI NO: 18406626 NR Description: expressed protein
  misc_feature (1)..(107): Homolog of NCBI NO: 14140119 NR Description: putative protein [Oryza sativa]
  misc_feature (1)..(109): Homolog of NCBI NO: 21555509 NR Description: unknown [Arabidopsis thaliana]
  misc_feature (1)..(109): Homolog of NCBI NO: 18396599 NR Description: expressed protein
  misc_feature (1)..(109): Homolog of NCBI NO: 25363286 NR Description: protein F21B7.23 [imported] - Arabidopsis
  misc_feature (1)..(109): Homolog of NCBI NO: 15218859 NR Description: hypothetical protein; protein id: At1g03620.1
  misc_feature (1)..(109): Homolog of NCBI NO: 38567695 NR Description: B1160F02.16 [Oryza sativa (japonica
  misc_feature (1)..(109): Homolog of NCBI NO: 38344760 NR Description: OSJNBa0068L06.3 [Oryza sativa (japonica
MRTTWEYPFAVAGVNISYMLIQLLELNSGRPKSLPGINFIKVLTEHEDAFDVLYCIAFEMMDAQWLAMRASYMQFKEVLEATRQQLERELSLEDLNGIHDLPACNLLYK

SEQ ID NO: 3840 - DNA, 1233 bp, Zea mays subsp. mays
  misc_feature (1)..(1233): Ceres Seq. ID no. 12365333
  misc_feature: MA Experiment ID: 108556 Result: Down-regulated in Transcription
  misc_feature: MA Experiment 108556 PARAMETER Experiment Name: Zm_Drought_P Parameter: Age (day) Value: 9
  misc_feature: MA Experiment 108556 PARAMETER Experiment Name: Zm_Drought_P Parameter: Organism Value: Zea mays
  misc_feature: MA Experiment 108556 PARAMETER Experiment Name: Zm_Drought_P Parameter: Plant Line Value: 35A19
  misc_feature: MA Experiment 108556 PARAMETER Experiment Name: Zm_Drought_P Parameter: Timepoint (hr) Value: 24
  misc_feature: MA Experiment 108556 PARAMETER Experiment Name: Zm_Drought_P Parameter: Tissue Value: Aerial
  misc_feature: MA Experiment 108556 PARAMETER Experiment Name: Zm_Drought_P Parameter: Treatment Value: Drought vs. No Drought
  misc_feature: MA Experiment ID: 20000480 Result: Down-regulated in Transcription
  misc_feature: MA Experiment 20000480 PARAMETER Experiment Name: Zm_Drought_P Parameter: Age (day) Value: 11
  misc_feature: MA Experiment 20000480 PARAMETER Experiment Name: Zm_Drought_P Parameter: Organism Value: Zea mays
  misc_feature: MA Experiment 20000480 PARAMETER Experiment Name: Zm_Drought_P Parameter: Plant Line Value: 35A19
  misc_feature: MA Experiment 20000480 PARAMETER Experiment Name: Zm_Drought_P Parameter: Timepoint (hr) Value: 72
  misc_feature: MA Experiment 20000480 PARAMETER Experiment Name: Zm_Drought_P Parameter: Tissue Value: Aerial
  misc_feature: MA Experiment 20000480 PARAMETER Experiment Name: Zm_Drought_P Parameter: Treatment Value: Drought vs. No Drought
gatttagcatcgacacgatggttcaaagcaaaagggtctacatgcagcactcgctcgcttccctccgcctcgaatggtcacgccacccagaccctgcagcagcagttaatcgtcacgcccccatccttccccagcaaacacaacacaagcagacggggagagattcagatccactcgtcacacatccgcgttaccccctctcccttggtttcctctcccaccaccaacccccatcccggttatctccgccgccgcccgctttgggaaggcgcgacgaaggcaggcgagaggctccagccggacgaggaggaaagaggagcagcagggccggaggagagatgttcctgtgggactggttctacggggtgctggcctccctcggcctgtggcagaaggaggcgaagatcctcttcctctgcctcgacaacgccggcaagaccacgctgctccacatgctcaaggacgagcggttggtgcagcaccagccgacgcagcacccgacgtcggaggagctcagcatcggcaagatcaagttcaaggccttcgacctcggcggccaccagatcgcgcgccgcgtctggaaggattactacgcaaaggttgatgctgtagtatacctggtagatgcgtatgataaggagcgatttgctgaatcaaaaaaggagctggacgctctcctgtcagatgattccttggcaaatgttccatttctcatccttggcaacaagattgatatcccgtatgctgcctctgaagaggagctgcggtatcacctaggccttagcaacttcacaaccgggaagggcaaggtcaaccttggcgactccaatgtccggccacttgaggttttcatgtgcagtgttgttcgcaagatgggctacggcgatggtttcaagtgggtctcccaatacatcaagtagggcccttgccggggcgcttgctcagcccagcgatttttttgccttgttatttgttctggttggtatttcgtcacgtgaacgatgatcatcatatcatgacagtatcatggaggggtatgaagaggaaaaaacagtgcttaacattggggaacatgttgaatctttagcgtgaaaacattttgttatgtcagtcaaactcctggaattcttttgcttttccgtaggacctttactaaggacttccctgcgatgcattataagattattgattgcttaaattatgtgttatatatatggtggtggattggtactg

SEQ ID NO: 3841 - protein, 305 aa, Zea mays subsp. mays
  peptide (1)..(305): Ceres Seq. ID no. 12365334
  misc_feature (117)..(304): Pfam Name: ADP-ribosylation factor family Pfam Description: ADP-ribosylation factor family
  misc_feature (113)..(305): Homolog of NCBI NO: 1549222 NR Description: NtSar1 protein [Nicotiana tabacum]
  misc_feature (113)..(305): Homolog of NCBI NO: 3334321 NR Description: GTP-binding protein SAR1A
  misc_feature (113)..(304): Homolog of NCBI NO: 15228793 NR Description: Sar1-like GTP binding protein
  misc_feature (113)..(304): Homolog of NCBI NO: 15223516 NR Description: GTP-binding protein (SAR1B)
  misc_feature (113)..(305): Homolog of NCBI NO: 7438457 NR Description: GTP-binding protein - curled-leaved tobacco
  misc_feature (113)..(305): Homolog of NCBI NO: 34902852 NR Description: unnamed protein product [Oryza sativa (japonica
  misc_feature (113)..(304): Homolog of NCBI NO: 3334322 NR Description: GTP-binding protein SAR1B
  misc_feature (113)..(305): Homolog of NCBI NO: 15235226 NR Description: SAR1/GTP-binding secretory factor
  misc_feature (113)..(304): Homolog of NCBI NO: 25294172 NR Description: ras-like small monomeric GTP-binding protein
  misc_feature (113)..(305): Homolog of NCBI NO: 34894960 NR Description: putative GTP-binding protein
FSIDTMVQSKRVYMQHSLASLRLEWSRHPDPAAAVNRHAPILPQQTQHKQTGRDSDPLVTHPRYPLSLGFLSHHQPPSRLSPPPPALGRRDEGRREAPAGRGGKRSSRAGGEMFLWDWFYGVLASLGLWQKEAKILFLCLDNAGKTTLLHMLKDERLVQHQPTQHPTSEELSIGKIKFKAFDLGGHQIARRVWKDYYAKVDAVVYLVDAYDKERFAESKKELDALLSDDSLANVPFLILGNKIDIPYAASEEELRYHLGLSNFTTGKGKVNLGDSNVRPLEVFMCSVVRKMGYGDGFKWVSQYIK

SEQ ID NO: 3842 - protein, 300 aa, Zea mays subsp. mays
  peptide (1)..(300): Ceres Seq. ID no. 12365335
  misc_feature (112)..(299): Pfam Name: ADP-ribosylation factor family Pfam Description: ADP-ribosylation factor family
  misc_feature (108)..(299): Homolog of NCBI NO: 3334322 NR Description: GTP-binding protein SAR1B
  misc_feature (108)..(300): Homolog of NCBI NO: 7438457 NR Description: GTP-binding protein - curled-leaved tobacco
  misc_feature (108)..(300): Homolog of NCBI NO: 34902852 NR Description: unnamed protein product [Oryza sativa (japonica
  misc_feature (108)..(300): Homolog of NCBI NO: 1549222 NR Description: NtSar1 protein [Nicotiana tabacum]
  misc_feature (108)..(300): Homolog of NCBI NO: 3334321 NR Description: GTP-binding protein SAR1A
  misc_feature (108)..(299): Homolog of NCBI NO: 15228793 NR Description: Sar1-like GTP binding protein
  misc_feature (108)..(299): Homolog of NCBI NO: 15223516 NR Description: GTP-binding protein (SAR1B)
  misc_feature (108)..(300): Homolog of NCBI NO: 15235226 NR Description: SAR1/GTP-binding secretory factor
  misc_feature (108)..(299): Homolog of NCBI NO: 25294172 NR Description: ras-like small monomeric GTP-binding protein
  misc_feature (108)..(300): Homolog of NCBI NO: 34894960 NR Description: putative GTP-binding protein
MVQSKRVYMQHSLASLRLEWSRHPDPAAAVNRHAPILPQQTQHKQTGRDSDPLVTHPRYPLSLGFLSHHQPPSRLSPPPPALGRRDEGRREAPAGRGGKRSSRAGGEMFLWDWFYGVLASLGLWQKEAKILFLCLDNAGKTTLLHMLKDERLVQHQPTQHPTSEELSIGKIKFKAFDLGGHQIARRVWKDYYAKVDAVVYLVDAYDKERFAESKKELDALLSDDSLANVPFLILGNKIDIPYAASEEELRYHLGLSNFTTGKGKVNLGDSNVRPLEVFMCSVVRKMGYGDGFKWVSQYIK

SEQ ID NO: 3843 - protein, 292 aa, Zea mays subsp. mays
  peptide (1)..(292): Ceres Seq. ID no. 12365336
  misc_feature (104)..(291): Pfam Name: ADP-ribosylation factor family Pfam Description: ADP-ribosylation factor family
  misc_feature (100)..(291): Homolog of NCBI NO: 3334322 NR Description: GTP-binding protein SAR1B
  misc_feature (100)..(292): Homolog of NCBI NO: 7438457 NR Description: GTP-binding protein - curled-leaved tobacco
  misc_feature (100)..(292): Homolog of NCBI NO: 34902852 NR Description: unnamed protein product [Oryza sativa (japonica
  misc_feature (100)..(292): Homolog of NCBI NO: 1549222 NR Description: NtSar1 protein [Nicotiana tabacum]
  misc_feature (100)..(292): Homolog of NCBI NO: 3334321 NR Description: GTP-binding protein SAR1A
  misc_feature (100)..(291): Homolog of NCBI NO: 15228793 NR Description: Sar1-like GTP binding protein
  misc_feature (100)..(291): Homolog of NCBI NO: 15223516 NR Description: GTP-binding protein (SAR1B)
  misc_feature (100)..(292): Homolog of NCBI NO: 15235226 NR Description: SAR1/GTP-binding secretory factor
  misc_feature (100)..(291): Homolog of NCBI NO: 25294172 NR Description: ras-like small monomeric GTP-binding protein
  misc_feature (100)..(292): Homolog of NCBI NO: 34894960 NR Description: putative GTP-binding protein
MQHSLASLRLEWSRHPDPAAAVNRHAPILPQQTQHKQTGRDSDPLVTHPRYPLSLGFLSHHQPPSRLSPPPPALGRRDEGRREAPAGRGGKRSSRAGGEMFLWDWFYGVLASLGLWQKEAKILFLCLDNAGKTTLLHMLKDERLVQHQPTQHPTSEELSIGKIKFKAFDLGGHQIARRVWKDYYAKVDAVVYLVDAYDKERFAESKKELDALLSDDSLANVPFLILGNKIDIPYAASEEELRYHLGLSNFTTGKGKVNLGDSNVRPLEVFMCSVVRKMGYGDGFKWVSQYIK

SEQ ID NO: 3844 - DNA, 1563 bp, Zea mays subsp. mays
  misc_feature (1)..(1563): Ceres Seq. ID no. 12410083
  misc_feature: MA Experiment ID: 108522 Result: Up-regulated in Transcription
  misc_feature: MA Experiment 108522 PARAMETER Experiment Name: Zm_42deg_Heat_P Parameter: Age (day) Value: 8
  misc_feature: MA Experiment 108522 PARAMETER Experiment Name: Zm_42deg_Heat_P Parameter: Organism Value: Zea mays
  misc_feature: MA Experiment 108522 PARAMETER Experiment Name: Zm_42deg_Heat_P Parameter: Plant Line Value: 35A19
  misc_feature: MA Experiment 108522 PARAMETER Experiment Name: Zm_42deg_Heat_P Parameter: Temperature (deg C) Value: 42 vs. 22
  misc_feature: MA Experiment 108522 PARAMETER Experiment Name: Zm_42deg_Heat_P Parameter: Timepoint (hr) Value: 1
  misc_feature: MA Experiment 108522 PARAMETER Experiment Name: Zm_42deg_Heat_P Parameter: Tissue Value: Aerial
  misc_feature: MA Experiment ID: 108527 Result: Up-regulated in Transcription
  misc_feature: MA Experiment 108527 PARAMETER Experiment Name: Zm_5mM_NO_P Parameter: Age (day) Value: 8
  misc_feature: MA Experiment 108527 PARAMETER Experiment Name: Zm_5mM_NO_P Parameter: Organism Value: Zea mays
  misc_feature: MA Experiment 108527 PARAMETER Experiment Name: Zm_5mM_NO_P Parameter: Plant Line Value: 35A19
  misc_feature: MA Experiment 108527 PARAMETER Experiment Name: Zm_5mM_NO_P Parameter: Timepoint (hr) Value: 6
  misc_feature: MA Experiment 108527 PARAMETER Experiment Name: Zm_5mM_NO_P Parameter: Tissue Value: Aerial
  misc_feature: MA Experiment 108527 PARAMETER Experiment Name: Zm_5mM_NO_P Parameter: Treatment Value: 5mM NO vs. No Treatment
  misc_feature: MA Experiment ID: 108528 Result: Down-regulated in Transcription
  misc_feature: MA Experiment 108528 PARAMETER Experiment Name: Zm_Imbibed_Seeds_P Parameter: Age (day) Value: 5 vs. 2
  misc_feature: MA Experiment 108528 PARAMETER Experiment Name: Zm_Imbibed_Seeds_P Parameter: Organism Value: Zea mays
  misc_feature: MA Experiment 108528 PARAMETER Experiment Name: Zm_Imbibed_Seeds_P Parameter: Plant Line Value: 35A19
  misc_feature: MA Experiment 108528 PARAMETER Experiment Name: Zm_Imbibed_Seeds_P Parameter: Tissue Value: Aerial vs. Embryo
  misc_feature: MA Experiment ID: 108530 Result: Down-regulated in Transcription
  misc_feature: MA Experiment 108530 PARAMETER Experiment Name: Zm_Imbibed_Seeds_P Parameter: Age (day) Value: 6 vs. 2
  misc_feature: MA Experiment 108530 PARAMETER Experiment Name: Zm_Imbibed_Seeds_P Parameter: Organism Value: Zea mays
  misc_feature: MA Experiment 108530 PARAMETER Experiment Name: Zm_Imbibed_Seeds_P Parameter: Plant Line Value: 35A19
  misc_feature: MA Experiment 108530 PARAMETER Experiment Name: Zm_Imbibed_Seeds_P Parameter: Tissue Value: Aerial vs. Embryo
  misc_feature: MA Experiment ID: 108535 Result: Down-regulated in Transcription
  misc_feature: MA Experiment 108535 PARAMETER Experiment Name: Zm_Meristem_P Parameter: Age (day) Value: 8
  misc_feature: MA Experiment 108535 PARAMETER Experiment Name: Zm_Meristem_P Parameter: Organism Value: Zea mays
  misc_feature: MA Experiment 108535 PARAMETER Experiment Name: Zm_Meristem_P Parameter: Plant Line Value: 35A19
  misc_feature: MA Experiment 108535 PARAMETER Experiment Name: Zm_Meristem_P Parameter: Tissue Value: Root Meristem vs. Above Root Meristem
  misc_feature: MA Experiment ID: 108542 Result: Up-regulated in Transcription
  misc_feature: MA Experiment 108542 PARAMETER Experiment Name: Zm_150mM_NaCl_P Parameter: Age (day) Value: 8
  misc_feature: MA Experiment 108542 PARAMETER Experiment Name: Zm_150mM_NaCl_P Parameter: Organism Value: Zea mays
  misc_feature: MA Experiment 108542 PARAMETER Experiment Name: Zm_150mM_NaCl_P Parameter: Plant Line Value: 35A19
  misc_feature: MA Experiment 108542 PARAMETER Experiment Name: Zm_150mM_NaCl_P Parameter: Timepoint (hr) Value: 6
  misc_feature: MA Experiment 108542 PARAMETER Experiment Name: Zm_150mM_NaCl_P Parameter: Tissue Value: Aerial
  misc_feature: MA Experiment 108542 PARAMETER Experiment Name: Zm_150mM_NaCl_P Parameter: Treatment Value: 150mM NaCl vs. No Treatment
  misc_feature: MA Experiment ID: 108545 Result: Down-regulated in Transcription
  misc_feature: MA Experiment 108545 PARAMETER Experiment Name: Zm_Imbibed_Seeds_P Parameter: Age (day) Value: 3 vs. 2
  misc_feature: MA Experiment 108545 PARAMETER Experiment Name: Zm_Imbibed_Seeds_P Parameter: Organism Value: Zea mays
  misc_feature: MA Experiment 108545 PARAMETER Experiment Name: Zm_Imbibed_Seeds_P Parameter: Plant Line Value: 35A19
  misc_feature: MA Experiment 108545 PARAMETER Experiment Name: Zm_Imbibed_Seeds_P Parameter: Tissue Value: Aerial vs. Embryo
  misc_feature: MA Experiment ID: 108547 Result: Down-regulated in Transcription
  misc_feature: MA Experiment 108547 PARAMETER Experiment Name: Zm_Imbibed_Seeds_P Parameter: Age (day) Value: 4 vs. 2
  misc_feature: MA Experiment 108547 PARAMETER Experiment Name: Zm_Imbibed_Seeds_P Parameter: Organism Value: Zea mays
  misc_feature: MA Experiment 108547 PARAMETER Experiment Name: Zm_Imbibed_Seeds_P Parameter: Plant Line Value: 35A19
  misc_feature: MA Experiment 108547 PARAMETER Experiment Name: Zm_Imbibed_Seeds_P Parameter: Tissue Value: Aerial vs. Embryo
  misc_feature: MA Experiment ID: 108559 Result: Up-regulated in Transcription
  misc_feature: MA Experiment 108559 PARAMETER Experiment Name: Zm_5mM_NO_P Parameter: Age (day) Value: 8
  misc_feature: MA Experiment 108559 PARAMETER Experiment Name: Zm_5mM_NO_P Parameter: Organism Value: Zea mays
  misc_feature: MA Experiment 108559 PARAMETER Experiment Name: Zm_5mM_NO_P Parameter: Plant Line Value: 35A19
  misc_feature: MA Experiment 108559 PARAMETER Experiment Name: Zm_5mM_NO_P Parameter: Timepoint (hr) Value: 12
  misc_feature: MA Experiment 108559 PARAMETER Experiment Name: Zm_5mM_NO_P Parameter: Tissue Value: Aerial
  misc_feature: MA Experiment 108559 PARAMETER Experiment Name: Zm_5mM_NO_P Parameter: Treatment Value: 5mM NO vs. No Treatment
  misc_feature: MA Experiment ID: 20000477 Result: Up-regulated in Transcription
  misc_feature: MA Experiment 20000477 PARAMETER Experiment Name: Zm_5mM_SA_P Parameter: Age (day) Value: 10
  misc_feature: MA Experiment 20000477 PARAMETER Experiment Name: Zm_5mM_SA_P Parameter: Organism Value: Zea mays
  misc_feature: MA Experiment 20000477 PARAMETER Experiment Name: Zm_5mM_SA_P Parameter: Plant Line Value: 35A19
  misc_feature: MA Experiment 20000477 PARAMETER Experiment Name: Zm_5mM_SA_P Parameter: Timepoint (hr) Value: 48
  misc_feature: MA Experiment 20000477 PARAMETER Experiment Name: Zm_5mM_SA_P Parameter: Tissue Value: Aerial
  misc_feature: MA Experiment 20000477 PARAMETER Experiment Name: Zm_5mM_SA_P Parameter: Treatment Value: 5mM SA vs. No Treatment
  misc_feature: MA Experiment ID: 20000478 Result: Up-regulated in Transcription
  misc_feature: MA Experiment 20000478 PARAMETER Experiment Name: Zm_5mM_SA_P Parameter: Age (day) Value: 11
  misc_feature: MA Experiment 20000478 PARAMETER Experiment Name: Zm_5mM_SA_P Parameter: Organism Value: Zea mays
  misc_feature: MA Experiment 20000478 PARAMETER Experiment Name: Zm_5mM_SA_P Parameter: Plant Line Value: 35A19
  misc_feature: MA Experiment 20000478 PARAMETER Experiment Name: Zm_5mM_SA_P Parameter: Timepoint (hr) Value: 72
  misc_feature: MA Experiment 20000478 PARAMETER Experiment Name: Zm_5mM_SA_P Parameter: Tissue Value: Aerial
  misc_feature: MA Experiment 20000478 PARAMETER Experiment Name: Zm_5mM_SA_P Parameter: Treatment Value: 5mM SA vs. No Treatment
  misc_feature: MA Experiment ID: 20000479 Result: Up-regulated in Transcription
  misc_feature: MA Experiment 20000479 PARAMETER Experiment Name: Zm_Drought_P Parameter: Age (day) Value: 10
  misc_feature: MA Experiment 20000479 PARAMETER Experiment Name: Zm_Drought_P Parameter: Organism Value: Zea mays
  misc_feature: MA Experiment 20000479 PARAMETER Experiment Name: Zm_Drought_P Parameter: Plant Line Value: 35A19
  misc_feature: MA Experiment 20000479 PARAMETER Experiment Name: Zm_Drought_P Parameter: Timepoint (hr) Value: 48
  misc_feature: MA Experiment 20000479 PARAMETER Experiment Name: Zm_Drought_P Parameter: Tissue Value: Aerial
  misc_feature: MA Experiment 20000479 PARAMETER Experiment Name: Zm_Drought_P Parameter: Treatment Value: Drought vs. No Drought
  misc_feature: MA Experiment ID: 20000480 Result: Up-regulated in Transcription
  misc_feature: MA Experiment 20000480 PARAMETER Experiment Name: Zm_Drought_P Parameter: Age (day) Value: 11
  misc_feature: MA Experiment 20000480 PARAMETER Experiment Name: Zm_Drought_P Parameter: Organism Value: Zea mays
  misc_feature: MA Experiment 20000480 PARAMETER Experiment Name: Zm_Drought_P Parameter: Plant Line Value: 35A19
  misc_feature: MA Experiment 20000480 PARAMETER Experiment Name: Zm_Drought_P Parameter: Timepoint (hr) Value: 72
  misc_feature: MA Experiment 20000480 PARAMETER Experiment Name: Zm_Drought_P Parameter: Tissue Value: Aerial
  misc_feature: MA Experiment 20000480 PARAMETER Experiment Name: Zm_Drought_P Parameter: Treatment Value: Drought vs. No Drought
  misc_feature: MA Experiment ID: 20000488 Result: Down-regulated in Transcription
  misc_feature: MA Experiment 20000488 PARAMETER Experiment Name: Zm_50mM_NH4NO3_L_to_H_P Parameter: Organism Value: Zea mays
  misc_feature: MA Experiment 20000488 PARAMETER Experiment Name: Zm_50mM_NH4NO3_L_to_H_P Parameter: Timepoint (hr) Value: 8
  misc_feature: MA Experiment 20000488 PARAMETER Experiment Name: Zm_50mM_NH4NO3_L_to_H_P Parameter: Tissue Value: Leaves
  misc_feature: MA Experiment 20000488 PARAMETER Experiment Name: Zm_50mM_NH4NO3_L_to_H_P Parameter: Treatment Value: 50mM NH4NO3 vs. 100mM Mannitol
  misc_feature: MA Experiment ID: 20000626 Result: Up-regulated in Transcription
  misc_feature: MA Experiment 20000626 PARAMETER Experiment Name: Zm_Herbicide-Treatments_P Parameter: Timepoint (hr) Value: 12
  misc_feature: MA Experiment 20000626 PARAMETER Experiment Name: Zm_Herbicide-Treatments_P Parameter: Tissue Value: Aerial
  misc_feature: MA Experiment 20000626 PARAMETER Experiment Name: Zm_Herbicide-Treatments_P Parameter: Treatment Value: Roundup vs. No Treatment
  misc_feature: MA Experiment ID: 20000627 Result: Up-regulated in Transcription
  misc_feature: MA Experiment 20000627 PARAMETER Experiment Name: Zm_Herbicide-Treatments_P Parameter: Timepoint (hr) Value: 12
  misc_feature: MA Experiment 20000627 PARAMETER Experiment Name: Zm_Herbicide-Treatments_P Parameter: Tissue Value: Aerial
  misc_feature: MA Experiment 20000627 PARAMETER Experiment Name: Zm_Herbicide-Treatments_P Parameter: Treatment Value: Finale vs. No Treatment
  misc_feature: MA Experiment ID: 20000630 Result: Up-regulated in Transcription
  misc_feature: MA Experiment 20000630 PARAMETER Experiment Name: Zm_Herbicide-Treatments_P Parameter: Timepoint (hr) Value: 4
  misc_feature: MA Experiment 20000630 PARAMETER Experiment Name: Zm_Herbicide-Treatments_P Parameter: Tissue Value: Aerial
  misc_feature: MA Experiment 20000630 PARAMETER Experiment Name: Zm_Herbicide-Treatments_P Parameter: Treatment Value: Roundup vs. No Treatment
  misc_feature: MA Experiment ID: 20001612 Result: Up-regulated in Transcription
  misc_feature: MA Experiment 20001612 PARAMETER Experiment Name: Zm_50ppm_KNO3_L-to-H_P Parameter: Age (day) Value: 19
  misc_feature: MA Experiment 20001612 PARAMETER Experiment Name: Zm_50ppm_KNO3_L-to-H_P Parameter: Organism Value: Zea mays
  misc_feature: MA Experiment 20001612 PARAMETER Experiment Name: Zm_50ppm_KNO3_L-to-H_P Parameter: Plant Line Value: 35A19
  misc_feature: MA Experiment 20001612 PARAMETER Experiment Name: Zm_50ppm_KNO3_L-to-H_P Parameter: Timepoint (hr) Value: 8
  misc_feature: MA Experiment 20001612 PARAMETER Experiment Name: Zm_50ppm_KNO3_L-to-H_P Parameter: Tissue Value: Roots
  misc_feature: MA Experiment 20001612 PARAMETER Experiment Name: Zm_50ppm_KNO3_L-to-H_P Parameter: Treatment Value: 50ppm KNO3 vs. 50ppm KCl
gtttacggattctttttctagcatttctcaattcttttttgttccggccccaatatgctctgtctcaaagtcaatttgcctacgagttcgaacgaaccgacaagaaggagcaatacacaagagagaagacaaggaatagcgccagcggcggccagggtgccgctcgatctctatgacttgttcttccctccctttcttcccttcacaaggttcctgaggcccgctttgagctgagatggattcgtcccagtagtgttctgggtgctcccgtttcttgatttcttccgaacttaggcattactgtttacagaatacgaccacaagattccggacactgtgttttgctcttctccgagtttgcactttgcttgatattccatttggaggagctgcgatgggctgtctgcaaacaaagcacgccagtcgatcgccgcacttgctggatacacgggaagctgtagcccttgctgctgaaacatcttgtgagaaagtggatcttccagattttgttaatattgctactggaacactgcggcgtgagaattgaattccatcttccataagaaagaggaatcaaacggttgctttcagatatactgccatgttttcctgcttacattcatgcctacctccttatttttttcccatattttttcggttaacaagcctagcgaaaacaccgtggcattgcaacttctctgactaactctgatacgcatgtattgttgtgtacttgtgttttgggtctagtttgttaagctccacctattgttgcagttacagtgagtgaagttgaagcactgcatgacctcttccggaaaataagtaattcagttatcagagataatctaattcacaaggaagaattccaacttgctctctttaggggcaagaagcagcaaaatctctttgttgatagggtatttgacttgtttgatcaaaaacgaaatggtgtaattgaatttggtgagtttgttcgatctcttggtgtgtttcatccagatgcaccagaagatcagaaagttgcatttgcatttaagttgtatgacttaaaacagacaggctttatagaacggcatgagttaaaggagatggtgctggctctgctggacgaatcagatttggatattgcgagcgacgctgtcgagatgattgttgacaggacatttgatcaggccgacacaaaaggtgatgggaagatagatcaggaagaatggactgaatatgctaaagacaatccatacgtgctgaggaatatgacccttccatacctcaaggacattactatggtattcccaagctttgtgatgcactcagaaatcagtgaaacagacatggctgtctaacctgaaaagtaactgcaaactcacagcttctctgcacagcctgatgtatattaatgatggaaccggaatcttttcatcaagaaaaggttaatttgcaaccttctctcgtgaacagaaatttgtggactggtgtaaatggtgggaataggaaaggtgttctgttatattaccgacaagcaaacgagcaatctagcatctatctgattgtcgttttcag

SEQ ID NO: 3845 - protein, 84 aa, Zea mays subsp. mays
  peptide (1)..(84): Ceres Seq. ID no. 12410084
  misc_feature (1)..(80): Homolog of NCBI NO: 21593228 NR Description: calcineurin B-like protein 2 [Arabidopsis
  misc_feature (1)..(80): Homolog of NCBI NO: 15236778 NR Description: calcineurin B-like protein 3
  misc_feature (1)..(80): Homolog of NCBI NO: 15241101 NR Description: calcineurin B-like protein 2 (gb|AAC26009.1)
  misc_feature (1)..(79): Homolog of NCBI NO: 15238015 NR Description: calcineurin B 1
  misc_feature (1)..(79): Homolog of NCBI NO: 25295757 NR Description: protein F1N19.5 [imported] - Arabidopsis thaliana
  misc_feature (1)..(80): Homolog of NCBI NO: 16924116 NR Description: putative calcineurin B-like protein [Oryza sativa]
  misc_feature (1)..(80): Homolog of NCBI NO: 22137326 NR Description: calcineurin B [Pisum sativum]
  misc_feature (1)..(79): Homolog of NCBI NO: 15217657 NR Description: calcineurin B-like protein
  misc_feature (1)..(82): Homolog of NCBI NO: 15237928 NR Description: calcium sensor homolog (gb|AAC26110.1)
  misc_feature (1)..(82): Homolog of NCBI NO: 15290058 NR Description: calcineurin B-like protein
MVLALLDESDLDIASDAVEMIVDRTFDQADTKGDGKIDQEEWTEYAKDNPYVLRNMTLPYLKDITMVFPSFVMHSEISETDMAV

SEQ ID NO: 3846 - protein, 65 aa, Zea mays subsp. mays
  peptide (1)..(65): Ceres Seq. ID no. 12410085
  misc_feature (1)..(61): Homolog of NCBI NO: 21593228 NR Description: calcineurin B-like protein 2 [Arabidopsis
  misc_feature (1)..(61): Homolog of NCBI NO: 15236778 NR Description: calcineurin B-like protein 3
  misc_feature (1)..(61): Homolog of NCBI NO: 15241101 NR Description: calcineurin B-like protein 2 (gb|AAC26009.1)
  misc_feature (1)..(60): Homolog of NCBI NO: 15238015 NR Description: calcineurin B 1
  misc_feature (1)..(60): Homolog of NCBI NO: 25295757 NR Description: protein F1N19.5 [imported] - Arabidopsis thaliana
  misc_feature (1)..(61): Homolog of NCBI NO: 16924116 NR Description: putative calcineurin B-like protein [Oryza sativa]
  misc_feature (1)..(61): Homolog of NCBI NO: 22137326 NR Description: calcineurin B [Pisum sativum]
  misc_feature (1)..(60): Homolog of NCBI NO: 15217657 NR Description: calcineurin B-like protein
  misc_feature (1)..(63): Homolog of NCBI NO: 15237928 NR Description: calcium sensor homolog (gb|AAC26110.1)
  misc_feature (1)..(63): Homolog of NCBI NO: 15290058 NR Description: calcineurin B-like protein
MIVDRTFDQADTKGDGKIDQEEWTEYAKDNPYVLRNMTLPYLKDITMVFPSFVMHSEISETDMAV

SEQ ID NO: 3847 - protein, 59 aa, Zea mays subsp. mays
  peptide (1)..(59): Ceres Seq. ID no. 12410086
MLCLKVNLPTSSNEPTRRSNTQERRQGIAPAAARVPLDLYDLFFPPFLPFTRFLRPALS

SEQ ID NO: 3848 - DNA, 1622 bp, Zea mays subsp. mays
  misc_feature (1)..(1622): Ceres Seq. ID no. 12407965
  misc_feature: MA Experiment ID: 108534 Result: Up-regulated in Transcription
  misc_feature: MA Experiment 108534 PARAMETER Experiment Name: Zm_4deg_Cold_P Parameter: Age (hr) Value: 8
  misc_feature: MA Experiment 108534 PARAMETER Experiment Name: Zm_4deg_Cold_P Parameter: Organism Value: Zea mays
  misc_feature: MA Experiment 108534 PARAMETER Experiment Name: Zm_4deg_Cold_P Parameter: Plant Line Value: 35A19
  misc_feature: MA Experiment 108534 PARAMETER Experiment Name: Zm_4deg_Cold_P Parameter: Temperature (deg C) Value: 4 vs. 22
  misc_feature: MA Experiment 108534 PARAMETER Experiment Name: Zm_4deg_Cold_P Parameter: Timepoint (hr) Value: 6
  misc_feature: MA Experiment 108534 PARAMETER Experiment Name: Zm_4deg_Cold_P Parameter: Tissue Value: Aerial
  misc_feature: MA Experiment ID: 108542 Result: Up-regulated in Transcription
  misc_feature: MA Experiment 108542 PARAMETER Experiment Name: Zm_150mM_NaCl_P Parameter: Age (day) Value: 8
  misc_feature: MA Experiment 108542 PARAMETER Experiment Name: Zm_150mM_NaCl_P Parameter: Organism Value: Zea mays
  misc_feature: MA Experiment 108542 PARAMETER Experiment Name: Zm_150mM_NaCl_P Parameter: Plant Line Value: 35A19
  misc_feature: MA Experiment 108542 PARAMETER Experiment Name: Zm_150mM_NaCl_P Parameter: Timepoint (hr) Value: 6
  misc_feature: MA Experiment 108542 PARAMETER Experiment Name: Zm_150mM_NaCl_P Parameter: Tissue Value: Aerial
  misc_feature: MA Experiment 108542 PARAMETER Experiment Name: Zm_150mM_NaCl_P Parameter: Treatment Value: 150mM NaCl vs. No Treatment
  misc_feature: MA Experiment ID: 108556 Result: Up-regulated in Transcription
  misc_feature: MA Experiment 108556 PARAMETER Experiment Name: Zm_Drought_P Parameter: Age (day) Value: 9
  misc_feature: MA Experiment 108556 PARAMETER Experiment Name: Zm_Drought_P Parameter: Organism Value: Zea mays
  misc_feature: MA Experiment 108556 PARAMETER Experiment Name: Zm_Drought_P Parameter: Plant Line Value: 35A19
  misc_feature: MA Experiment 108556 PARAMETER Experiment Name: Zm_Drought_P Parameter: Timepoint (hr) Value: 24
  misc_feature: MA Experiment 108556 PARAMETER Experiment Name: Zm_Drought_P Parameter: Tissue Value: Aerial
  misc_feature: MA Experiment 108556 PARAMETER Experiment Name: Zm_Drought_P Parameter: Treatment Value: Drought vs. No Drought
  misc_feature: MA Experiment ID: 108689 Result: Up-regulated in Transcription
  misc_feature: MA Experiment 108689 PARAMETER Experiment Name: Zm_Drought_Roots_P Parameter: Age (day) Value: 9
  misc_feature: MA Experiment 108689 PARAMETER Experiment Name: Zm_Drought_Roots_P Parameter: Organism Value: Zea mays
  misc_feature: MA Experiment 108689 PARAMETER Experiment Name: Zm_Drought_Roots_P Parameter: Plant Line Value: 35A19
  misc_feature: MA Experiment 108689 PARAMETER Experiment Name: Zm_Drought_Roots_P Parameter: Timepoint (hr) Value: 24
  misc_feature: MA Experiment 108689 PARAMETER Experiment Name: Zm_Drought_Roots_P Parameter: Tissue Value: Roots
  misc_feature: MA Experiment 108689 PARAMETER Experiment Name: Zm_Drought_Roots_P Parameter: Treatment Value: Drought vs. No Drought
  misc_feature: MA Experiment ID: 20000492 Result: Down-regulated in Transcription
  misc_feature: MA Experiment 20000492 PARAMETER Experiment Name: Zm_Hybrid_Seed_Dev_P Parameter: DAP Value: 12
  misc_feature: MA Experiment 20000492 PARAMETER Experiment Name: Zm_Hybrid_Seed_Dev_P Parameter: Organism Value: Zea mays
  misc_feature: MA Experiment 20000492 PARAMETER Experiment Name: Zm_Hybrid_Seed_Dev_P Parameter: Plant Line Value: 35A19
  misc_feature: MA Experiment 20000492 PARAMETER Experiment Name: Zm_Hybrid_Seed_Dev_P Parameter: Tissue Value: Fert Kernel vs. Unfert Floret
aaaacgcacccccaagctaccaacgcacgcaaagcacggacgggcgcatacagctttccctttcgcgagtgcgtgccccttctcttctctagttctcttctccgtcgcgtcagagatcagggagagaccagagcaaacaacaaccaccgcttgtttcatcaagaatcgtggaggagaaccgaaaggtgtagtagccttttccggtagggcatctgctagagccggccggttgaagcaggggagcgagaggaggagggcagccgagcaggagcatcgcagtggtggttaagcagcagcaacgacgacgacgacgacgctgagaggtttccccgttcccgacggcacgtccaccgaggcggcgccatcgcgatgggtcctctggcgccgctgaggtgtaacccgccgccgccgttctccaagtcgccggggtccctgctgctgctgtccaagtcgctcaccctctactgctgagccgagccccctcctcgatcggttccatgggcgccgtggcctcgtcggcgggtggggcccggggaggcgatggcacggtgctgggcgacctgccggagaactgcgtcgcggaggtgctgctcaggctggacccgctggagatctgccggatggcgcggctcagccgcacgttccgtggcgccgcgtccggggacggtgtctgggagtccaagctaccgaggaactacgcgcgcctcctcgccgttgctgcggccggcgatggggaaggtgggcaggccgccgcgtcggcgccgggggcagagctgctgcccaagaaggaactgtacgcgcggctttgccgtcggaaccgtttcgacggcggcaaaaaggagttctggctggacaagggcggtggaggtctatgtatgtcaatttcttcaagggcgctttcaataacaggcattgatgataggaggtattggaacttcattcccagtgatgaatcaagattccgcacggttgcgtacctctcgcaaatctggtggtttgaagtgagaggggaggttgaattcttcttcccagaaggcacgtacagcctattctaccgcattcatctcggccgaccattcaagcgtcttggccggcgagtctacagctcggagcacgtccacggctgggacatgaagccggtgcgtttccagatgtcgacctccgacggacagcatgttcagtccaagtgctacttgagcgatcccggtatctggatcaaccaccatgtcggggacttcgtcgtgaaggactcgagcaggccagtgaacatcaggttcgcgatgattcagatagactgcacgcacacgaaaggcggcctctgcgtggattcggtcgtggtgaaaccgcagcacctcgcgcagaaaaaagcgccctggacttacgtctagggaggagggatatgatccatagtttccttttggattgttctactaccagatgtgcgttttgtttacagaagtgcggttttttacatttgcacttatacgcgtattttgcagtcatgtaatgtaattgaaggggtaagtgatttttttagttcctcttgtcccccctaggaacatgttggacctctgtaaattgttcgtttgaactttgaaatgtacatcggctgtgttctgcct

SEQ ID NO: 3849 - protein, 296 aa, Zea mays subsp. mays
  peptide (1)..(296): Ceres Seq. ID no. 12407966
  misc_feature (19)..(64): Pfam Name: F-box domain Pfam Description: F-box domain
  misc_feature (23)..(283): Homolog of NCBI NO: 15226939 NR Description: putative phloem-specific lectin; protein id:
  misc_feature (107)..(283): Homolog of NCBI NO: 27754673 NR Description: unknown protein [Arabidopsis thaliana]
  misc_feature (1)..(283): Homolog of NCBI NO: 15231726 NR Description: putative protein; protein id: At3g53000.1
  misc_feature (1)..(283): Homolog of NCBI NO: 15242282 NR Description: putative protein
  misc_feature (19)..(283): Homolog of NCBI NO: 15221677 NR Description: unknown protein; protein id: At1g63090.1
  misc_feature (5)..(283): Homolog of NCBI NO: 15222051 NR Description: hypothetical protein; protein id: At1g12710.1
  misc_feature (19)..(289): Homolog of NCBI NO: 23397334 NR Description: unknown protein [Arabidopsis thaliana]
  misc_feature (19)..(289): Homolog of NCBI NO: 30695337 NR Description: F-box protein (lectin-related) [Arabidopsis
  misc_feature (22)..(284): Homolog of NCBI NO: 38567911 NR Description: OSJNBa0088I22.7 [Oryza sativa (japonica
  misc_feature (1)..(290): Homolog of NCBI NO: 37536186 NR Description: unknown protein [Oryza sativa (japonica
MGAVASSAGGARGGDGTVLGDLPENCVAEVLLRLDPLEICRMARLSRTFRGAASGDGVWESKLPRNYARLLAVAAAGDGEGGQAAASAPGAELLPKKELYARLCRRNRFDGGKKEFWLDKGGGGLCMSISSRALSITGIDDRRYWNFIPSDESRFRTVAYLSQIWWFEVRGEVEFFFPEGTYSLFYRIHLGRPFKRLGRRVYSSEHVHGWDMKPVRFQMSTSDGQHVQSKCYLSDPGIWINHHVGDFVVKDSSRPVNIRFAMIQIDCTHTKGGLCVDSVVVKPQHLAQKKAPWTYV

SEQ ID NO: 3850 - protein, 255 aa, Zea mays subsp. mays
  peptide (1)..(255): Ceres Seq. ID no. 12407967
  misc_feature (1)..(242): Homolog of NCBI NO: 15226939 NR Description: putative phloem-specific lectin; protein id:
  misc_feature (66)..(242): Homolog of NCBI NO: 27754673 NR Description: unknown protein [Arabidopsis thaliana]
  misc_feature (1)..(242): Homolog of NCBI NO: 15231726 NR Description: putative protein; protein id: At3g53000.1
  misc_feature (1)..(242): Homolog of NCBI NO: 15242282 NR Description: putative protein
  misc_feature (1)..(242): Homolog of NCBI NO: 15221677 NR Description: unknown protein; protein id: At1g63090.1
  misc_feature (1)..(242): Homolog of NCBI NO: 15222051 NR Description: hypothetical protein; protein id: At1g12710.1
  misc_feature (1)..(248): Homolog of NCBI NO: 23397334 NR Description: unknown protein [Arabidopsis thaliana]
  misc_feature (1)..(248): Homolog of NCBI NO: 30695337 NR Description: F-box protein (lectin-related) [Arabidopsis
  misc_feature (1)..(243): Homolog of NCBI NO: 38567911 NR Description: OSJNBa0088I22.7 [Oryza sativa (japonica
  misc_feature (1)..(249): Homolog of NCBI NO: 37536186 NR Description: unknown protein [Oryza sativa (japonica
MARLSRTFRGAASGDGVWESKLPRNYARLLAVAAAGDGEGGQAAASAPGAELLPKKELYARLCRRNRFDGGKKEFWLDKGGGGLCMSISSRALSITGIDDRRYWNFIPSDESRFRTVAYLSQIWWFEVRGEVEFFFPEGTYSLFYRIHLGRPFKRLGRRVYSSEHVHGWDMKPVRFQMSTSDGQHVQSKCYLSDPGIWINHHVGDFVVKDSSRPVNIRFAMIQIDCTHTKGGLCVDSVVVKPQHLAQKKAPWTYV

SEQ ID NO: 3851 - protein, 170 aa, Zea mays subsp. mays
  peptide (1)..(170): Ceres Seq. ID no. 12407968
  misc_feature (1)..(157): Homolog of NCBI NO: 27754673 NR Description: unknown protein [Arabidopsis thaliana]
  misc_feature (1)..(157): Homolog of NCBI NO: 15231726 NR Description: putative protein; protein id: At3g53000.1
  misc_feature (1)..(157): Homolog of NCBI NO: 15242282 NR Description: putative protein
  misc_feature (1)..(157): Homolog of NCBI NO: 15221677 NR Description: unknown protein; protein id: At1g63090.1
  misc_feature (1)..(157): Homolog of NCBI NO: 15222051 NR Description: hypothetical protein; protein id: At1g12710.1
  misc_feature (1)..(163): Homolog of NCBI NO: 23397334 NR Description: unknown protein [Arabidopsis thaliana]
  misc_feature (1)..(163): Homolog of NCBI NO: 30695337 NR Description: F-box protein (lectin-related) [Arabidopsis
  misc_feature (1)..(158): Homolog of NCBI NO: 38567911 NR Description: OSJNBa0088I22.7 [Oryza sativa (japonica
  misc_feature (1)..(164): Homolog of NCBI NO: 37536186 NR Description: unknown protein [Oryza sativa (japonica
  misc_feature (1)..(157): Homolog of NCBI NO: 15226939 NR Description: putative phloem-specific lectin; protein id:
MSISSRALSITGIDDRRYWNFIPSDESRFRTVAYLSQIWWFEVRGEVEFFFPEGTYSLFYRIHLGRPFKRLGRRVYSSEHVHGWDMKPVRFQMSTSDGQHVQSKCYLSDPGIWINHHVGDFVVKDSSRPVNIRFAMIQIDCTHTKGGLCVDSVVVKPQHLAQKKAPWTYV

SEQ ID NO: 3852 - DNA, 873 bp, Zea mays subsp. mays
  misc_feature (1)..(873): Ceres Seq. ID no. 12410079
  misc_feature: MA Experiment ID: 108530 Result: Down-regulated in Transcription
  misc_feature: MA Experiment 108530 PARAMETER Experiment Name: Zm_Imbibed_Seeds_P Parameter: Age (day) Value: 6 vs. 2
  misc_feature: MA Experiment 108530 PARAMETER Experiment Name: Zm_Imbibed_Seeds_P Parameter: Organism Value: Zea mays
  misc_feature: MA Experiment 108530 PARAMETER Experiment Name: Zm_Imbibed_Seeds_P Parameter: Plant Line Value: 35A19
  misc_feature: MA Experiment 108530 PARAMETER Experiment Name: Zm_Imbibed_Seeds_P Parameter: Tissue Value: Aerial vs. Embryo
  misc_feature: MA Experiment ID: 108535 Result: Up-regulated in Transcription
  misc_feature: MA Experiment 108535 PARAMETER Experiment Name: Zm_Meristem_P Parameter: Age (day) Value: 8
  misc_feature: MA Experiment 108535 PARAMETER Experiment Name: Zm_Meristem_P Parameter: Organism Value: Zea mays
  misc_feature: MA Experiment 108535 PARAMETER Experiment Name: Zm_Meristem_P Parameter: Plant Line Value: 35A19
  misc_feature: MA Experiment 108535 PARAMETER Experiment Name: Zm_Meristem_P Parameter: Tissue Value: Root Meristem vs. Above Root Meristem
  misc_feature: MA Experiment ID: 108556 Result: Down-regulated in Transcription
  misc_feature: MA Experiment 108556 PARAMETER Experiment Name: Zm_Drought_P Parameter: Age (day) Value: 9
  misc_feature: MA Experiment 108556 PARAMETER Experiment Name: Zm_Drought_P Parameter: Organism Value: Zea mays
  misc_feature: MA Experiment 108556 PARAMETER Experiment Name: Zm_Drought_P Parameter: Plant Line Value: 35A19
  misc_feature: MA Experiment 108556 PARAMETER Experiment Name: Zm_Drought_P Parameter: Timepoint (hr) Value: 24
  misc_feature: MA Experiment 108556 PARAMETER Experiment Name: Zm_Drought_P Parameter: Tissue Value: Aerial
  misc_feature: MA Experiment 108556 PARAMETER Experiment Name: Zm_Drought_P Parameter: Treatment Value: Drought vs. No Drought
  misc_feature: MA Experiment ID: 20000492 Result: Up-regulated in Transcription
  misc_feature: MA Experiment 20000492 PARAMETER Experiment Name: Zm_Hybrid_Seed_Dev_P Parameter: DAP Value: 12
  misc_feature: MA Experiment 20000492 PARAMETER Experiment Name: Zm_Hybrid_Seed_Dev_P Parameter: Organism Value: Zea mays
  misc_feature: MA Experiment 20000492 PARAMETER Experiment Name: Zm_Hybrid_Seed_Dev_P Parameter: Plant Line Value: 35A19
  misc_feature: MA Experiment 20000492 PARAMETER Experiment Name: Zm_Hybrid_Seed_Dev_P Parameter: Tissue Value: Fert Kernel vs. Unfert Floret
caatgtcgcgtgcggccactagatttttcctgacgcggtgtctgctcccacttcccctcctctcccccaggtggcggcagcggcggcggggtagcatttgtgctacgagggcttttgcaatggcggcttcggggttcggcggcggcgaggcgccaaaaccctaccgccgccgcgaatcccgcacgaccccaaccatgaccgtgctgagccgccctaccccgggcacggcccagtgcttcgggcggaagaagaccgccgtcgcggtcgcgttacacgaagccggggcgcggcctgatcaaggtgaacggcgtcccgattgagctgatccgaccggagatgctccgcctcaaggccttcgagcccatcctgctggcgggggcggtcccggttcaaggacatcgacatgcggatccgcgtccgcggcggcgggaagacgtcgcagatctacgccatccgccaggccgtcgccaaggggctcgtcgcctactaccagaagtacgtcgacgaggccgccaagaaggagatcaaggacatctttacccgctacgatcgcaccctcctcgtcgctgacccccggcgctgcgagccgaagaagttcggcggacgtggtgcccgcgccaggttccagaagtcgtaccgttgagcggctgcctgctccatctcgatttttcagatcgttgtgggtgttcttcgctttatttcctatcaatggatctgcttatctggttctatatctagctgctgctttaccataatgtttagactttaatgcctagcctgaaaccttgtttgcaatgtgaaattaatgtgagagattatgaagactattttggctagtccctctattatgattttcatcattccagtattgtg

SEQ ID NO: 3853 - protein, 105 aa, Zea mays subsp. mays
  peptide (1)..(105): Ceres Seq. ID no. 12410080
  misc_feature (68)..(94): Homolog of NCBI NO: 1172818 NR Description: 40S RIBOSOMAL PROTEIN S16
MSRAATRFFLTRCLLPLPLLSPRWRQRRRGSICATRAFAMAASGFGGGEAPKPYRRRESRTTPTMTVLSRPTPGTAQCFGRKKTAVAVALHEAGARPDQGERRPD

SEQ ID NO: 3854 - protein, 79 aa, Zea mays subsp. mays
  peptide (1)..(79): Ceres Seq. ID no. 12410081
  misc_feature (1)..(79): Pfam Name: Ribosomal protein S9/S16 Pfam Description: Ribosomal protein S9/S16
  misc_feature (1)..(79): Homolog of NCBI NO: 15229252 NR Description: putative 40S ribosomal protein S16; protein id:
  misc_feature (1)..(79): Homolog of NCBI NO: 15238809 NR Description: 40S RIBOSOMAL PROTEIN S16
  misc_feature (1)..(79): Homolog of NCBI NO: 15226676 NR Description: 40S ribosomal protein S16
  misc_feature (1)..(79): Homolog of NCBI NO: 17369864 NR Description: 40S ribosomal protein S16
  misc_feature (1)..(79): Homolog of NCBI NO: 1173209 NR Description: 40S RIBOSOMAL PROTEIN S16
  misc_feature (1)..(79): Homolog of NCBI NO: 40556671 NR Description: small subunit ribosomal protein S16 [Capsicum
  misc_feature (1)..(79): Homolog of NCBI NO: 133808 NR Description: 40S RIBOSOMAL PROTEIN S16
  misc_feature (1)..(79): Homolog of NCBI NO: 6984222 NR Description: 40S ribosomal protein S16 [Euphorbia esula]
  misc_feature (1)..(79): Homolog of NCBI NO: 3122800 NR Description: 40S RIBOSOMAL PROTEIN S16
  misc_feature (1)..(79): Homolog of NCBI NO: 1172818 NR Description: 40S RIBOSOMAL PROTEIN S16
MRIRVRGGGKTSQIYAIRQAVAKGLVAYYQKYVDEAAKKEIKDIFTRYDRTLLVADPRRCEPKKFGGRGARARFQKSYR

SEQ ID NO: 3855 - protein, 77 aa, Zea mays subsp. mays
  peptide (1)..(77): Ceres Seq. ID no. 12410082
  misc_feature (1)..(14): Homolog of NCBI NO: 15229252 NR Description: putative 40S ribosomal protein S16; protein id:
  misc_feature (1)..(14): Homolog of NCBI NO: 15238809 NR Description: 40S RIBOSOMAL PROTEIN S16
  misc_feature (1)..(14): Homolog of NCBI NO: 15226676 NR Description: 40S ribosomal protein S16
  misc_feature (1)..(14): Homolog of NCBI NO: 17369864 NR Description: 40S ribosomal protein S16
  misc_feature (1)..(14): Homolog of NCBI NO: 1173209 NR Description: 40S RIBOSOMAL PROTEIN S16
  misc_feature (1)..(14): Homolog of NCBI NO: 40556671 NR Description: small subunit ribosomal protein S16 [Capsicum
  misc_feature (1)..(14): Homolog of NCBI NO: 133808 NR Description: 40S RIBOSOMAL PROTEIN S16
  misc_feature (1)..(14): Homolog of NCBI NO: 6984222 NR Description: 40S ribosomal protein S16 [Euphorbia esula]
  misc_feature (1)..(14): Homolog of NCBI NO: 3122800 NR Description: 40S RIBOSOMAL PROTEIN S16
  misc_feature (1)..(14): Homolog of NCBI NO: 1172818 NR Description: 40S RIBOSOMAL PROTEIN S16
MLRLKAFEPILLAGAVPVQGHRHADPRPRRREDVADLRHPPGRRQGARRLLPEVRRRGRQEGDQGHLYPLRSHPPRR

SEQ ID NO: 3856 - DNA, 1773 bp, Zea mays subsp. mays
  misc_feature (1)..(1773): Ceres Seq. ID no. 12407294
  misc_feature: MA Experiment ID: 108515 Result: Up-regulated in Transcription
  misc_feature: MA Experiment 108515 PARAMETER Experiment Name: Zm_2mM_SA_P Parameter: Age (day) Value: 8
  misc_feature: MA Experiment 108515 PARAMETER Experiment Name: Zm_2mM_SA_P Parameter: Organism Value: Zea mays
  misc_feature: MA Experiment 108515 PARAMETER Experiment Name: Zm_2mM_SA_P Parameter: Plant Line Value: 35A19
  misc_feature: MA Experiment 108515 PARAMETER Experiment Name: Zm_2mM_SA_P Parameter: Timepoint (hr) Value: 12
  misc_feature: MA Experiment 108515 PARAMETER Experiment Name: Zm_2mM_SA_P Parameter: Tissue Value: Aerial
  misc_feature: MA Experiment 108515 PARAMETER Experiment Name: Zm_2mM_SA_P Parameter: Treatment Value: 2mM SA vs. No Treatment
  misc_feature: MA Experiment ID: 108526 Result: Up-regulated in Transcription
  misc_feature: MA Experiment 108526 PARAMETER Experiment Name: Zm_5mM_NO_P Parameter: Age (day) Value: 8
  misc_feature: MA Experiment 108526 PARAMETER Experiment Name: Zm_5mM_NO_P Parameter: Organism Value: Zea mays
  misc_feature: MA Experiment 108526 PARAMETER Experiment Name: Zm_5mM_NO_P Parameter: Plant Line Value: 35A19
  misc_feature: MA Experiment 108526 PARAMETER Experiment Name: Zm_5mM_NO_P Parameter: Timepoint (hr) Value: 1
  misc_feature: MA Experiment 108526 PARAMETER Experiment Name: Zm_5mM_NO_P Parameter: Tissue Value: Aerial
  misc_feature: MA Experiment 108526 PARAMETER Experiment Name: Zm_5mM_NO_P Parameter: Treatment Value: 5mM NO vs. No Treatment
  misc_feature: MA Experiment ID: 108527 Result: Up-regulated in Transcription
  misc_feature: MA Experiment 108527 PARAMETER Experiment Name: Zm_5mM_NO_P Parameter: Age (day) Value: 8
  misc_feature: MA Experiment 108527 PARAMETER Experiment Name: Zm_5mM_NO_P Parameter: Organism Value: Zea mays
  misc_feature: MA Experiment 108527 PARAMETER Experiment Name: Zm_5mM_NO_P Parameter: Plant Line Value: 35A19
  misc_feature: MA Experiment 108527 PARAMETER Experiment Name: Zm_5mM_NO_P Parameter: Timepoint (hr) Value: 6
  misc_feature: MA Experiment 108527 PARAMETER Experiment Name: Zm_5mM_NO_P Parameter: Tissue Value: Aerial
  misc_feature: MA Experiment 108527 PARAMETER Experiment Name: Zm_5mM_NO_P Parameter: Treatment Value: 5mM NO vs. No Treatment
  misc_feature: MA Experiment ID: 108529 Result: Down-regulated in Transcription
  misc_feature: MA Experiment 108529 PARAMETER Experiment Name: Zm_Imbibed_Seeds_P Parameter: Age (day) Value: 5 vs. 2
  misc_feature: MA Experiment 108529 PARAMETER Experiment Name: Zm_Imbibed_Seeds_P Parameter: Organism Value: Zea mays
  misc_feature: MA Experiment 108529 PARAMETER Experiment Name: Zm_Imbibed_Seeds_P Parameter: Plant Line Value: 35A19
  misc_feature: MA Experiment 108529 PARAMETER Experiment Name: Zm_Imbibed_Seeds_P Parameter: Tissue Value: Roots vs. Embryo
  misc_feature: MA Experiment ID: 108533 Result: Down-regulated in Transcription
  misc_feature: MA Experiment 108533 PARAMETER Experiment Name: Zm_4deg_Cold_P Parameter: Age (hr) Value: 8
  misc_feature: MA Experiment 108533 PARAMETER Experiment Name: Zm_4deg_Cold_P Parameter: Organism Value: Zea mays
  misc_feature: MA Experiment 108533 PARAMETER Experiment Name: Zm_4deg_Cold_P Parameter: Plant Line Value: 35A19
  misc_feature: MA Experiment 108533 PARAMETER Experiment Name: Zm_4deg_Cold_P Parameter: Temperature (deg C) Value: 4 vs. 22
  misc_feature: MA Experiment 108533 PARAMETER Experiment Name: Zm_4deg_Cold_P Parameter: Timepoint (hr) Value: 1
  misc_feature: MA Experiment 108533 PARAMETER Experiment Name: Zm_4deg_Cold_P Parameter: Tissue Value: Aerial
  misc_feature: MA Experiment ID: 20000108 Result: Up-regulated in Transcription
  misc_feature: MA Experiment 20000108 PARAMETER Experiment Name: Zm_Root-Tips_P Parameter: Age (day) Value: 12
  misc_feature: MA Experiment 20000108 PARAMETER Experiment Name: Zm_Root-Tips_P Parameter: Organism Value: Zea mays
  misc_feature: MA Experiment 20000108 PARAMETER Experiment Name: Zm_Root-Tips_P Parameter: Tissue Value: Root tips vs. Root mid region    35
  misc_feature: MA Experiment 20000108 PARAMETER Experiment Name: Zm_Root-Tips_P Parameter: Tissue Value: Root tips vs. Root mid region   Sequence Listing-Misc Features (4)
  misc_feature: MA Experiment ID: 20000488 Result: Down-regulated in Transcription
  misc_feature: MA Experiment 20000488 PARAMETER Experiment Name: Zm_50mM_NH4NO3_L_to_H_P Parameter: Organism Value: Zea mays
  misc_feature: MA Experiment 20000488 PARAMETER Experiment Name: Zm_50mM_NH4NO3_L_to_H_P Parameter: Timepoint (hr) Value: 8
  misc_feature: MA Experiment 20000488 PARAMETER Experiment Name: Zm_50mM_NH4NO3_L_to_H_P Parameter: Tissue Value: Leaves
  misc_feature: MA Experiment 20000488 PARAMETER Experiment Name: Zm_50mM_NH4NO3_L_to_H_P Parameter: Treatment Value: 50mM NH4NO3 vs. 100mM Mannitol
  misc_feature: MA Experiment ID: 20000532 Result: Up-regulated in Transcription
  misc_feature: MA Experiment 20000532 PARAMETER Experiment Name: Zm_0.001percent_MeJA_P Parameter: Age (day) Value: 10
  misc_feature: MA Experiment 20000532 PARAMETER Experiment Name: Zm_0.001percent_MeJA_P Parameter: Organism Value: Zea mays
  misc_feature: MA Experiment 20000532 PARAMETER Experiment Name: Zm_0.001percent_MeJA_P Parameter: Plant Line Value: 35A19
  misc_feature: MA Experiment 20000532 PARAMETER Experiment Name: Zm_0.001percent_MeJA_P Parameter: Timepoint (hr) Value: 48
  misc_feature: MA Experiment 20000532 PARAMETER Experiment Name: Zm_0.001percent_MeJA_P Parameter: Tissue Value: Aerial
  misc_feature: MA Experiment 20000532 PARAMETER Experiment Name: Zm_0.001percent_MeJA_P Parameter: Treatment Value: 0.001percent MeJA vs. No Treatment
actcactagctagcttccagcagcagcagccttgtcgtgcaacagcagcaccaggaccaggctaccaccagttagctgctggggacctggggtacggttgctgttccgtgactctcgtcgcacaacacaatgccggccatggtagaggaggggctcgtcaggcgggcggcgcccgagccgcacttcctggtggtgaccttcccggcgcagggccacatcaacccggcgcgccacctcgcgcgccgcctgctacgcgccacgggggcgcgggtcaccgtctgcacggccgtgtccgcgctccgcaagatgttcccgggcgccgaggcagacgcggaggaggagggccaccgcgacggcgcgggggtgcggtacgtgccctactccgacggctacgacgacggcttcgacggcgccgtgcacgacgccacgcgctacatggaccaggtcaaggtcgtggggtcccgcacgctgggggacgtcctggcccgcctccgcggcgcgggcaggcccgccacgctcgtcgtgtacacgctgctgctgtcgtgggtggccgacgtggcgcgcgaccacgccgtgcccgccgcgctctactggatccagccggccaccgtgctcgccgtctacctgcacttcttccgcgccacgggcggcgtcgacgcggccgtcgccgcggcgggcggcgacccgtgggcgggcgtccggttcccgggcctcccgccgctccgcgtccgcgacctgccgtcgttcatcgtctccacctccgaggacgacccctacgcgttcgtcgcggacgcgttccgcgagctcgtcgggcggctggacgncggcgaggacagccccagcgtgctggccaacacgttcgacgccgtggagcccgaggcggtggcgtcgctgcgggagcacggcgtggacgtggtccccgtcggccccgtcctctccttcctggacgacgacgcggcggccggcggcaacaacgacctgttcacgcaggacggcaagggctacctcgagtggctggacgcacaggcgccgggctccgtggtgtacatctcgttcgggagcctgtcggtgatgcgcaggcggcagatcgaggaggtggcgcgggggatgtccgagagcggccgcccgttcctgtgggtgctgcgggaggacaaccgcagaagcgagggcgccgacgccgacgccgcgacgctggccggcggcgggcgcggcatggtggtggggtggtgcgaccaggtgcgggtgttgtcgcacccggccgtgggctgcttcgtcacggcactggcggctggaactccacgctggagagcacggcgtgcggcgtccccgtcgtgtgcgtgccgcagtggacggaccagggcaccaacgcgtggctggtggagaggatcgggaccggcgtcagggccgccgtcagcgacaaggacggggtgctggaggccggcgagctgcggaggtgtatcgacctcgctacctccgacatggtgcgcgccaaggccgccgtgtggagggagaaggcgcgcgccgccgcgtcgaagggcggctcgtcggagaggaacctcaaggcgttcgtcgccaagcagatcgccggcgggaataactaggccgtcagctctcgtgcggtcgacataggttatgggactcgatctacaactgtacttaattaattgttgctctaagcgcatgtgcaagtgcaaacatgtgtgtcaacgtgataatattgatattctctgcaggtgtgtgtnnacgtgataatttatataattctcncttaat

SEQ ID NO: 3857 - protein, 532 aa, Zea mays subsp. mays
  peptide (1)..(532): Ceres Seq. ID no. 12407295
  misc_feature (380)..(525): Pfam Name: UDP-glucoronosyl and UDP-glucosyl transferase Pfam Description: UDP-glucoronosyl and UDP-glucosyl transferase
  misc_feature (380)..(525): Pfam Name: UDP-glucoronosyl and UDP-glucosyl transferase Pfam Description: UDP-glucoronosyl and UDP-glucosyl transferase
  misc_feature (429)..(527): Homolog of NCBI NO: 27530877 NR Description: anthocyanin 5-glucosyltransferase [Torenia
  misc_feature (429)..(529): Homolog of NCBI NO: 4115563 NR Description: UDP-glucose:anthocyanin 5-O-glucosyltransferase
  misc_feature (429)..(523): Homolog of NCBI NO: 7433892 NR Description: hypothetical protein - Arabidopsis thaliana
  misc_feature (429)..(523): Homolog of NCBI NO: 15220556 NR Description: UDP-glycosyltransferase family; protein id:
  misc_feature (429)..(529): Homolog of NCBI NO: 18390540 NR Description: UDP-glucose transferase(UGT1)
  misc_feature (429)..(527): Homolog of NCBI NO: 27530877 NR Description: anthocyanin 5-glucosyltransferase [Torenia
  misc_feature (429)..(523): Homolog of NCBI NO: 7433892 NR Description: hypothetical protein - Arabidopsis thaliana
  misc_feature (429)..(529): Homolog of NCBI NO: 18390540 NR Description: UDP-glucose transferase(UGT1)
  misc_feature (380)..(525): Homolog of NCBI NO: 34906162 NR Description: putative anthocyanin 5-O-glucosyltransferase
  misc_feature (429)..(530): Homolog of NCBI NO: 20146093 NR Description: glucosyltransferase NTGT2 [Nicotiana tabacum]
  misc_feature (429)..(523): Homolog of NCBI NO: 14192682 NR Description: cold-induced glucosyl transferase [Solanum
  misc_feature (429)..(531): Homolog of NCBI NO: 40714353 NR Description: anthocyanin 5-O-glucosyltransferase [Iris
  misc_feature (429)..(530): Homolog of NCBI NO: 6683052 NR Description: anthocyanin 5-O-glucosyltransferase [Petunia x
  misc_feature (429)..(523): Homolog of NCBI NO: 15220556 NR Description: UDP-glycosyltransferase family; protein id:
  misc_feature (429)..(529): Homolog of NCBI NO: 4115563 NR Description: UDP-glucose:anthocyanin 5-O-glucosyltransferase
  misc_feature (429)..(530): Homolog of NCBI NO: 6683052 NR Description: anthocyanin 5-O-glucosyltransferase [Petunia x
  misc_feature (429)..(531): Homolog of NCBI NO: 40714353 NR Description: anthocyanin 5-O-glucosyltransferase [Iris
  misc_feature (429)..(523): Homolog of NCBI NO: 14192682 NR Description: cold-induced glucosyl transferase [Solanum
  misc_feature (429)..(530): Homolog of NCBI NO: 20146093 NR Description: glucosyltransferase NTGT2 [Nicotiana tabacum]
  misc_feature (380)..(525): Homolog of NCBI NO: 34906162 NR Description: putative anthocyanin 5-O-glucosyltransferase
  misc_feature (274)..(274): Xaa is any aa, unknown or other
SLASFQQQQPCRATAAPGPGYHQLAAGDLGYGCCSVTLVAQHNAGHGRGGARQAGGARAALPGGDLPGAGPHQPGAPPRAPPATRHGGAGHRLHGRVRAPQDVPGRRGRRGGGGPPRRRGGAVRALLRRLRRRLRRRRARRHALHGPGQGRGVPHAGGRPGPPPRRGQARHARRVHAAAVVGGRRGARPRRARRALLDPAGHRARRLPALLPRHGRRRRGRRRGGRRPVGGRPVPGPPAAPRPRPAVVHRLHLRGRPLRVRRGRVPRARRAAGXRRGQPQRAGQHVRRRGARGGGVAAGARRGRGPRRPRPLLPGRRRGGRRQQRPVHAGRQGLPRVAGRTGAGLRGVHLVREPVGDAQAADRGGGAGDVRERPPVPVGAAGGQPQKRGRRRRRRDAGRRRARHGGGVVRPGAGVVAPGRGLLRHGTGGWNSTLESTACGVPVVCVPQWTDQGTNAWLVERIGTGVRAAVSDKDGVLEAGELRRCIDLATSDMVRAKAAVWREKARAAASKGGSSERNLKAFVAKQIAGGNN

SEQ ID NO: 3858 - protein, 499 aa, Zea mays subsp. mays
  peptide (1)..(499): Ceres Seq. ID no. 12407296
  misc_feature (37)..(383): Pfam Name: UDP-glucoronosyl and UDP-glucosyl transferase Pfam Description: UDP-glucoronosyl and UDP-glucosyl transferase
  misc_feature (37)..(383): Pfam Name: UDP-glucoronosyl and UDP-glucosyl transferase Pfam Description: UDP-glucoronosyl and UDP-glucosyl transferase
  misc_feature (162)..(383): Homolog of NCBI NO: 7433892 NR Description: hypothetical protein - Arabidopsis thaliana
  misc_feature (16)..(207): Homolog of NCBI NO: 15220556 NR Description: UDP-glycosyltransferase family; protein id:
  misc_feature (192)..(383): Homolog of NCBI NO: 15220556 NR Description: UDP-glycosyltransferase family; protein id:
  misc_feature (14)..(211): Homolog of NCBI NO: 18390540 NR Description: UDP-glucose transferase(UGT1)
  misc_feature (193)..(383): Homolog of NCBI NO: 18390540 NR Description: UDP-glucose transferase(UGT1)
  misc_feature (162)..(383): Homolog of NCBI NO: 7433892 NR Description: hypothetical protein - Arabidopsis thaliana
  misc_feature (192)..(383): Homolog of NCBI NO: 15220556 NR Description: UDP-glycosyltransferase family; protein id:
  misc_feature (193)..(383): Homolog of NCBI NO: 18390540 NR Description: UDP-glucose transferase(UGT1)
  misc_feature (1)..(383): Homolog of NCBI NO: 34906162 NR Description: putative anthocyanin 5-O-glucosyltransferase
  misc_feature (16)..(383): Homolog of NCBI NO: 20146093 NR Description: glucosyltransferase NTGT2 [Nicotiana tabacum]
  misc_feature (16)..(383): Homolog of NCBI NO: 14192682 NR Description: cold-induced glucosyl transferase [Solanum
  misc_feature (18)..(383): Homolog of NCBI NO: 40714353 NR Description: anthocyanin 5-O-glucosyltransferase [Iris
  misc_feature (16)..(383): Homolog of NCBI NO: 6683052 NR Description: anthocyanin 5-O-glucosyltransferase [Petunia x
  misc_feature (14)..(211): Homolog of NCBI NO: 18390540 NR Description: UDP-glucose transferase(UGT1)
  misc_feature (16)..(207): Homolog of NCBI NO: 15220556 NR Description: UDP-glycosyltransferase family; protein id:
  misc_feature (16)..(383): Homolog of NCBI NO: 6683052 NR Description: anthocyanin 5-O-glucosyltransferase [Petunia x
  misc_feature (18)..(383): Homolog of NCBI NO: 40714353 NR Description: anthocyanin 5-O-glucosyltransferase [Iris
  misc_feature (16)..(383): Homolog of NCBI NO: 14192682 NR Description: cold-induced glucosyl transferase [Solanum
  misc_feature (16)..(383): Homolog of NCBI NO: 20146093 NR Description: glucosyltransferase NTGT2 [Nicotiana tabacum]
  misc_feature (1)..(383): Homolog of NCBI NO: 34906162 NR Description: putative anthocyanin 5-O-glucosyltransferase
  misc_feature (232)..(232): Xaa is any aa, unknown or other
MPAMVEEGLVRRAAPEPHFLVVTFPAQGHINPARHLARRLLRATGARVTVCTAVSALRKMFPGAEADAEEEGHRDGAGVRYVPYSDGYDDGFDGAVHDATRYMDQVKVVGSRTLGDVLARLRGAGRPATLVVYTLLLSWVADVARDHAVPAALYWIQPATVLAVYLHFFRATGGVDAAVAAAGGDPWAGVRFPGLPPLRVRDLPSFIVSTSEDDPYAFVADAFRELVGRLDXGEDSPSVLANTFDAVEPEAVASLREHGVDVVPVGPVLSFLDDDAAAGGNNDLFTQDGKGYLEWLDAQAPGSVVYISFGSLSVMRRRQIEEVARGMSESGRPFLWVLREDNRRSEGADADAATLAGGGRGMVVGWCDQVRVLSHPAVGCFVTALAAGTPRWRARRAASPSCACRSGRTRAPTRGWWRGSGPASGPPSATRTGCWRPASCGGVSTSLPPTWCAPRPPCGGRRRAPPRRRAARRRGTSRRSSPSRSPAGITRPSALVRST

SEQ ID NO: 3859 - protein, 496 aa, Zea mays subsp. mays
  peptide (1)..(496): Ceres Seq. ID no. 12407297
  misc_feature (34)..(380): Pfam Name: UDP-glucoronosyl and UDP-glucosyl transferase Pfam Description: UDP-glucoronosyl and UDP-glucosyl transferase
  misc_feature (34)..(380): Pfam Name: UDP-glucoronosyl and UDP-glucosyl transferase Pfam Description: UDP-glucoronosyl and UDP-glucosyl transferase
  misc_feature (159)..(380): Homolog of NCBI NO: 7433892 NR Description: hypothetical protein - Arabidopsis thaliana
  misc_feature (13)..(204): Homolog of NCBI NO: 15220556 NR Description: UDP-glycosyltransferase family; protein id:
  misc_feature (189)..(380): Homolog of NCBI NO: 15220556 NR Description: UDP-glycosyltransferase family; protein id:
  misc_feature (11)..(208): Homolog of NCBI NO: 18390540 NR Description: UDP-glucose transferase(UGT1)
  misc_feature (190)..(380): Homolog of NCBI NO: 18390540 NR Description: UDP-glucose transferase(UGT1)
  misc_feature (159)..(380): Homolog of NCBI NO: 7433892 NR Description: hypothetical protein - Arabidopsis thaliana
  misc_feature (189)..(380): Homolog of NCBI NO: 15220556 NR Description: UDP-glycosyltransferase family; protein id:
  misc_feature (190)..(380): Homolog of NCBI NO: 18390540 NR Description: UDP-glucose transferase(UGT1)
  misc_feature (1)..(380): Homolog of NCBI NO: 34906162 NR Description: putative anthocyanin 5-O-glucosyltransferase
  misc_feature (13)..(380): Homolog of NCBI NO: 20146093 NR Description: glucosyltransferase NTGT2 [Nicotiana tabacum]
  misc_feature (13)..(380): Homolog of NCBI NO: 14192682 NR Description: cold-induced glucosyl transferase [Solanum
  misc_feature (15)..(380): Homolog of NCBI NO: 40714353 NR Description: anthocyanin 5-O-glucosyltransferase [Iris
  misc_feature (13)..(380): Homolog of NCBI NO: 6683052 NR Description: anthocyanin 5-O-glucosyltransferase [Petunia x
  misc_feature (11)..(208): Homolog of NCBI NO: 18390540 NR Description: UDP-glucose transferase(UGT1)
  misc_feature (13)..(204): Homolog of NCBI NO: 15220556 NR Description: UDP-glycosyltransferase family; protein id:
  misc_feature (13)..(380): Homolog of NCBI NO: 6683052 NR Description: anthocyanin 5-O-glucosyltransferase [Petunia x
  misc_feature (15)..(380): Homolog of NCBI NO: 40714353 NR Description: anthocyanin 5-O-glucosyltransferase [Iris
  misc_feature (13)..(380): Homolog of NCBI NO: 14192682 NR Description: cold-induced glucosyl transferase [Solanum
  misc_feature (13)..(380): Homolog of NCBI NO: 20146093 NR Description: glucosyltransferase NTGT2 [Nicotiana tabacum]
  misc_feature (1)..(380): Homolog of NCBI NO: 34906162 NR Description: putative anthocyanin 5-O-glucosyltransferase
  misc_feature (229)..(229): Xaa is any aa, unknown or other
MVEEGLVRRAAPEPHFLVVTFPAQGHINPARHLARRLLRATGARVTVCTAVSALRKMFPGAEADAEEEGHRDGAGVRYVPYSDGYDDGFDGAVHDATRYMDQVKVVGSRTLGDVLARLRGAGRPATLVVYTLLLSWVADVARDHAVPAALYWIQPATVLAVYLHFFRATGGVDAAVAAAGGDPWAGVRFPGLPPLRVRDLPSFIVSTSEDDPYAFVADAFRELVGRLDXGEDSPSVLANTFDAVEPEAVASLREHGVDVVPVGPVLSFLDDDAAAGGNNDLFTQDGKGYLEWLDAQAPGSVVYISFGSLSVMRRRQIEEVARGMSESGRPFLWVLREDNRRSEGADADAATLAGGGRGMVVGWCDQVRVLSHPAVGCFVTALAAGTPRWRARRAASPSCACRSGRTRAPTRGWWRGSGPASGPPSATRTGCWRPASCGGVSTSLPPTWCAPRPPCGGRRRAPPRRRAARRRGTSRRSSPSRSPAGITRPSALVRST

SEQ ID NO: 3860 - DNA, 1522 bp, Zea mays subsp. mays
  misc_feature (1)..(1522): Ceres Seq. ID no. 12410063
  misc_feature: MA Experiment ID: 108528 Result: Up-regulated in Transcription
  misc_feature: MA Experiment 108528 PARAMETER Experiment Name: Zm_Imbibed_Seeds_P Parameter: Age (day) Value: 5 vs. 2
  misc_feature: MA Experiment 108528 PARAMETER Experiment Name: Zm_Imbibed_Seeds_P Parameter: Organism Value: Zea mays
  misc_feature: MA Experiment 108528 PARAMETER Experiment Name: Zm_Imbibed_Seeds_P Parameter: Plant Line Value: 35A19
  misc_feature: MA Experiment 108528 PARAMETER Experiment Name: Zm_Imbibed_Seeds_P Parameter: Tissue Value: Aerial vs. Embryo
  misc_feature: MA Experiment ID: 108530 Result: Up-regulated in Transcription
  misc_feature: MA Experiment 108530 PARAMETER Experiment Name: Zm_Imbibed_Seeds_P Parameter: Age (day) Value: 6 vs. 2
  misc_feature: MA Experiment 108530 PARAMETER Experiment Name: Zm_Imbibed_Seeds_P Parameter: Organism Value: Zea mays
  misc_feature: MA Experiment 108530 PARAMETER Experiment Name: Zm_Imbibed_Seeds_P Parameter: Plant Line Value: 35A19
  misc_feature: MA Experiment 108530 PARAMETER Experiment Name: Zm_Imbibed_Seeds_P Parameter: Tissue Value: Aerial vs. Embryo
  misc_feature: MA Experiment ID: 108535 Result: Down-regulated in Transcription
  misc_feature: MA Experiment 108535 PARAMETER Experiment Name: Zm_Meristem_P Parameter: Age (day) Value: 8
  misc_feature: MA Experiment 108535 PARAMETER Experiment Name: Zm_Meristem_P Parameter: Organism Value: Zea mays
  misc_feature: MA Experiment 108535 PARAMETER Experiment Name: Zm_Meristem_P Parameter: Plant Line Value: 35A19
  misc_feature: MA Experiment 108535 PARAMETER Experiment Name: Zm_Meristem_P Parameter: Tissue Value: Root Meristem vs. Above Root Meristem
  misc_feature: MA Experiment ID: 108543 Result: Up-regulated in Transcription
  misc_feature: MA Experiment ID: 108547 Result: Up-regulated in Transcription
  misc_feature: MA Experiment 108547 PARAMETER Experiment Name: Zm_Imbibed_Seeds_P Parameter: Age (day) Value: 4 vs. 2
  misc_feature: MA Experiment 108547 PARAMETER Experiment Name: Zm_Imbibed_Seeds_P Parameter: Organism Value: Zea mays
  misc_feature: MA Experiment 108547 PARAMETER Experiment Name: Zm_Imbibed_Seeds_P Parameter: Plant Line Value: 35A19
  misc_feature: MA Experiment 108547 PARAMETER Experiment Name: Zm_Imbibed_Seeds_P Parameter: Tissue Value: Aerial vs. Embryo
  misc_feature: MA Experiment ID: 108687 Result: Down-regulated in Transcription
  misc_feature: MA Experiment 108687 PARAMETER Experiment Name: Zm_Embryos-Flowers__P Parameter: Tissue Value: Embryo vs. Aerial+
  misc_feature: MA Experiment ID: 20000492 Result: Down-regulated in Transcription
  misc_feature: MA Experiment 20000492 PARAMETER Experiment Name: Zm_Hybrid_Seed_Dev_P Parameter: DAP Value: 12
  misc_feature: MA Experiment 20000492 PARAMETER Experiment Name: Zm_Hybrid_Seed_Dev_P Parameter: Organism Value: Zea mays
  misc_feature: MA Experiment 20000492 PARAMETER Experiment Name: Zm_Hybrid_Seed_Dev_P Parameter: Plant Line Value: 35A19
  misc_feature: MA Experiment 20000492 PARAMETER Experiment Name: Zm_Hybrid_Seed_Dev_P Parameter: Tissue Value: Fert Kernel vs. Unfert Floret
  misc_feature: MA Experiment ID: 20000534 Result: Down-regulated in Transcription
  misc_feature: MA Experiment 20000534 PARAMETER Experiment Name: Zm_Hybrid_Pollen_P Parameter: Age (day) Value: 8
  misc_feature: MA Experiment 20000534 PARAMETER Experiment Name: Zm_Hybrid_Pollen_P Parameter: Organism Value: Zea mays
  misc_feature: MA Experiment 20000534 PARAMETER Experiment Name: Zm_Hybrid_Pollen_P Parameter: Plant Line Value: 35A19
  misc_feature: MA Experiment 20000534 PARAMETER Experiment Name: Zm_Hybrid_Pollen_P Parameter: Tissue Value: Pollen vs. Aerial
gaagtcaacaggcatgccgaacggtggcggcaagaggtggctgctgctgctgccgctgtcgcggtgggttctcctcctcggcagcctccagctcccggcggtcggcggcagcggccatgtcgtcacgcgcatgcgcgggttcgacgggccacttccgttctacctcgaaaccgggtacgtggaggtggacgagcagcaaggtgtgcagctcttctactacttcgtgcgctcggagcgcgacccctacgaggacccgctgctgctgtggctgtccggcggcccaggctgctccggcatctccggccttgcctacgagataggacccttaaaatttgatgcccgagggcaaggtgaatttcccactcttctctaccgaccggagacatggaccaaggtgagcaacatcatatttgtggactcgccggtggggactgggttctcgtacgccaagtccgaggaagggctcgagaccggcgacaccaagcaagtgaagcagctagtcattttcctcaggaagtggctccaagaccatccccggttcgtgatgaatcctctttatattgctggagattcatacagtggtctcatcattcctactcttgcattagaaattgacagaagcatagaactcggtgaaaagatattttccggtctcaaggggtacattgctggcaacccgttgactggcggacagtttgatacagacagccaaattccatactttcatgccatgggacttgtatccgatgaactttacaagtgcacacgggatatcaataagcaatacatcttggatcctgcttgcccggatgatgatctgttgagccccaagactgtagcagagacagatggaacgagcaggttgatgctagagtctgcagattttctacttggttccaaatgtgcagaagctttatacattctatcctacgcttgggggaatgatgatacagttcaggagagcctcggtatccgcaaggggacaattggagcatggaaacgatacagccatgcattgccttacaattatgatatccagagtgtagtggattaccattcaaggctagccacaaaaggatacagggcgctgatatacagcggcgaccacgatgctgttgtaccccatgttggcacacaagcatggattagatacctcaacttgacaatcgttgatgattggcgaccatggtacgttggaggccaagttgctggattcacaaggagttatgcgagcggcctaacatttgccaccgtgaagggtgctggacatgttgcgccgttgtataagaccttggaatgccaaaaaatgtttataacatggatttcagggaatcctctttgatgcaagtctgatagaatgacccatcggttatctgagtgggcgtcagccgtcaggaatcctctttgaagggtcagttgcttgggtttctttggtgtcaactggttcaaatccttgatcgatatggttgatcgtaatatttttggaacttatttcaagatttattaacggtattgttctctt

SEQ ID NO: 3861 - protein, 446 aa, Zea mays subsp. mays
  peptide (1)..(446): Ceres Seq. ID no. 12410064
  misc_feature (46)..(268): Pfam Name: Serine carboxypeptidase Pfam Description: Serine carboxypeptidase
  misc_feature (22)..(446): Homolog of NCBI NO: 25289782 NR Description: probable serine carboxypeptidase I
  misc_feature (23)..(446): Homolog of NCBI NO: 15228300 NR Description: putative glucose acyltransferase; protein id:
  misc_feature (253)..(446): Homolog of NCBI NO: 7579025 NR Description: glucose acyltransferase [Lycopersicon pennellii]
  misc_feature (19)..(266): Homolog of NCBI NO: 7579025 NR Description: glucose acyltransferase [Lycopersicon pennellii]
  misc_feature (298)..(446): Homolog of NCBI NO: 4101705 NR Description: glucose acyltransferase [Solanum berthaultii]
  misc_feature (22)..(342): Homolog of NCBI NO: 4101705 NR Description: glucose acyltransferase [Solanum berthaultii]
  misc_feature (304)..(446): Homolog of NCBI NO: 37530314 NR Description: putative serine carboxypeptidase
  misc_feature (11)..(268): Homolog of NCBI NO: 37530314 NR Description: putative serine carboxypeptidase
  misc_feature (254)..(446): Homolog of NCBI NO: 38344210 NR Description: OSJNBb0051N19.2 [Oryza sativa (japonica
  misc_feature (14)..(266): Homolog of NCBI NO: 38344210 NR Description: OSJNBb0051N19.2 [Oryza sativa (japonica
KSTGMPNGGGKRWLLLLPLSRWVLLLGSLQLPAVGGSGHVVTRMRGFDGPLPFYLETGYVEVDEQQGVQLFYYFVRSERDPYEDPLLLWLSGGPGCSGISGLAYEIGPLKFDARGQGEFPTLLYRPETWTKVSNIIFVDSPVGTGFSYAKSEEGLETGDTKQVKQLVIFLRKWLQDHPRFVMNPLYIAGDSYSGLIIPTLALEIDRSIELGEKIFSGLKGYIAGNPLTGGQFDTDSQIPYFHAMGLVSDELYKCTRDINKQYILDPACPDDDLLSPKTVAETDGTSRLMLESADFLLGSKCAEALYILSYAWGNDDTVQESLGIRKGTIGAWKRYSHALPYNYDIQSVVDYHSRLATKGYRALIYSGDHDAVVPHVGTQAWIRYLNLTIVDDWRPWYVGGQVAGFTRSYASGLTFATVKGAGHVAPLYKTLECQKMFITWISGNPL

SEQ ID NO: 3862 - protein, 442 aa, Zea mays subsp. mays
  peptide (1)..(442): Ceres Seq. ID no. 12410065
  misc_feature (42)..(264): Pfam Name: Serine carboxypeptidase Pfam Description: Serine carboxypeptidase
  misc_feature (18)..(442): Homolog of NCBI NO: 25289782 NR Description: probable serine carboxypeptidase I
  misc_feature (19)..(442): Homolog of NCBI NO: 15228300 NR Description: putative glucose acyltransferase; protein id:
  misc_feature (249)..(442): Homolog of NCBI NO: 7579025 NR Description: glucose acyltransferase [Lycopersicon pennellii]
  misc_feature (15)..(262): Homolog of NCBI NO: 7579025 NR Description: glucose acyltransferase [Lycopersicon pennellii]
  misc_feature (294)..(442): Homolog of NCBI NO: 4101705 NR Description: glucose acyltransferase [Solanum berthaultii]
  misc_feature (18)..(338): Homolog of NCBI NO: 4101705 NR Description: glucose acyltransferase [Solanum berthaultii]
  misc_feature (300)..(442): Homolog of NCBI NO: 37530314 NR Description: putative serine carboxypeptidase
  misc_feature (7)..(264): Homolog of NCBI NO: 37530314 NR Description: putative serine carboxypeptidase
  misc_feature (250)..(442): Homolog of NCBI NO: 38344210 NR Description: OSJNBb0051N19.2 [Oryza sativa (japonica
  misc_feature (10)..(262): Homolog of NCBI NO: 38344210 NR Description: OSJNBb0051N19.2 [Oryza sativa (japonica
MPNGGGKRWLLLLPLSRWVLLLGSLQLPAVGGSGHVVTRMRGFDGPLPFYLETGYVEVDEQQGVQLFYYFVRSERDPYEDPLLLWLSGGPGCSGISGLAYEIGPLKFDARGQGEFPTLLYRPETWTKVSNIIFVDSPVGTGFSYAKSEEGLETGDTKQVKQLVIFLRKWLQDHPRFVMNPLYIAGDSYSGLIIPTLALEIDRSIELGEKIFSGLKGYIAGNPLTGGQFDTDSQIPYFHAMGLVSDELYKCTRDINKQYILDPACPDDDLLSPKTVAETDGTSRLMLESADFLLGSKCAEALYILSYAWGNDDTVQESLGIRKGTIGAWKRYSHALPYNYDIQSVVDYHSRLATKGYRALIYSGDHDAVVPHVGTQAWIRYLNLTIVDDWRPWYVGGQVAGFTRSYASGLTFATVKGAGHVAPLYKTLECQKMFITWISGNPL

SEQ ID NO: 3863 - protein, 403 aa, Zea mays subsp. mays
  peptide (1)..(403): Ceres Seq. ID no. 12410066
  misc_feature (3)..(225): Pfam Name: Serine carboxypeptidase Pfam Description: Serine carboxypeptidase
  misc_feature (1)..(403): Homolog of NCBI NO: 15228300 NR Description: putative glucose acyltransferase; protein id:
  misc_feature (210)..(403): Homolog of NCBI NO: 7579025 NR Description: glucose acyltransferase [Lycopersicon pennellii]
  misc_feature (1)..(223): Homolog of NCBI NO: 7579025 NR Description: glucose acyltransferase [Lycopersicon pennellii]
  misc_feature (255)..(403): Homolog of NCBI NO: 4101705 NR Description: glucose acyltransferase [Solanum berthaultii]
  misc_feature (1)..(299): Homolog of NCBI NO: 4101705 NR Description: glucose acyltransferase [Solanum berthaultii]
  misc_feature (1)..(403): Homolog of NCBI NO: 25289782 NR Description: probable serine carboxypeptidase I
  misc_feature (261)..(403): Homolog of NCBI NO: 37530314 NR Description: putative serine carboxypeptidase
  misc_feature (1)..(225): Homolog of NCBI NO: 37530314 NR Description: putative serine carboxypeptidase
  misc_feature (211)..(403): Homolog of NCBI NO: 38344210 NR Description: OSJNBb0051N19.2 [Oryza sativa (japonica
  misc_feature (1)..(223): Homolog of NCBI NO: 38344210 NR Description: OSJNBb0051N19.2 [Oryza sativa (japonica
MRGFDGPLPFYLETGYVEVDEQQGVQLFYYFVRSERDPYEDPLLLWLSGGPGCSGISGLAYEIGPLKFDARGQGEFPTLLYRPETWTKVSNIIFVDSPVGTGFSYAKSEEGLETGDTKQVKQLVIFLRKWLQDHPRFVMNPLYIAGDSYSGLIIPTLALEIDRSIELGEKIFSGLKGYIAGNPLTGGQFDTDSQIPYFHAMGLVSDELYKCTRDINKQYILDPACPDDDLLSPKTVAETDGTSRLMLESADFLLGSKCAEALYILSYAWGNDDTVQESLGIRKGTIGAWKRYSHALPYNYDIQSVVDYHSRLATKGYRALIYSGDHDAVVPHVGTQAWIRYLNLTIVDDWRPWYVGGQVAGFTRSYASGLTFATVKGAGHVAPLYKTLECQKMFITWISGNPL

SEQ ID NO: 3864 - DNA, 1300 bp, Zea mays subsp. mays
  misc_feature (1)..(1300): Ceres Seq. ID no. 13494465
  misc_feature: MA Experiment ID: 20000534 Result: Down-regulated in Transcription
  misc_feature: MA Experiment 20000534 PARAMETER Experiment Name: Zm_Hybrid_Pollen_P Parameter: Age (day) Value: 8
  misc_feature: MA Experiment 20000534 PARAMETER Experiment Name: Zm_Hybrid_Pollen_P Parameter: Organism Value: Zea mays
  misc_feature: MA Experiment 20000534 PARAMETER Experiment Name: Zm_Hybrid_Pollen_P Parameter: Plant Line Value: 35A19
  misc_feature: MA Experiment 20000534 PARAMETER Experiment Name: Zm_Hybrid_Pollen_P Parameter: Tissue Value: Pollen vs. Aerial
gagcaaaatataaagtttataaacccactcctccccttcccctgttccctctaccaccaccaccggcaccgcgggacagtctgctctcgtcccgctgcagcccgtccccgacccggaaccctagcgactgccattgcccacgcgccgctcgcccgatgaacggcgggggctctgggctggcgcccaacgccgcgcacaccgcggacgaggtcttccgcgactacaaaggccgccgcgccggcatgatcaaggccctcaccactgatgtggagaggttcttcaaactctgtgaccctgaaaaggagaacttgtgcctttatggctatcccgatgagacgtgggaggtgaccttgccagctgaggaagttccccctgagatccctgaaccagcattaggaatcaactttgctagggatggcatgaatgagaaagactggctggcgctagttgcagtccacagtgattcctggttactgtctgttgcattctactttggtgcacgctttggatttgacagagaaactaggaggcgactctttagcctgataaacaacatgcccacgatatttgaggtagtgacaggagcagccaagaagcaggcgaaggagaagacacctaatagtagcagcaagagcaacaggcctagttcaaaagtgtcaagagcagagtctcgttcaaaggctaaggtcccccaagacgaagaagagagcggtgatgacgatgaggatgaggaggcagacgagcacaacaataccttgtgtggaacttgcggaactaacgacagcaaggaccagttctggatctgttgtgataactgcgagaagtggtaccatgggaagtgtgtcaagatcacgccagctcgagctgagcatatcaagcagtacaagtgcccagactgcaccaacaagcgggccagggcatgagcggcaaacatcggcatcgggcgacctttgataggaaggaagaaaccacctcctggcttcaagatccctagatatggcgtaggtccctagtttacgaagtctgcattttcatgtgttcattaatatatctgctgattagctgttcgacctagcagtgtctaaaacgtgccgtgtgtcttctgtgctgagtgttgacatggggcctcctccctccagcctgtaaacgctgtcactgaaggtacctctcaactgaccatccttcattgttggtgtcgtgcagtgagtagtggccgtactctttgttcccagttcctagcatttgaattgctcaaatgcgtaccttgctgagtaaggccgttggaaaatgacgaatagct

SEQ ID NO: 3865 - protein, 306 aa, Zea mays subsp. mays
  peptide (1)..(306): Ceres Seq. ID no. 13494466
  misc_feature (252)..(302): Pfam Name: PHD-finger Pfam Description: PHD-finger
  misc_feature (58)..(305): Homolog of NCBI NO: 7488751 NR Description: probable zinc finger protein - alfalfa (fragment)
  misc_feature (58)..(306): Homolog of NCBI NO: 15223786 NR Description: nucleic acid binding protein (alfin-1) -related
  misc_feature (58)..(305): Homolog of NCBI NO: 21593407 NR Description: putative PHD-type zinc finger protein
  misc_feature (58)..(305): Homolog of NCBI NO: 15226967 NR Description: PHD-type zinc finger protein -related
  misc_feature (52)..(306): Homolog of NCBI NO: 15229157 NR Description: nucleic acid binding protein-related [Arabidopsis
  misc_feature (52)..(305): Homolog of NCBI NO: 30687843 NR Description: zinc finger protein - like [Arabidopsis thaliana]
  misc_feature (52)..(306): Homolog of NCBI NO: 15239624 NR Description: nucleic acid binding protein - like [Arabidopsis
  misc_feature (54)..(306): Homolog of NCBI NO: 11281498 NR Description: nucleic acid binding protein [imported] - rice
  misc_feature (54)..(306): Homolog of NCBI NO: 34907474 NR Description: nucleic acid binding protein
  misc_feature (54)..(306): Homolog of NCBI NO: 4091080 NR Description: nucleic acid binding protein [Oryza sativa]
AKYKVYKPTPPLPLFPLPPPPAPRDSLLSSRCSPSPTRNPSDCHCPRAARPMNGGGSGLAPNAAHTADEVFRDYKGRRAGMIKALTTDVERFFKLCDPEKENLCLYGYPDETWEVTLPAEEVPPEIPEPALGINFARDGMNEKDWLALVAVHSDSWLLSVAFYFGARFGFDRETRRRLFSLINNMPTIFEVVTGAAKKQAKEKTPNSSSKSNRPSSKVSRAESRSKAKVPQDEEESGDDDEDEEADEHNNTLCGTCGTNDSKDQFWICCDNCEKWYHGKCVKITPARAEHIKQYKCPDCTNKRARA

SEQ ID NO: 3866 - protein, 255 aa, Zea mays subsp. mays
  peptide (1)..(255): Ceres Seq. ID no. 13494467
  misc_feature (201)..(251): Pfam Name: PHD-finger Pfam Description: PHD-finger
  misc_feature (7)..(254): Homolog of NCBI NO: 7488751 NR Description: probable zinc finger protein - alfalfa (fragment)
  misc_feature (7)..(255): Homolog of NCBI NO: 15223786 NR Description: nucleic acid binding protein (alfin-1) -related
  misc_feature (7)..(254): Homolog of NCBI NO: 21593407 NR Description: putative PHD-type zinc finger protein
  misc_feature (7)..(254): Homolog of NCBI NO: 15226967 NR Description: PHD-type zinc finger protein -related
  misc_feature (1)..(255): Homolog of NCBI NO: 15229157 NR Description: nucleic acid binding protein-related [Arabidopsis
  misc_feature (1)..(254): Homolog of NCBI NO: 30687843 NR Description: zinc finger protein - like [Arabidopsis thaliana]
  misc_feature (1)..(255): Homolog of NCBI NO: 15239624 NR Description: nucleic acid binding protein - like [Arabidopsis
  misc_feature (3)..(255): Homolog of NCBI NO: 11281498 NR Description: nucleic acid binding protein [imported] - rice
  misc_feature (3)..(255): Homolog of NCBI NO: 34907474 NR Description: nucleic acid binding protein
  misc_feature (3)..(255): Homolog of NCBI NO: 4091080 NR Description: nucleic acid binding protein [Oryza sativa]
MNGGGSGLAPNAAHTADEVFRDYKGRRAGMIKALTTDVERFFKLCDPEKENLCLYGYPDETWEVTLPAEEVPPEIPEPALGINFARDGMNEKDWLALVAVHSDSWLLSVAFYFGARFGFDRETRRRLFSLINNMPTIFEVVTGAAKKQAKEKTPNSSSKSNRPSSKVSRAESRSKAKVPQDEEESGDDDEDEEADEHNNTLCGTCGTNDSKDQFWICCDNCEKWYHGKCVKITPARAEHIKQYKCPDCTNKRARA

SEQ ID NO: 3867 - protein, 226 aa, Zea mays subsp. mays
  peptide (1)..(226): Ceres Seq. ID no. 13494468
  misc_feature (172)..(222): Pfam Name: PHD-finger Pfam Description: PHD-finger
  misc_feature (1)..(225): Homolog of NCBI NO: 7488751 NR Description: probable zinc finger protein - alfalfa (fragment)
  misc_feature (1)..(226): Homolog of NCBI NO: 15223786 NR Description: nucleic acid binding protein (alfin-1) -related
  misc_feature (1)..(225): Homolog of NCBI NO: 21593407 NR Description: putative PHD-type zinc finger protein
  misc_feature (1)..(225): Homolog of NCBI NO: 15226967 NR Description: PHD-type zinc finger protein -related
  misc_feature (1)..(226): Homolog of NCBI NO: 15229157 NR Description: nucleic acid binding protein-related [Arabidopsis
  misc_feature (1)..(225): Homolog of NCBI NO: 30687843 NR Description: zinc finger protein - like [Arabidopsis thaliana]
  misc_feature (1)..(226): Homolog of NCBI NO: 15239624 NR Description: nucleic acid binding protein - like [Arabidopsis
  misc_feature (1)..(226): Homolog of NCBI NO: 11281498 NR Description: nucleic acid binding protein [imported] - rice
  misc_feature (1)..(226): Homolog of NCBI NO: 34907474 NR Description: nucleic acid binding protein
  misc_feature (1)..(226): Homolog of NCBI NO: 4091080 NR Description: nucleic acid binding protein [Oryza sativa]
MIKALTTDVERFFKLCDPEKENLCLYGYPDETWEVTLPAEEVPPEIPEPALGINFARDGMNEKDWLALVAVHSDSWLLSVAFYFGARFGFDRETRRRLFSLINNMPTIFEVVTGAAKKQAKEKTPNSSSKSNRPSSKVSRAESRSKAKVPQDEEESGDDDEDEEADEHNNTLCGTCGTNDSKDQFWICCDNCEKWYHGKCVKITPARAEHIKQYKCPDCTNKRARA

SEQ ID NO: 3868 - DNA, 1586 bp, Zea mays subsp. mays
  misc_feature (1)..(1586): Ceres Seq. ID no. 12405130
  misc_feature: MA Experiment ID: 108504 Result: Down-regulated in Transcription
  misc_feature: MA Experiment 108504 PARAMETER Experiment Name: Zm_Drought_P Parameter: Age (day) Value: 8
  misc_feature: MA Experiment 108504 PARAMETER Experiment Name: Zm_Drought_P Parameter: Organism Value: Zea mays
  misc_feature: MA Experiment 108504 PARAMETER Experiment Name: Zm_Drought_P Parameter: Plant Line Value: 35A19
  misc_feature: MA Experiment 108504 PARAMETER Experiment Name: Zm_Drought_P Parameter: Timepoint (hr) Value: 12
  misc_feature: MA Experiment 108504 PARAMETER Experiment Name: Zm_Drought_P Parameter: Tissue Value: Aerial
  misc_feature: MA Experiment 108504 PARAMETER Experiment Name: Zm_Drought_P Parameter: Treatment Value: Drought vs. No Drought
  misc_feature: MA Experiment ID: 108522 Result: Up-regulated in Transcription
  misc_feature: MA Experiment 108522 PARAMETER Experiment Name: Zm_42deg_Heat_P Parameter: Age (day) Value: 8
  misc_feature: MA Experiment 108522 PARAMETER Experiment Name: Zm_42deg_Heat_P Parameter: Organism Value: Zea mays
  misc_feature: MA Experiment 108522 PARAMETER Experiment Name: Zm_42deg_Heat_P Parameter: Plant Line Value: 35A19
  misc_feature: MA Experiment 108522 PARAMETER Experiment Name: Zm_42deg_Heat_P Parameter: Temperature (deg C) Value: 42 vs. 22
  misc_feature: MA Experiment 108522 PARAMETER Experiment Name: Zm_42deg_Heat_P Parameter: Timepoint (hr) Value: 1
  misc_feature: MA Experiment 108522 PARAMETER Experiment Name: Zm_42deg_Heat_P Parameter: Tissue Value: Aerial
  misc_feature: MA Experiment ID: 108527 Result: Up-regulated in Transcription
  misc_feature: MA Experiment 108527 PARAMETER Experiment Name: Zm_5mM_NO_P Parameter: Age (day) Value: 8
  misc_feature: MA Experiment 108527 PARAMETER Experiment Name: Zm_5mM_NO_P Parameter: Organism Value: Zea mays
  misc_feature: MA Experiment 108527 PARAMETER Experiment Name: Zm_5mM_NO_P Parameter: Plant Line Value: 35A19
  misc_feature: MA Experiment 108527 PARAMETER Experiment Name: Zm_5mM_NO_P Parameter: Timepoint (hr) Value: 6
  misc_feature: MA Experiment 108527 PARAMETER Experiment Name: Zm_5mM_NO_P Parameter: Tissue Value: Aerial
  misc_feature: MA Experiment 108527 PARAMETER Experiment Name: Zm_5mM_NO_P Parameter: Treatment Value: 5mM NO vs. No Treatment
  misc_feature: MA Experiment ID: 108528 Result: Down-regulated in Transcription
  misc_feature: MA Experiment 108528 PARAMETER Experiment Name: Zm_Imbibed_Seeds_P Parameter: Age (day) Value: 5 vs. 2
  misc_feature: MA Experiment 108528 PARAMETER Experiment Name: Zm_Imbibed_Seeds_P Parameter: Organism Value: Zea mays
  misc_feature: MA Experiment 108528 PARAMETER Experiment Name: Zm_Imbibed_Seeds_P Parameter: Plant Line Value: 35A19
  misc_feature: MA Experiment 108528 PARAMETER Experiment Name: Zm_Imbibed_Seeds_P Parameter: Tissue Value: Aerial vs. Embryo
  misc_feature: MA Experiment ID: 108530 Result: Down-regulated in Transcription
  misc_feature: MA Experiment 108530 PARAMETER Experiment Name: Zm_Imbibed_Seeds_P Parameter: Age (day) Value: 6 vs. 2
  misc_feature: MA Experiment 108530 PARAMETER Experiment Name: Zm_Imbibed_Seeds_P Parameter: Organism Value: Zea mays
  misc_feature: MA Experiment 108530 PARAMETER Experiment Name: Zm_Imbibed_Seeds_P Parameter: Plant Line Value: 35A19
  misc_feature: MA Experiment 108530 PARAMETER Experiment Name: Zm_Imbibed_Seeds_P Parameter: Tissue Value: Aerial vs. Embryo
  misc_feature: MA Experiment ID: 108543 Result: Up-regulated in Transcription
  misc_feature: MA Experiment ID: 108545 Result: Down-regulated in Transcription
  misc_feature: MA Experiment 108545 PARAMETER Experiment Name: Zm_Imbibed_Seeds_P Parameter: Age (day) Value: 3 vs. 2
  misc_feature: MA Experiment 108545 PARAMETER Experiment Name: Zm_Imbibed_Seeds_P Parameter: Organism Value: Zea mays
  misc_feature: MA Experiment 108545 PARAMETER Experiment Name: Zm_Imbibed_Seeds_P Parameter: Plant Line Value: 35A19
  misc_feature: MA Experiment 108545 PARAMETER Experiment Name: Zm_Imbibed_Seeds_P Parameter: Tissue Value: Aerial vs. Embryo
  misc_feature: MA Experiment ID: 108547 Result: Down-regulated in Transcription
  misc_feature: MA Experiment 108547 PARAMETER Experiment Name: Zm_Imbibed_Seeds_P Parameter: Age (day) Value: 4 vs. 2
  misc_feature: MA Experiment 108547 PARAMETER Experiment Name: Zm_Imbibed_Seeds_P Parameter: Organism Value: Zea mays
  misc_feature: MA Experiment 108547 PARAMETER Experiment Name: Zm_Imbibed_Seeds_P Parameter: Plant Line Value: 35A19
  misc_feature: MA Experiment 108547 PARAMETER Experiment Name: Zm_Imbibed_Seeds_P Parameter: Tissue Value: Aerial vs. Embryo
  misc_feature: MA Experiment ID: 108556 Result: Down-regulated in Transcription
  misc_feature: MA Experiment 108556 PARAMETER Experiment Name: Zm_Drought_P Parameter: Age (day) Value: 9
  misc_feature: MA Experiment 108556 PARAMETER Experiment Name: Zm_Drought_P Parameter: Organism Value: Zea mays
  misc_feature: MA Experiment 108556 PARAMETER Experiment Name: Zm_Drought_P Parameter: Plant Line Value: 35A19
  misc_feature: MA Experiment 108556 PARAMETER Experiment Name: Zm_Drought_P Parameter: Timepoint (hr) Value: 24
  misc_feature: MA Experiment 108556 PARAMETER Experiment Name: Zm_Drought_P Parameter: Tissue Value: Aerial
  misc_feature: MA Experiment 108556 PARAMETER Experiment Name: Zm_Drought_P Parameter: Treatment Value: Drought vs. No Drought
  misc_feature: MA Experiment ID: 108559 Result: Up-regulated in Transcription
  misc_feature: MA Experiment 108559 PARAMETER Experiment Name: Zm_5mM_NO_P Parameter: Age (day) Value: 8
  misc_feature: MA Experiment 108559 PARAMETER Experiment Name: Zm_5mM_NO_P Parameter: Organism Value: Zea mays
  misc_feature: MA Experiment 108559 PARAMETER Experiment Name: Zm_5mM_NO_P Parameter: Plant Line Value: 35A19
  misc_feature: MA Experiment 108559 PARAMETER Experiment Name: Zm_5mM_NO_P Parameter: Timepoint (hr) Value: 12
  misc_feature: MA Experiment 108559 PARAMETER Experiment Name: Zm_5mM_NO_P Parameter: Tissue Value: Aerial
  misc_feature: MA Experiment 108559 PARAMETER Experiment Name: Zm_5mM_NO_P Parameter: Treatment Value: 5mM NO vs. No Treatment
  misc_feature: MA Experiment ID: 108597 Result: Down-regulated in Transcription
  misc_feature: MA Experiment 108597 PARAMETER Experiment Name: Zm_100uM_ABA_P Parameter: Age (day) Value: 9
  misc_feature: MA Experiment 108597 PARAMETER Experiment Name: Zm_100uM_ABA_P Parameter: Organism Value: Zea mays
  misc_feature: MA Experiment 108597 PARAMETER Experiment Name: Zm_100uM_ABA_P Parameter: Plant Line Value: 35A19
  misc_feature: MA Experiment 108597 PARAMETER Experiment Name: Zm_100uM_ABA_P Parameter: Timepoint (hr) Value: 24
  misc_feature: MA Experiment 108597 PARAMETER Experiment Name: Zm_100uM_ABA_P Parameter: Tissue Value: Aerial
  misc_feature: MA Experiment 108597 PARAMETER Experiment Name: Zm_100uM_ABA_P Parameter: Treatment Value: 100uM ABA vs. No Treatment
  misc_feature: MA Experiment ID: 20000478 Result: Down-regulated in Transcription
  misc_feature: MA Experiment 20000478 PARAMETER Experiment Name: Zm_5mM_SA_P Parameter: Age (day) Value: 11
  misc_feature: MA Experiment 20000478 PARAMETER Experiment Name: Zm_5mM_SA_P Parameter: Organism Value: Zea mays
  misc_feature: MA Experiment 20000478 PARAMETER Experiment Name: Zm_5mM_SA_P Parameter: Plant Line Value: 35A19
  misc_feature: MA Experiment 20000478 PARAMETER Experiment Name: Zm_5mM_SA_P Parameter: Timepoint (hr) Value: 72
  misc_feature: MA Experiment 20000478 PARAMETER Experiment Name: Zm_5mM_SA_P Parameter: Tissue Value: Aerial
  misc_feature: MA Experiment 20000478 PARAMETER Experiment Name: Zm_5mM_SA_P Parameter: Treatment Value: 5mM SA vs. No Treatment
  misc_feature: MA Experiment ID: 20000480 Result: Down-regulated in Transcription
  misc_feature: MA Experiment 20000480 PARAMETER Experiment Name: Zm_Drought_P Parameter: Age (day) Value: 11
  misc_feature: MA Experiment 20000480 PARAMETER Experiment Name: Zm_Drought_P Parameter: Organism Value: Zea mays
  misc_feature: MA Experiment 20000480 PARAMETER Experiment Name: Zm_Drought_P Parameter: Plant Line Value: 35A19
  misc_feature: MA Experiment 20000480 PARAMETER Experiment Name: Zm_Drought_P Parameter: Timepoint (hr) Value: 72
  misc_feature: MA Experiment 20000480 PARAMETER Experiment Name: Zm_Drought_P Parameter: Tissue Value: Aerial
  misc_feature: MA Experiment 20000480 PARAMETER Experiment Name: Zm_Drought_P Parameter: Treatment Value: Drought vs. No Drought
  misc_feature: MA Experiment ID: 20000492 Result: Up-regulated in Transcription
  misc_feature: MA Experiment 20000492 PARAMETER Experiment Name: Zm_Hybrid_Seed_Dev_P Parameter: DAP Value: 12
  misc_feature: MA Experiment 20000492 PARAMETER Experiment Name: Zm_Hybrid_Seed_Dev_P Parameter: Organism Value: Zea mays
  misc_feature: MA Experiment 20000492 PARAMETER Experiment Name: Zm_Hybrid_Seed_Dev_P Parameter: Plant Line Value: 35A19
  misc_feature: MA Experiment 20000492 PARAMETER Experiment Name: Zm_Hybrid_Seed_Dev_P Parameter: Tissue Value: Fert Kernel vs. Unfert Floret
gcaacggtccaggtttccaaggtccaacgttccgacccacgggaagcttctagaaaccattagacgcaccggtcgcgttcctcctcatggcccccacttgtcatccgtccatcctcacgtctctgccccaccattttaccggtagccaacaaaactaggttccgtggcgtcgggtgggaccagcaaccagccgccgcagccggcccccaggcgcctctatatacggcactccgactccgatacattggcgacatcacagatcacacacactcgagaactccatttcgatcccatttgaaatcaacccatcctcgtttcctccgtctagcagcctctcaccctcatggccaagatcaagatcgggatcaatgggttcggcaggatcggaaggctggtggccagagtggccctgcagagcgacgacgtcgagctcgtcgccgtgaacgaccccttcatcagcaccgattacatgacctacatgttcaagtatgacactgtgcacggacagtggaagcaccatgaggtcaaggtgaaggactccaagacccttctctttggtgagaaggaggttactgtgtttggctgcaggaaccctgaggagatcccatggggttcggttggcgctgaatatgttgttgagtctactggtgttttcactgaccaggagaaggctgcagctcacttgaagggtggtgccaagaaggttgtcatttctgctcctagcaaggatgcccccatgttcgttgttggtgtcaacgagaaggagtacaagtctgacatcaacattgtctctaatgctagctgcacaaccaactgtcttgctcctcttgctaaggtcatcaatgacaagttcggtattgttgagggtctgatgaccactgttcatgccatcactgctacccagaagactgttgatgggccctcatctaaggactggaggggtggaagggctgctagtttcaacatcattcccagcagcactggagctgctaaggctgttggcaaagtgcttcctgtcctcaatggaaagctgactggaatgtctttccgtgtcccaactgtcgatgtttctgttgttgatctaactgttaggcttgagaagtctgccacctatgatgagatcaaggctgcggtcaaggccgagtcagagggtagcctcaagggcattctgggttatgtcgaggaggaccttgtttccaccgatttccagggtgacagcaggtctagcatctttgatgcgaaggctggcattgccttgaacggcaactttgtgaagcttgtgtcctggtacgacaacgagtggggatacagcacccgagtggtcgacctgatccgccacatgaacagcaccaagtaaatgaacaaactgatgaaagcatgcaaagagtgatgaaagcatgcaaagagagttgtgtttcttccccggaagtgcttccgagaataaatttttcttatctgattgtctaaaacctataattggtgtaatggtatcgtagtggttggttgagcattgagtgactcatattttgtcaggtctatgtgttatcgttaaacttttaacggtcattctatttcaaaagttttcc

SEQ ID NO: 3869 - protein, 337 aa, Zea mays subsp. mays
  peptide (1)..(337): Ceres Seq. ID no. 12405131
  misc_feature (155)..(316): Pfam Name: Glyceraldehyde 3-phosphate dehydrogenase, Pfam Description: Glyceraldehyde 3-phosphate dehydrogenase,
  misc_feature (3)..(337): Homolog of NCBI NO: 462140 NR Description: Glyceraldehyde 3-phosphate dehydrogenase,
  misc_feature (1)..(337): Homolog of NCBI NO: 120666 NR Description: Glyceraldehyde 3-phosphate dehydrogenase,
  misc_feature (1)..(337): Homolog of NCBI NO: 6016075 NR Description: Glyceraldehyde 3-phosphate dehydrogenase,
  misc_feature (1)..(337): Homolog of NCBI NO: 120680 NR Description: Glyceraldehyde 3-phosphate dehydrogenase,
  misc_feature (1)..(337): Homolog of NCBI NO: 4539543 NR Description: glyceraldehyde-3-phosphate dehydrogenase
  misc_feature (1)..(337): Homolog of NCBI NO: 462141 NR Description: Glyceraldehyde 3-phosphate dehydrogenase (GAPDH)
  misc_feature (1)..(47): Homolog of NCBI NO: 29150193 NR Description: putative glyceraldehydes 3-phosphate
  misc_feature (43)..(337): Homolog of NCBI NO: 29150193 NR Description: putative glyceraldehydes 3-phosphate
  misc_feature (1)..(336): Homolog of NCBI NO: 7431535 NR Description: glyceraldehyde-3-phosphate dehydrogenase
  misc_feature (1)..(337): Homolog of NCBI NO: 6166167 NR Description: Glyceraldehyde 3-phosphate dehydrogenase,
MAKIKIGINGFGRIGRLVARVALQSDDVELVAVNDPFISTDYMTYMFKYDTVHGQWKHHEVKVKDSKTLLFGEKEVTVFGCRNPEEIPWGSVGAEYVVESTGVFTDQEKAAAHLKGGAKKVVISAPSKDAPMFVVGVNEKEYKSDINIVSNASCTTNCLAPLAKVINDKFGIVEGLMTTVHAITATQKTVDGPSSKDWRGGRAASFNIIPSSTGAAKAVGKVLPVLNGKLTGMSFRVPTVDVSVVDLTVRLEKSATYDEIKAAVKAESEGSLKGILGYVEEDLVSTDFQGDSRSSIFDAKAGIALNGNFVKLVSWYDNEWGYSTRVVDLIRHMNSTK

SEQ ID NO: 3870 - protein, 295 aa, Zea mays subsp. mays
  peptide (1)..(295): Ceres Seq. ID no. 12405132
  misc_feature (113)..(274): Pfam Name: Glyceraldehyde 3-phosphate dehydrogenase, Pfam Description: Glyceraldehyde 3-phosphate dehydrogenase,
  misc_feature (1)..(295): Homolog of NCBI NO: 120674 NR Description: Glyceraldehyde 3-phosphate dehydrogenase,
  misc_feature (1)..(295): Homolog of NCBI NO: 462140 NR Description: Glyceraldehyde 3-phosphate dehydrogenase,
  misc_feature (1)..(295): Homolog of NCBI NO: 120666 NR Description: Glyceraldehyde 3-phosphate dehydrogenase,
  misc_feature (1)..(295): Homolog of NCBI NO: 6016075 NR Description: Glyceraldehyde 3-phosphate dehydrogenase,
  misc_feature (1)..(295): Homolog of NCBI NO: 120680 NR Description: Glyceraldehyde 3-phosphate dehydrogenase,
  misc_feature (1)..(295): Homolog of NCBI NO: 4539543 NR Description: glyceraldehyde-3-phosphate dehydrogenase
  misc_feature (1)..(295): Homolog of NCBI NO: 462141 NR Description: Glyceraldehyde 3-phosphate dehydrogenase (GAPDH)
  misc_feature (1)..(295): Homolog of NCBI NO: 29150193 NR Description: putative glyceraldehydes 3-phosphate
  misc_feature (1)..(294): Homolog of NCBI NO: 7431535 NR Description: glyceraldehyde-3-phosphate dehydrogenase
  misc_feature (1)..(295): Homolog of NCBI NO: 6166167 NR Description: Glyceraldehyde 3-phosphate dehydrogenase,
MTYMFKYDTVHGQWKHHEVKVKDSKTLLFGEKEVTVFGCRNPEEIPWGSVGAEYVVESTGVFTDQEKAAAHLKGGAKKVVISAPSKDAPMFVVGVNEKEYKSDINIVSNASCTTNCLAPLAKVINDKFGIVEGLMTTVHAITATQKTVDGPSSKDWRGGRAASFNIIPSSTGAAKAVGKVLPVLNGKLTGMSFRVPTVDVSVVDLTVRLEKSATYDEIKAAVKAESEGSLKGILGYVEEDLVSTDFQGDSRSSIFDAKAGIALNGNFVKLVSWYDNEWGYSTRVVDLIRHMNSTK

SEQ ID NO: 3871 - protein, 292 aa, Zea mays subsp. mays
  peptide (1)..(292): Ceres Seq. ID no. 12405133
  misc_feature (110)..(271): Pfam Name: Glyceraldehyde 3-phosphate dehydrogenase, Pfam Description: Glyceraldehyde 3-phosphate dehydrogenase,
  misc_feature (1)..(292): Homolog of NCBI NO: 120674 NR Description: Glyceraldehyde 3-phosphate dehydrogenase,
  misc_feature (1)..(292): Homolog of NCBI NO: 462140 NR Description: Glyceraldehyde 3-phosphate dehydrogenase,
  misc_feature (1)..(292): Homolog of NCBI NO: 120666 NR Description: Glyceraldehyde 3-phosphate dehydrogenase,
  misc_feature (1)..(292): Homolog of NCBI NO: 6016075 NR Description: Glyceraldehyde 3-phosphate dehydrogenase,
  misc_feature (1)..(292): Homolog of NCBI NO: 120680 NR Description: Glyceraldehyde 3-phosphate dehydrogenase,
  misc_feature (1)..(292): Homolog of NCBI NO: 4539543 NR Description: glyceraldehyde-3-phosphate dehydrogenase
  misc_feature (1)..(292): Homolog of NCBI NO: 462141 NR Description: Glyceraldehyde 3-phosphate dehydrogenase (GAPDH)
  misc_feature (1)..(292): Homolog of NCBI NO: 29150193 NR Description: putative glyceraldehydes 3-phosphate
  misc_feature (1)..(291): Homolog of NCBI NO: 7431535 NR Description: glyceraldehyde-3-phosphate dehydrogenase
  misc_feature (1)..(292): Homolog of NCBI NO: 6166167 NR Description: Glyceraldehyde 3-phosphate dehydrogenase,
MFKYDTVHGQWKHHEVKVKDSKTLLFGEKEVTVFGCRNPEEIPWGSVGAEYVVESTGVFTDQEKAAAHLKGGAKKVVISAPSKDAPMFVVGVNEKEYKSDINIVSNASCTTNCLAPLAKVINDKFGIVEGLMTTVHAITATQKTVDGPSSKDWRGGRAASFNIIPSSTGAAKAVGKVLPVLNGKLTGMSFRVPTVDVSVVDLTVRLEKSATYDEIKAAVKAESEGSLKGILGYVEEDLVSTDFQGDSRSSIFDAKAGIALNGNFVKLVSWYDNEWGYSTRVVDLIRHMNSTK

SEQ ID NO: 3872 - DNA, 1349 bp, Zea mays subsp. mays
  misc_feature (1)..(1349): Ceres Seq. ID no. 13498573
  misc_feature: MA Experiment ID: 108504 Result: Up-regulated in Transcription
  misc_feature: MA Experiment 108504 PARAMETER Experiment Name: Zm_Drought_P Parameter: Age (day) Value: 8
  misc_feature: MA Experiment 108504 PARAMETER Experiment Name: Zm_Drought_P Parameter: Organism Value: Zea mays
  misc_feature: MA Experiment 108504 PARAMETER Experiment Name: Zm_Drought_P Parameter: Plant Line Value: 35A19
  misc_feature: MA Experiment 108504 PARAMETER Experiment Name: Zm_Drought_P Parameter: Timepoint (hr) Value: 12
  misc_feature: MA Experiment 108504 PARAMETER Experiment Name: Zm_Drought_P Parameter: Tissue Value: Aerial
  misc_feature: MA Experiment 108504 PARAMETER Experiment Name: Zm_Drought_P Parameter: Treatment Value: Drought vs. No Drought
  misc_feature: MA Experiment ID: 108556 Result: Up-regulated in Transcription
  misc_feature: MA Experiment 108556 PARAMETER Experiment Name: Zm_Drought_P Parameter: Age (day) Value: 9
  misc_feature: MA Experiment 108556 PARAMETER Experiment Name: Zm_Drought_P Parameter: Organism Value: Zea mays
  misc_feature: MA Experiment 108556 PARAMETER Experiment Name: Zm_Drought_P Parameter: Plant Line Value: 35A19
  misc_feature: MA Experiment 108556 PARAMETER Experiment Name: Zm_Drought_P Parameter: Timepoint (hr) Value: 24
  misc_feature: MA Experiment 108556 PARAMETER Experiment Name: Zm_Drought_P Parameter: Tissue Value: Aerial
  misc_feature: MA Experiment 108556 PARAMETER Experiment Name: Zm_Drought_P Parameter: Treatment Value: Drought vs. No Drought
  misc_feature: MA Experiment ID: 108687 Result: Up-regulated in Transcription
  misc_feature: MA Experiment 108687 PARAMETER Experiment Name: Zm_Embryos-Flowers__P Parameter: Tissue Value: Embryo vs. Aerial+
  misc_feature: MA Experiment ID: 108688 Result: Down-regulated in Transcription
  misc_feature: MA Experiment 108688 PARAMETER Experiment Name: Zm_Embryos-Flowers__P Parameter: Tissue Value: Immature Flowers vs. Aerial+
  misc_feature: MA Experiment ID: 108689 Result: Up-regulated in Transcription
  misc_feature: MA Experiment 108689 PARAMETER Experiment Name: Zm_Drought_Roots_P Parameter: Age (day) Value: 9
  misc_feature: MA Experiment 108689 PARAMETER Experiment Name: Zm_Drought_Roots_P Parameter: Organism Value: Zea mays
  misc_feature: MA Experiment 108689 PARAMETER Experiment Name: Zm_Drought_Roots_P Parameter: Plant Line Value: 35A19
  misc_feature: MA Experiment 108689 PARAMETER Experiment Name: Zm_Drought_Roots_P Parameter: Timepoint (hr) Value: 24
  misc_feature: MA Experiment 108689 PARAMETER Experiment Name: Zm_Drought_Roots_P Parameter: Tissue Value: Roots
  misc_feature: MA Experiment 108689 PARAMETER Experiment Name: Zm_Drought_Roots_P Parameter: Treatment Value: Drought vs. No Drought
  misc_feature: MA Experiment ID: 20000479 Result: Up-regulated in Transcription
  misc_feature: MA Experiment 20000479 PARAMETER Experiment Name: Zm_Drought_P Parameter: Age (day) Value: 10
  misc_feature: MA Experiment 20000479 PARAMETER Experiment Name: Zm_Drought_P Parameter: Organism Value: Zea mays
  misc_feature: MA Experiment 20000479 PARAMETER Experiment Name: Zm_Drought_P Parameter: Plant Line Value: 35A19
  misc_feature: MA Experiment 20000479 PARAMETER Experiment Name: Zm_Drought_P Parameter: Timepoint (hr) Value: 48
  misc_feature: MA Experiment 20000479 PARAMETER Experiment Name: Zm_Drought_P Parameter: Tissue Value: Aerial
  misc_feature: MA Experiment 20000479 PARAMETER Experiment Name: Zm_Drought_P Parameter: Treatment Value: Drought vs. No Drought
  misc_feature: MA Experiment ID: 20000480 Result: Up-regulated in Transcription
  misc_feature: MA Experiment 20000480 PARAMETER Experiment Name: Zm_Drought_P Parameter: Age (day) Value: 11
  misc_feature: MA Experiment 20000480 PARAMETER Experiment Name: Zm_Drought_P Parameter: Organism Value: Zea mays
  misc_feature: MA Experiment 20000480 PARAMETER Experiment Name: Zm_Drought_P Parameter: Plant Line Value: 35A19
  misc_feature: MA Experiment 20000480 PARAMETER Experiment Name: Zm_Drought_P Parameter: Timepoint (hr) Value: 72
  misc_feature: MA Experiment 20000480 PARAMETER Experiment Name: Zm_Drought_P Parameter: Tissue Value: Aerial
  misc_feature: MA Experiment 20000480 PARAMETER Experiment Name: Zm_Drought_P Parameter: Treatment Value: Drought vs. No Drought
attgaactgctctgggaccgccctgtaacatccaccaactcgaggaggaggaggaggaggaggaggaggaggagagatccccccaccgagcctcggtttccaagcgccagcagaagaagaagagacaggacacatggcggcaggtttcggcccgaggttcgccgccggcgatgctccggcgagacggtgtaacctggagcggttcctcgaggccaccacgcccgtcgttgcgtcctccagctgctcgtccaaggagaccgcgaacggttgggggcagcggcggtcagacgacgcagacggctcgtcgccgttcttcgctctgggcgacctctgggactcgttcaaggagtgcagcgcgtacggcaccgctgtgccccttgctctgaacggctgcagcgacggcgtcgttcagtactacgtcccctacctgtctgcaatccagctttacggagccctcagcaggcacatcggcccttcgaggacgggtgcagaggagagcgacagcgacgcggagcgcgagacgagctccagcacgaacacgttatcggcgcgggaggaggcgagcgagagcagcaccagcggcagcgaagcctccggcgacgagggcgagccgggaccggggagctggtgccaggagcggctcctcttcgagttcctcgagtccgagcctccctaccagcgcgagcctctggctgacaagatttgtagccttgcccagcggtttccggagctcaagactctcaggagctgcgacctgtctccggcaagctggatctccgtggcgtggtacggtggacgaactagatagatgtacccgatctaccggatcccgacggggccaacgctgcgcgacctggacgcctgcttcctcacctaccactccctgtccacgcagttcgcagcaggcgccagcagcaacggccccagaccggcgacggcagccaccgcgacggcgatgatgtggctcccgacgttcgcgatggcgtcgtacaaggtgaaggcggcggcgtggacgccgggctggcgcgaccggcaggtggccgcgtccctcgcgcaggccgccgacgcctggctcaggctcctgcgcgccgaccacccggaccaccgcttcttcgccgcccggcggcctcccaggagatggtgatcatttgagtgtatagagtactctctctctctggcaagtctgaaggtagttgtcctgaaaaaagaaacggctgaggtagttagggttcactagcggaaccggagtgataaagtatgttcatcctgtagtttcaatgttttttccttttttttgtatccgccatgttctcaggaaaaaaatgtatcagaaaacgtataataggtgt

SEQ ID NO: 3873 - protein, 224 aa, Zea mays subsp. mays
  peptide (1)..(224): Ceres Seq. ID no. 13498574
  misc_feature (20)..(224): Pfam Name: Protein of unknown function (DUF789) Pfam Description: Protein of unknown function (DUF789)
  misc_feature (154)..(224): Homolog of NCBI NO: 34914654 NR Description: P0504D03.18 [Oryza sativa (japonica
  misc_feature (20)..(224): Homolog of NCBI NO: 22327664 NR Description: expressed protein [Arabidopsis thaliana]
  misc_feature (20)..(224): Homolog of NCBI NO: 15450996 NR Description: Unknown protein [Arabidopsis thaliana]
  misc_feature (20)..(224): Homolog of NCBI NO: 10177151 NR Description: gb|AAF31026.1~gene_id:K21P3.10~similar to unknown
  misc_feature (20)..(217): Homolog of NCBI NO: 25373432 NR Description: hypothetical protein At2g01260 [imported] -
  misc_feature (58)..(106): Homolog of NCBI NO: 34914654 NR Description: P0504D03.18 [Oryza sativa (japonica
  misc_feature (50)..(224): Homolog of NCBI NO: 34394268 NR Description: hypothetical protein [Oryza sativa (japonica
  misc_feature (20)..(224): Homolog of NCBI NO: 34897254 NR Description: hypothetical protein [Oryza sativa (japonica
  misc_feature (16)..(224): Homolog of NCBI NO: 22329567 NR Description: expressed protein [Arabidopsis thaliana]
  misc_feature (20)..(224): Homolog of NCBI NO: 18379188 NR Description: expressed protein [Arabidopsis thaliana]
MAAGFGPRFAAGDAPARRCNLERFLEATTPVVASSSCSSKETANGWGQRRSDDADGSSPFFALGDLWDSFKECSAYGTAVPLALNGCSDGVVQYYVPYLSAIQLYGALSRHIGPSRTGAEESDSDAERETSSSTNTLSAREEASESSTSGSEASGDEGEPGPGSWCQERLLFEFLESEPPYQREPLADKICSLAQRFPELKTLRSCDLSPASWISVAWYGGRTR

SEQ ID NO: 3874 - DNA, 986 bp, Zea mays subsp. mays
  misc_feature (1)..(986): Ceres Seq. ID no. 12376299
  misc_feature: MA Experiment ID: 108544 Result: Up-regulated in Transcription
  misc_feature: MA Experiment ID: 108545 Result: Down-regulated in Transcription
  misc_feature: MA Experiment 108545 PARAMETER Experiment Name: Zm_Imbibed_Seeds_P Parameter: Age (day) Value: 3 vs. 2
  misc_feature: MA Experiment 108545 PARAMETER Experiment Name: Zm_Imbibed_Seeds_P Parameter: Organism Value: Zea mays
  misc_feature: MA Experiment 108545 PARAMETER Experiment Name: Zm_Imbibed_Seeds_P Parameter: Plant Line Value: 35A19
  misc_feature: MA Experiment 108545 PARAMETER Experiment Name: Zm_Imbibed_Seeds_P Parameter: Tissue Value: Aerial vs. Embryo
  misc_feature: MA Experiment ID: 20000478 Result: Down-regulated in Transcription
  misc_feature: MA Experiment 20000478 PARAMETER Experiment Name: Zm_5mM_SA_P Parameter: Age (day) Value: 11
  misc_feature: MA Experiment 20000478 PARAMETER Experiment Name: Zm_5mM_SA_P Parameter: Organism Value: Zea mays
  misc_feature: MA Experiment 20000478 PARAMETER Experiment Name: Zm_5mM_SA_P Parameter: Plant Line Value: 35A19
  misc_feature: MA Experiment 20000478 PARAMETER Experiment Name: Zm_5mM_SA_P Parameter: Timepoint (hr) Value: 72
  misc_feature: MA Experiment 20000478 PARAMETER Experiment Name: Zm_5mM_SA_P Parameter: Tissue Value: Aerial
  misc_feature: MA Experiment 20000478 PARAMETER Experiment Name: Zm_5mM_SA_P Parameter: Treatment Value: 5mM SA vs. No Treatment
  misc_feature: MA Experiment ID: 20000488 Result: Down-regulated in Transcription
  misc_feature: MA Experiment 20000488 PARAMETER Experiment Name: Zm_50mM_NH4NO3_L_to_H_P Parameter: Organism Value: Zea mays
  misc_feature: MA Experiment 20000488 PARAMETER Experiment Name: Zm_50mM_NH4NO3_L_to_H_P Parameter: Timepoint (hr) Value: 8
  misc_feature: MA Experiment 20000488 PARAMETER Experiment Name: Zm_50mM_NH4NO3_L_to_H_P Parameter: Tissue Value: Leaves
  misc_feature: MA Experiment 20000488 PARAMETER Experiment Name: Zm_50mM_NH4NO3_L_to_H_P Parameter: Treatment Value: 50mM NH4NO3 vs. 100mM Mannitol
attcaagcatcgacagtcgacgctgcagcaggaagccaaagaggagagaatccatcgagtcgaccaccgagcacggtcagggcggcggggctcgccgtggccacagctcaggaatccaatcccccactcctcaccggcgcccgcggttttataaatagattccctcgtcactgtcgcggtcgcggcttgatcggattcaactcacctaccccaccccctcgattccttcccagctctggctacttcctacgccaccaccgcccgctccggcctcggctcctcgagcaagctgccatggctgccgccgcgctgagggagcaactcaacgctctcctctcctccatgttcgcctcgggtctggtggacgagcagttccagcagctgcagatgctgcaggaagacgggggcacgccgggcttcgtcgccgaggtcgtcaccctcttctgcgacgacgccgacaggatcatctccgagctcgccgctctgcttgaccagcccatcgtggactttgataaggtggacgcctacgtgcatcagctcaaagggagcagcgccagtgttggcgctcagaaagtgaagtttacttgcatgcagttccgtcagttatgtcaggataagaacagagacgggtgcatcatggcattggctgttgtgagaaatgagttctatgatctgcgcaataaattccagactatgcttcagcttgagcagcaaatccaggctcaacaataaatcgaagcagaaagcgtagctgcatgtggcctcacatgataagtgtatctttaaagatgtagaccatgttctctgtgttcctacaattgtgacaaaatcatcgtcgttgaggccggctcacatgcatgtaactgttagctataacaattattgtctaacgttgtccttgttactccacccgtttgtgttggattgccatcgaccatcatatgaaaacttttttttttccaatcccctccaatccatgtgggatg

SEQ ID NO: 3875 - protein, 243 aa, Zea mays subsp. mays
  peptide (1)..(243): Ceres Seq. ID no. 12376300
  misc_feature (102)..(239): Homolog of NCBI NO: 15228686 NR Description: ATHP2, putative
  misc_feature (99)..(239): Homolog of NCBI NO: 21593802 NR Description: putative AHP2 [Arabidopsis thaliana]
  misc_feature (99)..(239): Homolog of NCBI NO: 18379097 NR Description: putative AHP2
  misc_feature (99)..(241): Homolog of NCBI NO: 13774348 NR Description: histidine-containing phosphotransfer protein
  misc_feature (105)..(241): Homolog of NCBI NO: 15233079 NR Description: two-component phosphorelay mediator, putative
  misc_feature (99)..(239): Homolog of NCBI NO: 6009622 NR Description: histidine-containing phosphotransfer protein [Zea
  misc_feature (99)..(239): Homolog of NCBI NO: 22036126 NR Description: his-containing phosphotransfer protein [Zea mays]
  misc_feature (99)..(241): Homolog of NCBI NO: 33637786 NR Description: two-component phosphorelay mediator HP2
  misc_feature (99)..(241): Homolog of NCBI NO: 33637784 NR Description: two-component phosphorelay mediator HP1
  misc_feature (99)..(243): Homolog of NCBI NO: 5689238 NR Description: histidine-containing phosphotransfer protein [Zea
IQASTVDAAAGSQRGENPSSRPPSTVRAAGLAVATAQESNPPLLTGARGFINRFPRHCRGRGLIGFNSPTPPPRFLPSSGYFLRHHRPLRPRLLEQAAMAAAALREQLNALLSSMFASGLVDEQFQQLQMLQEDGGTPGFVAEVVTLFCDDADRIISELAALLDQPIVDFDKVDAYVHQLKGSSASVGAQKVKFTCMQFRQLCQDKNRDGCIMALAVVRNEFYDLRNKFQTMLQLEQQIQAQQ

SEQ ID NO: 3876 - protein, 145 aa, Zea mays subsp. mays
  peptide (1)..(145): Ceres Seq. ID no. 12376301
  misc_feature (4)..(141): Homolog of NCBI NO: 15228686 NR Description: ATHP2, putative
  misc_feature (1)..(141): Homolog of NCBI NO: 21593802 NR Description: putative AHP2 [Arabidopsis thaliana]
  misc_feature (1)..(141): Homolog of NCBI NO: 18379097 NR Description: putative AHP2
  misc_feature (1)..(143): Homolog of NCBI NO: 13774348 NR Description: histidine-containing phosphotransfer protein
  misc_feature (7)..(143): Homolog of NCBI NO: 15233079 NR Description: two-component phosphorelay mediator, putative
  misc_feature (1)..(141): Homolog of NCBI NO: 6009622 NR Description: histidine-containing phosphotransfer protein [Zea
  misc_feature (1)..(141): Homolog of NCBI NO: 22036126 NR Description: his-containing phosphotransfer protein [Zea mays]
  misc_feature (1)..(143): Homolog of NCBI NO: 33637786 NR Description: two-component phosphorelay mediator HP2
  misc_feature (1)..(143): Homolog of NCBI NO: 33637784 NR Description: two-component phosphorelay mediator HP1
  misc_feature (1)..(145): Homolog of NCBI NO: 5689238 NR Description: histidine-containing phosphotransfer protein [Zea
MAAAALREQLNALLSSMFASGLVDEQFQQLQMLQEDGGTPGFVAEVVTLFCDDADRIISELAALLDQPIVDFDKVDAYVHQLKGSSASVGAQKVKFTCMQFRQLCQDKNRDGCIMALAVVRNEFYDLRNKFQTMLQLEQQIQAQQ

SEQ ID NO: 3877 - protein, 129 aa, Zea mays subsp. mays
  peptide (1)..(129): Ceres Seq. ID no. 12376302
  misc_feature (1)..(125): Homolog of NCBI NO: 15228686 NR Description: ATHP2, putative
  misc_feature (1)..(125): Homolog of NCBI NO: 21593802 NR Description: putative AHP2 [Arabidopsis thaliana]
  misc_feature (1)..(125): Homolog of NCBI NO: 18379097 NR Description: putative AHP2
  misc_feature (1)..(127): Homolog of NCBI NO: 13774348 NR Description: histidine-containing phosphotransfer protein
  misc_feature (1)..(127): Homolog of NCBI NO: 15233079 NR Description: two-component phosphorelay mediator, putative
  misc_feature (1)..(125): Homolog of NCBI NO: 6009622 NR Description: histidine-containing phosphotransfer protein [Zea
  misc_feature (1)..(125): Homolog of NCBI NO: 22036126 NR Description: his-containing phosphotransfer protein [Zea mays]
  misc_feature (1)..(127): Homolog of NCBI NO: 33637786 NR Description: two-component phosphorelay mediator HP2
  misc_feature (1)..(127): Homolog of NCBI NO: 33637784 NR Description: two-component phosphorelay mediator HP1
  misc_feature (1)..(129): Homolog of NCBI NO: 5689238 NR Description: histidine-containing phosphotransfer protein [Zea
MFASGLVDEQFQQLQMLQEDGGTPGFVAEVVTLFCDDADRIISELAALLDQPIVDFDKVDAYVHQLKGSSASVGAQKVKFTCMQFRQLCQDKNRDGCIMALAVVRNEFYDLRNKFQTMLQLEQQIQAQQ

SEQ ID NO: 3878 - DNA, 1429 bp, Zea mays subsp. mays
  misc_feature (1)..(1429): Ceres Seq. ID no. 12374435
  misc_feature: MA Experiment ID: 108544 Result: Up-regulated in Transcription
  misc_feature: MA Experiment ID: 20000488 Result: Down-regulated in Transcription
  misc_feature: MA Experiment 20000488 PARAMETER Experiment Name: Zm_50mM_NH4NO3_L_to_H_P Parameter: Organism Value: Zea mays
  misc_feature: MA Experiment 20000488 PARAMETER Experiment Name: Zm_50mM_NH4NO3_L_to_H_P Parameter: Timepoint (hr) Value: 8
  misc_feature: MA Experiment 20000488 PARAMETER Experiment Name: Zm_50mM_NH4NO3_L_to_H_P Parameter: Tissue Value: Leaves
  misc_feature: MA Experiment 20000488 PARAMETER Experiment Name: Zm_50mM_NH4NO3_L_to_H_P Parameter: Treatment Value: 50mM NH4NO3 vs. 100mM Mannitol
  misc_feature: MA Experiment ID: 20000492 Result: Down-regulated in Transcription
  misc_feature: MA Experiment 20000492 PARAMETER Experiment Name: Zm_Hybrid_Seed_Dev_P Parameter: DAP Value: 12
  misc_feature: MA Experiment 20000492 PARAMETER Experiment Name: Zm_Hybrid_Seed_Dev_P Parameter: Organism Value: Zea mays
  misc_feature: MA Experiment 20000492 PARAMETER Experiment Name: Zm_Hybrid_Seed_Dev_P Parameter: Plant Line Value: 35A19
  misc_feature: MA Experiment 20000492 PARAMETER Experiment Name: Zm_Hybrid_Seed_Dev_P Parameter: Tissue Value: Fert Kernel vs. Unfert Floret
  misc_feature: MA Experiment ID: 20000535 Result: Down-regulated in Transcription
  misc_feature: MA Experiment 20000535 PARAMETER Experiment Name: Zm_Hybrid_Seed_Dev_P Parameter: DAP Value: 30 vs. 12
  misc_feature: MA Experiment 20000535 PARAMETER Experiment Name: Zm_Hybrid_Seed_Dev_P Parameter: Organism Value: Zea mays
  misc_feature: MA Experiment 20000535 PARAMETER Experiment Name: Zm_Hybrid_Seed_Dev_P Parameter: Plant Line Value: 35A19
  misc_feature: MA Experiment 20000535 PARAMETER Experiment Name: Zm_Hybrid_Seed_Dev_P Parameter: Tissue Value: Embryo vs. Unfert Floret
agtccaagtctccagctacgactgccaggtctccgcttgtcgccgtcacgcgcgcgcaggggcagggcgcaccatccccgcgccgccatgtccggcaccgggtgcctccccaccgacggcccggccctatcccgggtctgccgggacggcgcggccgccgcacggctcaagacggggtcgctgctggccattctcgtcgccagcgccgtcggcatctgcctccccgtcgcgctcacgcgggccttccgcggcagcccaaactacgcgcggggcctgctcctcgtcaagtgctacgcggctggggtcatcctctccacctcgctcgtccacgtgctccccgacgcgcacgccgccctcgccgactgcgccgtcgcctcgcgcaggccctggagggacttccccttcgcgggccttttcaccctcgtcggcgcgctgctcgcgctcctcgtcgacctctccgcctcctcccacctcgaggcccacgcccacgtcggcgcccaccacgaaactccctacgccccgatcccgaagaaggtacccgtgttcgagctcgccggcgaaatgagccccaagaaacgcgctttcttgggcgacgaccgagaagaggaccccgcgccgcacgccgccaccaacggcgcagacccggaccgcgacgacgtggcgctcttcggacccaagaagggcgcccgcagcgacgaggtcccggtcatcactgccgggtgccatgccgtcgcccatgaagtggtggaggtaggggaggggcccggtgaggacgaggaggaggccaggaggaagcagaagatggtgtccaaagtgctggagattgggatagtcttccactccgtcatcatcggagttacaatggggatgtcccaggatgtctgtgcaatccggccacttgtggttgcgctctccttccatcaggtgttcgaggggatgggcctgggcggatgcatcgcacaggctggttttgggatggcaacagttggctacatgtgcataatgttctcagtgacgacgccattgggaattcttcttggaatgctagtgttccacatgactggctacgacgatagcaatccaaatgccttaataatggaagggatccttggttcactttcggctggaattctcatctatatggcgctagtcgacctagtttctcttgattttttccacaacaagatgatgtcagcgtctttgaagctgaagaaggcgtgttacattgccttggtgcttggatctgcttctatgtcggtattagctctctgggcataggcattttgaagaaaagccttatttacgatcttcagaggtattgctccttgatgtaaaggaatggataatttgggggccaacagtacactagtccctcatgtaaatttgaacacaaaggaaactgaaaattcacgaccacagtttgtgagct

SEQ ID NO: 3879 - protein, 425 aa, Zea mays subsp. mays
  peptide (1)..(425): Ceres Seq. ID no. 12374436
  misc_feature (54)..(184): Pfam Name: ZIP Zinc transporter Pfam Description: ZIP Zinc transporter
  misc_feature (229)..(425): Homolog of NCBI NO: 34900456 NR Description: putative zinc transporter protein ZIP1
  misc_feature (48)..(157): Homolog of NCBI NO: 32966053 NR Description: iron transporter Fe2 [Oryza sativa (japonica
  misc_feature (229)..(425): Homolog of NCBI NO: 32966053 NR Description: iron transporter Fe2 [Oryza sativa (japonica
  misc_feature (19)..(161): Homolog of NCBI NO: 30526082 NR Description: putative ZIP-like zinc transporter
  misc_feature (242)..(425): Homolog of NCBI NO: 30526082 NR Description: putative ZIP-like zinc transporter
  misc_feature (258)..(425): Homolog of NCBI NO: 40888872 NR Description: TPA: putative ZIP-like protein
  misc_feature (47)..(184): Homolog of NCBI NO: 40782197 NR Description: zinc transporter ZIP6 [Arabidopsis halleri subsp.
  misc_feature (249)..(425): Homolog of NCBI NO: 40782197 NR Description: zinc transporter ZIP6 [Arabidopsis halleri subsp.
  misc_feature (38)..(184): Homolog of NCBI NO: 15227702 NR Description: putative Fe(II) transport protein; protein id:
  misc_feature (249)..(425): Homolog of NCBI NO: 15227702 NR Description: putative Fe(II) transport protein; protein id:
SPSLQLRLPGLRLSPSRARRGRAHHPRAAMSGTGCLPTDGPALSRVCRDGAAAARLKTGSLLAILVASAVGICLPVALTRAFRGSPNYARGLLLVKCYAAGVILSTSLVHVLPDAHAALADCAVASRRPWRDFPFAGLFTLVGALLALLVDLSASSHLEAHAHVGAHHETPYAPIPKKVPVFELAGEMSPKKRAFLGDDREEDPAPHAATNGADPDRDDVALFGPKKGARSDEVPVITAGCHAVAHEVVEVGEGPGEDEEEARRKQKMVSKVLEIGIVFHSVIIGVTMGMSQDVCAIRPLVVALSFHQVFEGMGLGGCIAQAGFGMATVGYMCIMFSVTTPLGILLGMLVFHMTGYDDSNPNALIMEGILGSLSAGILIYMALVDLVSLDFFHNKMMSASLKLKKACYIALVLGSASMSVLALWA

SEQ ID NO: 3880 - protein, 396 aa, Zea mays subsp. mays
  peptide (1)..(396): Ceres Seq. ID no. 12374437
  misc_feature (25)..(155): Pfam Name: ZIP Zinc transporter Pfam Description: ZIP Zinc transporter
  misc_feature (200)..(396): Homolog of NCBI NO: 34900456 NR Description: putative zinc transporter protein ZIP1
  misc_feature (19)..(128): Homolog of NCBI NO: 32966053 NR Description: iron transporter Fe2 [Oryza sativa (japonica
  misc_feature (200)..(396): Homolog of NCBI NO: 32966053 NR Description: iron transporter Fe2 [Oryza sativa (japonica
  misc_feature (1)..(132): Homolog of NCBI NO: 30526082 NR Description: putative ZIP-like zinc transporter
  misc_feature (213)..(396): Homolog of NCBI NO: 30526082 NR Description: putative ZIP-like zinc transporter
  misc_feature (229)..(396): Homolog of NCBI NO: 40888872 NR Description: TPA: putative ZIP-like protein
  misc_feature (18)..(155): Homolog of NCBI NO: 40782197 NR Description: zinc transporter ZIP6 [Arabidopsis halleri subsp.
  misc_feature (220)..(396): Homolog of NCBI NO: 40782197 NR Description: zinc transporter ZIP6 [Arabidopsis halleri subsp.
  misc_feature (9)..(155): Homolog of NCBI NO: 15227702 NR Description: putative Fe(II) transport protein; protein id:
  misc_feature (220)..(396): Homolog of NCBI NO: 15227702 NR Description: putative Fe(II) transport protein; protein id:
MSGTGCLPTDGPALSRVCRDGAAAARLKTGSLLAILVASAVGICLPVALTRAFRGSPNYARGLLLVKCYAAGVILSTSLVHVLPDAHAALADCAVASRRPWRDFPFAGLFTLVGALLALLVDLSASSHLEAHAHVGAHHETPYAPIPKKVPVFELAGEMSPKKRAFLGDDREEDPAPHAATNGADPDRDDVALFGPKKGARSDEVPVITAGCHAVAHEVVEVGEGPGEDEEEARRKQKMVSKVLEIGIVFHSVIIGVTMGMSQDVCAIRPLVVALSFHQVFEGMGLGGCIAQAGFGMATVGYMCIMFSVTTPLGILLGMLVFHMTGYDDSNPNALIMEGILGSLSAGILIYMALVDLVSLDFFHNKMMSASLKLKKACYIALVLGSASMSVLALWA

SEQ ID NO: 3881 - protein, 245 aa, Zea mays subsp. mays
  peptide (1)..(245): Ceres Seq. ID no. 12374438
  misc_feature (109)..(219): Pfam Name: Cupin Pfam Description: Cupin
  misc_feature (3)..(245): Homolog of NCBI NO: 5821145 NR Description: RNA binding protein [Homo sapiens]
SKSPATTARSPLVAVTRAQGQGAPSPRRHVRHRVPPHRRPGPIPGLPGRRGRRTAQDGVAAGHSRRQRRRHLPPRRAHAGLPRQPKLRAGPAPRQVLRGWGHPLHLARPRAPRRARRPRRLRRRLAQALEGLPLRGPFHPRRRAARAPRRPLRLLPPRGPRPRRRPPRNSLRPDPEEGTRVRARRRNEPQETRFLGRRPRRGPRAARRHQRRRPGPRRRGALRTQEGRPQRRGPGHHCRVPCRRP

SEQ ID NO: 3882 - DNA, 1476 bp, Zea mays subsp. mays
  misc_feature (1)..(1476): Ceres Seq. ID no. 13492814
  misc_feature: MA Experiment ID: 108504 Result: Down-regulated in Transcription
  misc_feature: MA Experiment 108504 PARAMETER Experiment Name: Zm_Drought_P Parameter: Age (day) Value: 8
  misc_feature: MA Experiment 108504 PARAMETER Experiment Name: Zm_Drought_P Parameter: Organism Value: Zea mays
  misc_feature: MA Experiment 108504 PARAMETER Experiment Name: Zm_Drought_P Parameter: Plant Line Value: 35A19
  misc_feature: MA Experiment 108504 PARAMETER Experiment Name: Zm_Drought_P Parameter: Timepoint (hr) Value: 12
  misc_feature: MA Experiment 108504 PARAMETER Experiment Name: Zm_Drought_P Parameter: Tissue Value: Aerial
  misc_feature: MA Experiment 108504 PARAMETER Experiment Name: Zm_Drought_P Parameter: Treatment Value: Drought vs. No Drought
  misc_feature: MA Experiment ID: 108523 Result: Down-regulated in Transcription
  misc_feature: MA Experiment 108523 PARAMETER Experiment Name: Zm_42deg_Heat_P Parameter: Age (day) Value: 8
  misc_feature: MA Experiment 108523 PARAMETER Experiment Name: Zm_42deg_Heat_P Parameter: Organism Value: Zea mays
  misc_feature: MA Experiment 108523 PARAMETER Experiment Name: Zm_42deg_Heat_P Parameter: Plant Line Value: 35A19
  misc_feature: MA Experiment 108523 PARAMETER Experiment Name: Zm_42deg_Heat_P Parameter: Temperature (deg C) Value: 42 vs. 22
  misc_feature: MA Experiment 108523 PARAMETER Experiment Name: Zm_42deg_Heat_P Parameter: Timepoint (hr) Value: 6
  misc_feature: MA Experiment 108523 PARAMETER Experiment Name: Zm_42deg_Heat_P Parameter: Tissue Value: Aerial
  misc_feature: MA Experiment ID: 108535 Result: Down-regulated in Transcription
  misc_feature: MA Experiment 108535 PARAMETER Experiment Name: Zm_Meristem_P Parameter: Age (day) Value: 8
  misc_feature: MA Experiment 108535 PARAMETER Experiment Name: Zm_Meristem_P Parameter: Organism Value: Zea mays
  misc_feature: MA Experiment 108535 PARAMETER Experiment Name: Zm_Meristem_P Parameter: Plant Line Value: 35A19
  misc_feature: MA Experiment 108535 PARAMETER Experiment Name: Zm_Meristem_P Parameter: Tissue Value: Root Meristem vs. Above Root Meristem
  misc_feature: MA Experiment ID: 108543 Result: Up-regulated in Transcription
  misc_feature: MA Experiment ID: 108559 Result: Down-regulated in Transcription
  misc_feature: MA Experiment 108559 PARAMETER Experiment Name: Zm_5mM_NO_P Parameter: Age (day) Value: 8
  misc_feature: MA Experiment 108559 PARAMETER Experiment Name: Zm_5mM_NO_P Parameter: Organism Value: Zea mays
  misc_feature: MA Experiment 108559 PARAMETER Experiment Name: Zm_5mM_NO_P Parameter: Plant Line Value: 35A19
  misc_feature: MA Experiment 108559 PARAMETER Experiment Name: Zm_5mM_NO_P Parameter: Timepoint (hr) Value: 12
  misc_feature: MA Experiment 108559 PARAMETER Experiment Name: Zm_5mM_NO_P Parameter: Tissue Value: Aerial
  misc_feature: MA Experiment 108559 PARAMETER Experiment Name: Zm_5mM_NO_P Parameter: Treatment Value: 5mM NO vs. No Treatment
  misc_feature: MA Experiment ID: 20000487 Result: Down-regulated in Transcription
  misc_feature: MA Experiment 20000487 PARAMETER Experiment Name: Zm_50mM_NH4NO3_L_to_H_P Parameter: Organism Value: Zea mays
  misc_feature: MA Experiment 20000487 PARAMETER Experiment Name: Zm_50mM_NH4NO3_L_to_H_P Parameter: Timepoint (hr) Value: 4
  misc_feature: MA Experiment 20000487 PARAMETER Experiment Name: Zm_50mM_NH4NO3_L_to_H_P Parameter: Tissue Value: Leaves
  misc_feature: MA Experiment 20000487 PARAMETER Experiment Name: Zm_50mM_NH4NO3_L_to_H_P Parameter: Treatment Value: 50mM NH4NO3 vs. 100mM Mannitol
  misc_feature: MA Experiment ID: 20001612 Result: Down-regulated in Transcription
  misc_feature: MA Experiment 20001612 PARAMETER Experiment Name: Zm_50ppm_KNO3_L-to-H_P Parameter: Age (day) Value: 19
  misc_feature: MA Experiment 20001612 PARAMETER Experiment Name: Zm_50ppm_KNO3_L-to-H_P Parameter: Organism Value: Zea mays
  misc_feature: MA Experiment 20001612 PARAMETER Experiment Name: Zm_50ppm_KNO3_L-to-H_P Parameter: Plant Line Value: 35A19
  misc_feature: MA Experiment 20001612 PARAMETER Experiment Name: Zm_50ppm_KNO3_L-to-H_P Parameter: Timepoint (hr) Value: 8
  misc_feature: MA Experiment 20001612 PARAMETER Experiment Name: Zm_50ppm_KNO3_L-to-H_P Parameter: Tissue Value: Roots
  misc_feature: MA Experiment 20001612 PARAMETER Experiment Name: Zm_50ppm_KNO3_L-to-H_P Parameter: Treatment Value: 50ppm KNO3 vs. 50ppm KCl
agcccactcgtagtcgtaggcactttcatctgtgccctctgcgttcgagatcgatctcagctggcaccgtcccagttcgccatggcggaggaccggagccccaagcccatccactgcaaagcggcggtgtgccgagccgccggcgagccactcaccatcgaggagatcgtcgtcgacccgccgaaagcgtacgagatccgcatccgggtcatctgcacctcactctgccacaccgatatcaccttctggaaagctaaggtggcaccggtgtttccaagaatactagggcatgaggcgtacggggtagtggagagcgtgggggagcacgtggagggcttcgccggcgggggacaccgtggtgccgacgttcctggggcagtgcgagcgctgcgccagctgcgcgtcggagcacagcaacgtgtgcgacgcggtgccgttcgtcatcggccccgggatgcggcgcgacggcaccacccggttccgggacgcgcgggggagcccgctgcacgacctcctcgccgtctccagcttcagcgagtacaccgtcgtggacgtgaaccaggtggtcaaggtcgaccccgccgtgccgcccaagctcgcctgcctcctcagctgcggcgccggcaccggggtaggagcagcgtggaggtctgccaaggtggagccaggatccactgttgcaatctttggccttggatctgtcggtttggcggtggtccaaggcgcgaaaatgtgtggcgcatccaagatcatcggcgttgatctcaaccctgacaaggaggaagtagggagatcgttcggcgtcacagacttcgtcaatccatcgcagctggacaagcgttccgtcgtagaggtgatcgttgagatgaccggcggcggcgtggactacagcttcgagtgcatcggcgtgccgtcggtgatgaccgacgccttcagatgcaccaagatggggaagggcaagacgatcgtgctggggctggggagggacagcgacgaggtgtgcctgccgtcgctggagctgctgttcgggaggtgcgtcatggggtcgctcttcggcgggctgaagcccaagacccacatccccgtcctcgccaagaaatgcatggacaaggagctgcagctggacgcgctggtcacgcatgagcttggactgcaggacatcaacaaggccttcgacctgctcctgcaggggaaaagtctgcgctgcatcctctggatggacaaggacaagtaacggaaggagaggggcggccggaccaatccttcctgtctctgaataaatttgccctgttttttcagcgaggcgtcgctgaaagctgctgttagcggcgaccaagactatctgttcctgaaagccggtgtatcagtatcgtttcgttgtctgaactgattaaatcctaatatcgatagattagactctcccagcaactgctttgtcccctaaataaagtgattcatcatctcttttttacatct

SEQ ID NO: 3883 - protein, 259 aa, Zea mays subsp. mays
  peptide (1)..(259): Ceres Seq. ID no. 13492815
  misc_feature (1)..(257): Homolog of NCBI NO: 15219882 NR Description: alcohol dehydrogenase (ADH), putative
  misc_feature (1)..(257): Homolog of NCBI NO: 15219884 NR Description: alcohol dehydrogenase (ADH), putative
  misc_feature (1)..(257): Homolog of NCBI NO: 18415840 NR Description: alcohol dehydrogenase (ADH), putative
  misc_feature (1)..(257): Homolog of NCBI NO: 21618210 NR Description: alcohol dehydrogenase like protein [Arabidopsis
  misc_feature (1)..(257): Homolog of NCBI NO: 1076580 NR Description: probable alcohol dehydrogenase (EC 1.1.1.1) ADH3b
  misc_feature (1)..(257): Homolog of NCBI NO: 7705215 NR Description: alcohol dehydrogenase ADH [Lycopersicon
  misc_feature (1)..(259): Homolog of NCBI NO: 34906828 NR Description: contains EST C99136(E10204)~similar to alcohol
  misc_feature (1)..(257): Homolog of NCBI NO: 1076579 NR Description: probable alcohol dehydrogenase (EC 1.1.1.1) ADH3a
  misc_feature (1)..(255): Homolog of NCBI NO: 15238330 NR Description: alcohol dehydrogenase (ADH), putative
  misc_feature (1)..(257): Homolog of NCBI NO: 7705214 NR Description: alcohol dehydrogenase ADH [Lycopersicon
MRRDGTTRFRDARGSPLHDLLAVSSFSEYTVVDVNQVVKVDPAVPPKLACLLSCGAGTGVGAAWRSAKVEPGSTVAIFGLGSVGLAVVQGAKMCGASKIIGVDLNPDKEEVGRSFGVTDFVNPSQLDKRSVVEVIVEMTGGGVDYSFECIGVPSVMTDAFRCTKMGKGKTIVLGLGRDSDEVCLPSLELLFGRCVMGSLFGGLKPKTHIPVLAKKCMDKELQLDALVTHELGLQDINKAFDLLLQGKSLRCILWMDKDK

SEQ ID NO: 3884 - protein, 253 aa, Zea mays subsp. mays
  peptide (1)..(253): Ceres Seq. ID no. 13492816
  misc_feature (35)..(116): Homolog of NCBI NO: 15219882 NR Description: alcohol dehydrogenase (ADH), putative
  misc_feature (35)..(116): Homolog of NCBI NO: 15219884 NR Description: alcohol dehydrogenase (ADH), putative
  misc_feature (24)..(116): Homolog of NCBI NO: 18415840 NR Description: alcohol dehydrogenase (ADH), putative
  misc_feature (35)..(116): Homolog of NCBI NO: 21618210 NR Description: alcohol dehydrogenase like protein [Arabidopsis
  misc_feature (35)..(116): Homolog of NCBI NO: 1076580 NR Description: probable alcohol dehydrogenase (EC 1.1.1.1) ADH3b
  misc_feature (35)..(116): Homolog of NCBI NO: 7705215 NR Description: alcohol dehydrogenase ADH [Lycopersicon
  misc_feature (35)..(116): Homolog of NCBI NO: 34906828 NR Description: contains EST C99136(E10204)~similar to alcohol
  misc_feature (35)..(116): Homolog of NCBI NO: 1076579 NR Description: probable alcohol dehydrogenase (EC 1.1.1.1) ADH3a
  misc_feature (33)..(116): Homolog of NCBI NO: 15238330 NR Description: alcohol dehydrogenase (ADH), putative
  misc_feature (35)..(116): Homolog of NCBI NO: 7705214 NR Description: alcohol dehydrogenase ADH [Lycopersicon
SPLVVVGTFICALCVRDRSQLAPSQFAMAEDRSPKPIHCKAAVCRAAGEPLTIEEIVVDPPKAYEIRIRVICTSLCHTDITFWKAKVAPVFPRILGHEAYGVVESVGEHVEGFAGGGHRGADVPGAVRALRQLRVGAQQRVRRGAVRHRPRDAARRHHPVPGRAGEPAARPPRRLQLQRVHRRGREPGGQGRPRRAAQARLPPQLRRRHRGRSSVEVCQGGARIHCCNLWPWICRFGGGPRRENVWRIQDHRR

SEQ ID NO: 3885 - protein, 226 aa, Zea mays subsp. mays
  peptide (1)..(226): Ceres Seq. ID no. 13492817
  misc_feature (8)..(89): Homolog of NCBI NO: 15219882 NR Description: alcohol dehydrogenase (ADH), putative
  misc_feature (8)..(89): Homolog of NCBI NO: 15219884 NR Description: alcohol dehydrogenase (ADH), putative
  misc_feature (1)..(89): Homolog of NCBI NO: 18415840 NR Description: alcohol dehydrogenase (ADH), putative
  misc_feature (8)..(89): Homolog of NCBI NO: 21618210 NR Description: alcohol dehydrogenase like protein [Arabidopsis
  misc_feature (8)..(89): Homolog of NCBI NO: 1076580 NR Description: probable alcohol dehydrogenase (EC 1.1.1.1) ADH3b
  misc_feature (8)..(89): Homolog of NCBI NO: 7705215 NR Description: alcohol dehydrogenase ADH [Lycopersicon
  misc_feature (8)..(89): Homolog of NCBI NO: 34906828 NR Description: contains EST C99136(E10204)~similar to alcohol
  misc_feature (8)..(89): Homolog of NCBI NO: 1076579 NR Description: probable alcohol dehydrogenase (EC 1.1.1.1) ADH3a
  misc_feature (6)..(89): Homolog of NCBI NO: 15238330 NR Description: alcohol dehydrogenase (ADH), putative
  misc_feature (8)..(89): Homolog of NCBI NO: 7705214 NR Description: alcohol dehydrogenase ADH [Lycopersicon
MAEDRSPKPIHCKAAVCRAAGEPLTIEEIVVDPPKAYEIRIRVICTSLCHTDITFWKAKVAPVFPRILGHEAYGVVESVGEHVEGFAGGGHRGADVPGAVRALRQLRVGAQQRVRRGAVRHRPRDAARRHHPVPGRAGEPAARPPRRLQLQRVHRRGREPGGQGRPRRAAQARLPPQLRRRHRGRSSVEVCQGGARIHCCNLWPWICRFGGGPRRENVWRIQDHRR

SEQ ID NO: 3886 - DNA, 1334 bp, Zea mays subsp. mays; identical to SEQ ID NO: 3398
  misc_feature (1)..(1334): Ceres Seq. ID no. 12414173
  misc_feature: MA Experiment ID: 108523 Result: Up-regulated in Transcription
  misc_feature: MA Experiment 108523 PARAMETER Experiment Name: Zm_42deg_Heat_P Parameter: Age (day) Value: 8
  misc_feature: MA Experiment 108523 PARAMETER Experiment Name: Zm_42deg_Heat_P Parameter: Organism Value: Zea mays
  misc_feature: MA Experiment 108523 PARAMETER Experiment Name: Zm_42deg_Heat_P Parameter: Plant Line Value: 35A19
  misc_feature: MA Experiment 108523 PARAMETER Experiment Name: Zm_42deg_Heat_P Parameter: Temperature (deg C) Value: 42 vs. 22
  misc_feature: MA Experiment 108523 PARAMETER Experiment Name: Zm_42deg_Heat_P Parameter: Timepoint (hr) Value: 6
  misc_feature: MA Experiment 108523 PARAMETER Experiment Name: Zm_42deg_Heat_P Parameter: Tissue Value: Aerial
  misc_feature: MA Experiment ID: 108527 Result: Up-regulated in Transcription
  misc_feature: MA Experiment 108527 PARAMETER Experiment Name: Zm_5mM_NO_P Parameter: Age (day) Value: 8
  misc_feature: MA Experiment 108527 PARAMETER Experiment Name: Zm_5mM_NO_P Parameter: Organism Value: Zea mays
  misc_feature: MA Experiment 108527 PARAMETER Experiment Name: Zm_5mM_NO_P Parameter: Plant Line Value: 35A19
  misc_feature: MA Experiment 108527 PARAMETER Experiment Name: Zm_5mM_NO_P Parameter: Timepoint (hr) Value: 6
  misc_feature: MA Experiment 108527 PARAMETER Experiment Name: Zm_5mM_NO_P Parameter: Tissue Value: Aerial
  misc_feature: MA Experiment 108527 PARAMETER Experiment Name: Zm_5mM_NO_P Parameter: Treatment Value: 5mM NO vs. No Treatment
  misc_feature: MA Experiment ID: 108528 Result: Down-regulated in Transcription
  misc_feature: MA Experiment 108528 PARAMETER Experiment Name: Zm_Imbibed_Seeds_P Parameter: Age (day) Value: 5 vs. 2
  misc_feature: MA Experiment 108528 PARAMETER Experiment Name: Zm_Imbibed_Seeds_P Parameter: Organism Value: Zea mays
  misc_feature: MA Experiment 108528 PARAMETER Experiment Name: Zm_Imbibed_Seeds_P Parameter: Plant Line Value: 35A19
  misc_feature: MA Experiment 108528 PARAMETER Experiment Name: Zm_Imbibed_Seeds_P Parameter: Tissue Value: Aerial vs. Embryo
  misc_feature: MA Experiment ID: 108534 Result: Up-regulated in Transcription
  misc_feature: MA Experiment 108534 PARAMETER Experiment Name: Zm_4deg_Cold_P Parameter: Age (hr) Value: 8
  misc_feature: MA Experiment 108534 PARAMETER Experiment Name: Zm_4deg_Cold_P Parameter: Organism Value: Zea mays
  misc_feature: MA Experiment 108534 PARAMETER Experiment Name: Zm_4deg_Cold_P Parameter: Plant Line Value: 35A19
  misc_feature: MA Experiment 108534 PARAMETER Experiment Name: Zm_4deg_Cold_P Parameter: Temperature (deg C) Value: 4 vs. 22
  misc_feature: MA Experiment 108534 PARAMETER Experiment Name: Zm_4deg_Cold_P Parameter: Timepoint (hr) Value: 6
  misc_feature: MA Experiment 108534 PARAMETER Experiment Name: Zm_4deg_Cold_P Parameter: Tissue Value: Aerial
  misc_feature: MA Experiment ID: 108536 Result: Up-regulated in Transcription
  misc_feature: MA Experiment 108536 PARAMETER Experiment Name: Zm_Meristem_P Parameter: Age (day) Value: 8
  misc_feature: MA Experiment 108536 PARAMETER Experiment Name: Zm_Meristem_P Parameter: Organism Value: Zea mays
  misc_feature: MA Experiment 108536 PARAMETER Experiment Name: Zm_Meristem_P Parameter: Plant Line Value: 35A19
  misc_feature: MA Experiment 108536 PARAMETER Experiment Name: Zm_Meristem_P Parameter: Tissue Value: Shoot Meristem vs. Above Shoot Meristem
  misc_feature: MA Experiment ID: 108543 Result: Down-regulated in Transcription
  misc_feature: MA Experiment ID: 108556 Result: Up-regulated in Transcription
  misc_feature: MA Experiment 108556 PARAMETER Experiment Name: Zm_Drought_P Parameter: Age (day) Value: 9
  misc_feature: MA Experiment 108556 PARAMETER Experiment Name: Zm_Drought_P Parameter: Organism Value: Zea mays
  misc_feature: MA Experiment 108556 PARAMETER Experiment Name: Zm_Drought_P Parameter: Plant Line Value: 35A19
  misc_feature: MA Experiment 108556 PARAMETER Experiment Name: Zm_Drought_P Parameter: Timepoint (hr) Value: 24
  misc_feature: MA Experiment 108556 PARAMETER Experiment Name: Zm_Drought_P Parameter: Tissue Value: Aerial
  misc_feature: MA Experiment 108556 PARAMETER Experiment Name: Zm_Drought_P Parameter: Treatment Value: Drought vs. No Drought
  misc_feature: MA Experiment ID: 108559 Result: Up-regulated in Transcription
  misc_feature: MA Experiment 108559 PARAMETER Experiment Name: Zm_5mM_NO_P Parameter: Age (day) Value: 8
  misc_feature: MA Experiment 108559 PARAMETER Experiment Name: Zm_5mM_NO_P Parameter: Organism Value: Zea mays
  misc_feature: MA Experiment 108559 PARAMETER Experiment Name: Zm_5mM_NO_P Parameter: Plant Line Value: 35A19
  misc_feature: MA Experiment 108559 PARAMETER Experiment Name: Zm_5mM_NO_P Parameter: Timepoint (hr) Value: 12
  misc_feature: MA Experiment 108559 PARAMETER Experiment Name: Zm_5mM_NO_P Parameter: Tissue Value: Aerial
  misc_feature: MA Experiment 108559 PARAMETER Experiment Name: Zm_5mM_NO_P Parameter: Treatment Value: 5mM NO vs. No Treatment
  misc_feature: MA Experiment ID: 20000477 Result: Down-regulated in Transcription
  misc_feature: MA Experiment 20000477 PARAMETER Experiment Name: Zm_5mM_SA_P Parameter: Age (day) Value: 10
  misc_feature: MA Experiment 20000477 PARAMETER Experiment Name: Zm_5mM_SA_P Parameter: Organism Value: Zea mays
  misc_feature: MA Experiment 20000477 PARAMETER Experiment Name: Zm_5mM_SA_P Parameter: Plant Line Value: 35A19
  misc_feature: MA Experiment 20000477 PARAMETER Experiment Name: Zm_5mM_SA_P Parameter: Timepoint (hr) Value: 48
  misc_feature: MA Experiment 20000477 PARAMETER Experiment Name: Zm_5mM_SA_P Parameter: Tissue Value: Aerial
  misc_feature: MA Experiment 20000477 PARAMETER Experiment Name: Zm_5mM_SA_P Parameter: Treatment Value: 5mM SA vs. No Treatment
  misc_feature: MA Experiment ID: 20000478 Result: Down-regulated in Transcription
  misc_feature: MA Experiment 20000478 PARAMETER Experiment Name: Zm_5mM_SA_P Parameter: Age (day) Value: 11
  misc_feature: MA Experiment 20000478 PARAMETER Experiment Name: Zm_5mM_SA_P Parameter: Organism Value: Zea mays
  misc_feature: MA Experiment 20000478 PARAMETER Experiment Name: Zm_5mM_SA_P Parameter: Plant Line Value: 35A19
  misc_feature: MA Experiment 20000478 PARAMETER Experiment Name: Zm_5mM_SA_P Parameter: Timepoint (hr) Value: 72
  misc_feature: MA Experiment 20000478 PARAMETER Experiment Name: Zm_5mM_SA_P Parameter: Tissue Value: Aerial
  misc_feature: MA Experiment 20000478 PARAMETER Experiment Name: Zm_5mM_SA_P Parameter: Treatment Value: 5mM SA vs. No Treatment
  misc_feature: MA Experiment ID: 20000480 Result: Down-regulated in Transcription
  misc_feature: MA Experiment 20000480 PARAMETER Experiment Name: Zm_Drought_P Parameter: Age (day) Value: 11
  misc_feature: MA Experiment 20000480 PARAMETER Experiment Name: Zm_Drought_P Parameter: Organism Value: Zea mays
  misc_feature: MA Experiment 20000480 PARAMETER Experiment Name: Zm_Drought_P Parameter: Plant Line Value: 35A19
  misc_feature: MA Experiment 20000480 PARAMETER Experiment Name: Zm_Drought_P Parameter: Timepoint (hr) Value: 72
  misc_feature: MA Experiment 20000480 PARAMETER Experiment Name: Zm_Drought_P Parameter: Tissue Value: Aerial
  misc_feature: MA Experiment 20000480 PARAMETER Experiment Name: Zm_Drought_P Parameter: Treatment Value: Drought vs. No Drought
  misc_feature: MA Experiment ID: 20000533 Result: Up-regulated in Transcription
  misc_feature: MA Experiment 20000533 PARAMETER Experiment Name: Zm_0.001percent_MeJA_P Parameter: Age (day) Value: 11
  misc_feature: MA Experiment 20000533 PARAMETER Experiment Name: Zm_0.001percent_MeJA_P Parameter: Organism Value: Zea mays
  misc_feature: MA Experiment 20000533 PARAMETER Experiment Name: Zm_0.001percent_MeJA_P Parameter: Plant Line Value: 35A19
  misc_feature: MA Experiment 20000533 PARAMETER Experiment Name: Zm_0.001percent_MeJA_P Parameter: Timepoint (hr) Value: 72
  misc_feature: MA Experiment 20000533 PARAMETER Experiment Name: Zm_0.001percent_MeJA_P Parameter: Tissue Value: Aerial
  misc_feature: MA Experiment 20000533 PARAMETER Experiment Name: Zm_0.001percent_MeJA_P Parameter: Treatment Value: 0.001percent MeJA vs. No Treatment
  misc_feature: MA Experiment ID: 20000535 Result: Down-regulated in Transcription
  misc_feature: MA Experiment 20000535 PARAMETER Experiment Name: Zm_Hybrid_Seed_Dev_P Parameter: DAP Value: 30 vs. 12
  misc_feature: MA Experiment 20000535 PARAMETER Experiment Name: Zm_Hybrid_Seed_Dev_P Parameter: Organism Value: Zea mays
  misc_feature: MA Experiment 20000535 PARAMETER Experiment Name: Zm_Hybrid_Seed_Dev_P Parameter: Plant Line Value: 35A19
  misc_feature: MA Experiment 20000535 PARAMETER Experiment Name: Zm_Hybrid_Seed_Dev_P Parameter: Tissue Value: Embryo vs. Unfert Floret
  misc_feature: MA Experiment ID: 20000626 Result: Down-regulated in Transcription
  misc_feature: MA Experiment 20000626 PARAMETER Experiment Name: Zm_Herbicide-Treatments_P Parameter: Timepoint (hr) Value: 12
  misc_feature: MA Experiment 20000626 PARAMETER Experiment Name: Zm_Herbicide-Treatments_P Parameter: Tissue Value: Aerial
  misc_feature: MA Experiment 20000626 PARAMETER Experiment Name: Zm_Herbicide-Treatments_P Parameter: Treatment Value: Roundup vs. No Treatment
  misc_feature: MA Experiment ID: 20000629 Result: Down-regulated in Transcription
  misc_feature: MA Experiment 20000629 PARAMETER Experiment Name: Zm_Herbicide-Treatments_P Parameter: Timepoint (hr) Value: 12
  misc_feature: MA Experiment 20000629 PARAMETER Experiment Name: Zm_Herbicide-Treatments_P Parameter: Tissue Value: Aerial
  misc_feature: MA Experiment 20000629 PARAMETER Experiment Name: Zm_Herbicide-Treatments_P Parameter: Treatment Value: Trimec vs. No Treatment

SEQ ID NO: 3887 - protein, 361 aa, Zea mays subsp. mays; identical to SEQ ID NO: 3399
  peptide (1)..(361): Ceres Seq. ID no. 12414174
  misc_feature (43)..(149): Pfam Name: Protein of unknown function DUF260 Pfam Description: Protein of unknown function DUF260
  misc_feature (43)..(149): Pfam Name: Protein of unknown function DUF260 Pfam Description: Protein of unknown function DUF260
  misc_feature (42)..(164): Homolog of NCBI NO: 21593577 NR Description: unknown [Arabidopsis thaliana]
  misc_feature (42)..(164): Homolog of NCBI NO: 15240739 NR Description: putative protein
  misc_feature (42)..(164): Homolog of NCBI NO: 21553886 NR Description: unknown [Arabidopsis thaliana]
  misc_feature (42)..(164): Homolog of NCBI NO: 15229644 NR Description: putative protein
  misc_feature (40)..(186): Homolog of NCBI NO: 15219829 NR Description: hypothetical protein; protein id: At1g67100.1
  misc_feature (42)..(164): Homolog of NCBI NO: 21553886 NR Description: unknown [Arabidopsis thaliana]
  misc_feature (40)..(186): Homolog of NCBI NO: 15219829 NR Description: hypothetical protein; protein id: At1g67100.1
  misc_feature (40)..(216): Homolog of NCBI NO: 34895540 NR Description: unnamed protein product [Oryza sativa (japonica
  misc_feature (42)..(164): Homolog of NCBI NO: 15240739 NR Description: putative protein
  misc_feature (42)..(164): Homolog of NCBI NO: 21593577 NR Description: unknown [Arabidopsis thaliana]
  misc_feature (40)..(360): Homolog of NCBI NO: 34914608 NR Description: P0520B06.17 [Oryza sativa (japonica
  misc_feature (40)..(249): Homolog of NCBI NO: 18396229 NR Description: expressed protein
  misc_feature (40)..(249): Homolog of NCBI NO: 21554191 NR Description: unknown [Arabidopsis thaliana]
  misc_feature (40)..(187): Homolog of NCBI NO: 15221429 NR Description: expressed protein
  misc_feature (42)..(164): Homolog of NCBI NO: 15229644 NR Description: putative protein
  misc_feature (40)..(187): Homolog of NCBI NO: 15221429 NR Description: expressed protein
  misc_feature (40)..(216): Homolog of NCBI NO: 34895540 NR Description: unnamed protein product [Oryza sativa (japonica
  misc_feature (40)..(249): Homolog of NCBI NO: 21554191 NR Description: unknown [Arabidopsis thaliana]
  misc_feature (40)..(249): Homolog of NCBI NO: 18396229 NR Description: expressed protein
  misc_feature (40)..(360): Homolog of NCBI NO: 34914608 NR Description: P0520B06.17 [Oryza sativa (japonica

SEQ ID NO: 3888 - protein, 322 aa, Zea mays subsp. mays; identical to SEQ ID NO: 3400
  peptide (1)..(322): Ceres Seq. ID no. 12414175
  misc_feature (4)..(110): Pfam Name: Protein of unknown function DUF260 Pfam Description: Protein of unknown function DUF260
  misc_feature (4)..(110): Pfam Name: Protein of unknown function DUF260 Pfam Description: Protein of unknown function DUF260
  misc_feature (3)..(125): Homolog of NCBI NO: 21593577 NR Description: unknown [Arabidopsis thaliana]
  misc_feature (3)..(125): Homolog of NCBI NO: 15240739 NR Description: putative protein
  misc_feature (3)..(125): Homolog of NCBI NO: 21553886 NR Description: unknown [Arabidopsis thaliana]
  misc_feature (3)..(125): Homolog of NCBI NO: 15229644 NR Description: putative protein
  misc_feature (1)..(147): Homolog of NCBI NO: 15219829 NR Description: hypothetical protein; protein id: At1g67100.1
  misc_feature (3)..(125): Homolog of NCBI NO: 21593577 NR Description: unknown [Arabidopsis thaliana]
  misc_feature (3)..(125): Homolog of NCBI NO: 21553886 NR Description: unknown [Arabidopsis thaliana]
  misc_feature (1)..(147): Homolog of NCBI NO: 15219829 NR Description: hypothetical protein; protein id: At1g67100.1
  misc_feature (1)..(321): Homolog of NCBI NO: 34914608 NR Description: P0520B06.17 [Oryza sativa (japonica
  misc_feature (1)..(210): Homolog of NCBI NO: 18396229 NR Description: expressed protein
  misc_feature (1)..(210): Homolog of NCBI NO: 21554191 NR Description: unknown [Arabidopsis thaliana]
  misc_feature (1)..(177): Homolog of NCBI NO: 34895540 NR Description: unnamed protein product [Oryza sativa (japonica
  misc_feature (1)..(148): Homolog of NCBI NO: 15221429 NR Description: expressed protein
  misc_feature (3)..(125): Homolog of NCBI NO: 15229644 NR Description: putative protein
  misc_feature (3)..(125): Homolog of NCBI NO: 15240739 NR Description: putative protein
  misc_feature (1)..(148): Homolog of NCBI NO: 15221429 NR Description: expressed protein
  misc_feature (1)..(177): Homolog of NCBI NO: 34895540 NR Description: unnamed protein product [Oryza sativa (japonica
  misc_feature (1)..(210): Homolog of NCBI NO: 21554191 NR Description: unknown [Arabidopsis thaliana]
  misc_feature (1)..(210): Homolog of NCBI NO: 18396229 NR Description: expressed protein
  misc_feature (1)..(321): Homolog of NCBI NO: 34914608 NR Description: P0520B06.17 [Oryza sativa (japonica

SEQ ID NO: 3889 - protein, 320 aa, Zea mays subsp. mays; identical to SEQ ID NO: 3401
  peptide (1)..(320): Ceres Seq. ID no. 12414176
  misc_feature (2)..(108): Pfam Name: Protein of unknown function DUF260 Pfam Description: Protein of unknown function DUF260
  misc_feature (2)..(108): Pfam Name: Protein of unknown function DUF260 Pfam Description: Protein of unknown function DUF260
  misc_feature (1)..(145): Homolog of NCBI NO: 15219829 NR Description: hypothetical protein; protein id: At1g67100.1
  misc_feature (1)..(146): Homolog of NCBI NO: 15221429 NR Description: expressed protein
  misc_feature (1)..(175): Homolog of NCBI NO: 34895540 NR Description: unnamed protein product [Oryza sativa (japonica
  misc_feature (1)..(123): Homolog of NCBI NO: 21593577 NR Description: unknown [Arabidopsis thaliana]
  misc_feature (1)..(123): Homolog of NCBI NO: 21553886 NR Description: unknown [Arabidopsis thaliana]
  misc_feature (1)..(123): Homolog of NCBI NO: 21593577 NR Description: unknown [Arabidopsis thaliana]
  misc_feature (1)..(123): Homolog of NCBI NO: 21553886 NR Description: unknown [Arabidopsis thaliana]
  misc_feature (1)..(145): Homolog of NCBI NO: 15219829 NR Description: hypothetical protein; protein id: At1g67100.1
  misc_feature (1)..(319): Homolog of NCBI NO: 34914608 NR Description: P0520B06.17 [Oryza sativa (japonica
  misc_feature (1)..(208): Homolog of NCBI NO: 18396229 NR Description: expressed protein
  misc_feature (1)..(208): Homolog of NCBI NO: 21554191 NR Description: unknown [Arabidopsis thaliana]
  misc_feature (1)..(175): Homolog of NCBI NO: 34895540 NR Description: unnamed protein product [Oryza sativa (japonica
  misc_feature (1)..(146): Homolog of NCBI NO: 15221429 NR Description: expressed protein
  misc_feature (1)..(123): Homolog of NCBI NO: 15229644 NR Description: putative protein
  misc_feature (1)..(123): Homolog of NCBI NO: 15240739 NR Description: putative protein
  misc_feature (1)..(123): Homolog of NCBI NO: 15229644 NR Description: putative protein
  misc_feature (1)..(123): Homolog of NCBI NO: 15240739 NR Description: putative protein
  misc_feature (1)..(208): Homolog of NCBI NO: 21554191 NR Description: unknown [Arabidopsis thaliana]
  misc_feature (1)..(208): Homolog of NCBI NO: 18396229 NR Description: expressed protein
  misc_feature (1)..(319): Homolog of NCBI NO: 34914608 NR Description: P0520B06.17 [Oryza sativa (japonica

SEQ ID NO: 3890 - DNA, 1368 bp, Zea mays subsp. mays
  misc_feature (1)..(1368): Ceres Seq. ID no. 12376414
  misc_feature: MA Experiment ID: 108504 Result: Down-regulated in Transcription
  misc_feature: MA Experiment 108504 PARAMETER Experiment Name: Zm_Drought_P Parameter: Age (day) Value: 8
  misc_feature: MA Experiment 108504 PARAMETER Experiment Name: Zm_Drought_P Parameter: Organism Value: Zea mays
  misc_feature: MA Experiment 108504 PARAMETER Experiment Name: Zm_Drought_P Parameter: Plant Line Value: 35A19
  misc_feature: MA Experiment 108504 PARAMETER Experiment Name: Zm_Drought_P Parameter: Timepoint (hr) Value: 12
  misc_feature: MA Experiment 108504 PARAMETER Experiment Name: Zm_Drought_P Parameter: Tissue Value: Aerial
  misc_feature: MA Experiment 108504 PARAMETER Experiment Name: Zm_Drought_P Parameter: Treatment Value: Drought vs. No Drought
  misc_feature: MA Experiment ID: 108515 Result: Down-regulated in Transcription
  misc_feature: MA Experiment 108515 PARAMETER Experiment Name: Zm_2mM_SA_P Parameter: Age (day) Value: 8
  misc_feature: MA Experiment 108515 PARAMETER Experiment Name: Zm_2mM_SA_P Parameter: Organism Value: Zea mays
  misc_feature: MA Experiment 108515 PARAMETER Experiment Name: Zm_2mM_SA_P Parameter: Plant Line Value: 35A19
  misc_feature: MA Experiment 108515 PARAMETER Experiment Name: Zm_2mM_SA_P Parameter: Timepoint (hr) Value: 12
  misc_feature: MA Experiment 108515 PARAMETER Experiment Name: Zm_2mM_SA_P Parameter: Tissue Value: Aerial
  misc_feature: MA Experiment 108515 PARAMETER Experiment Name: Zm_2mM_SA_P Parameter: Treatment Value: 2mM SA vs. No Treatment
  misc_feature: MA Experiment ID: 108523 Result: Down-regulated in Transcription
  misc_feature: MA Experiment 108523 PARAMETER Experiment Name: Zm_42deg_Heat_P Parameter: Age (day) Value: 8
  misc_feature: MA Experiment 108523 PARAMETER Experiment Name: Zm_42deg_Heat_P Parameter: Organism Value: Zea mays
  misc_feature: MA Experiment 108523 PARAMETER Experiment Name: Zm_42deg_Heat_P Parameter: Plant Line Value: 35A19
  misc_feature: MA Experiment 108523 PARAMETER Experiment Name: Zm_42deg_Heat_P Parameter: Temperature (deg C) Value: 42 vs. 22
  misc_feature: MA Experiment 108523 PARAMETER Experiment Name: Zm_42deg_Heat_P Parameter: Timepoint (hr) Value: 6
  misc_feature: MA Experiment 108523 PARAMETER Experiment Name: Zm_42deg_Heat_P Parameter: Tissue Value: Aerial
  misc_feature: MA Experiment ID: 108527 Result: Down-regulated in Transcription
  misc_feature: MA Experiment 108527 PARAMETER Experiment Name: Zm_5mM_NO_P Parameter: Age (day) Value: 8
  misc_feature: MA Experiment 108527 PARAMETER Experiment Name: Zm_5mM_NO_P Parameter: Organism Value: Zea mays
  misc_feature: MA Experiment 108527 PARAMETER Experiment Name: Zm_5mM_NO_P Parameter: Plant Line Value: 35A19
  misc_feature: MA Experiment 108527 PARAMETER Experiment Name: Zm_5mM_NO_P Parameter: Timepoint (hr) Value: 6
  misc_feature: MA Experiment 108527 PARAMETER Experiment Name: Zm_5mM_NO_P Parameter: Tissue Value: Aerial
  misc_feature: MA Experiment 108527 PARAMETER Experiment Name: Zm_5mM_NO_P Parameter: Treatment Value: 5mM NO vs. No Treatment
  misc_feature: MA Experiment ID: 108530 Result: Up-regulated in Transcription
  misc_feature: MA Experiment 108530 PARAMETER Experiment Name: Zm_Imbibed_Seeds_P Parameter: Age (day) Value: 6 vs. 2
  misc_feature: MA Experiment 108530 PARAMETER Experiment Name: Zm_Imbibed_Seeds_P Parameter: Organism Value: Zea mays
  misc_feature: MA Experiment 108530 PARAMETER Experiment Name: Zm_Imbibed_Seeds_P Parameter: Plant Line Value: 35A19
  misc_feature: MA Experiment 108530 PARAMETER Experiment Name: Zm_Imbibed_Seeds_P Parameter: Tissue Value: Aerial vs. Embryo
  misc_feature: MA Experiment ID: 108540 Result: Down-regulated in Transcription
  misc_feature: MA Experiment 108540 PARAMETER Experiment Name: Zm_20percent_PEG_P Parameter: Age (day) Value: 8
  misc_feature: MA Experiment 108540 PARAMETER Experiment Name: Zm_20percent_PEG_P Parameter: Organism Value: Zea mays
  misc_feature: MA Experiment 108540 PARAMETER Experiment Name: Zm_20percent_PEG_P Parameter: Plant Line Value: 35A19
  misc_feature: MA Experiment 108540 PARAMETER Experiment Name: Zm_20percent_PEG_P Parameter: Timepoint (hr) Value: 6
  misc_feature: MA Experiment 108540 PARAMETER Experiment Name: Zm_20percent_PEG_P Parameter: Tissue Value: Aerial
  misc_feature: MA Experiment 108540 PARAMETER Experiment Name: Zm_20percent_PEG_P Parameter: Treatment Value: 20percent PEG vs. No Treatment
  misc_feature: MA Experiment ID: 108542 Result: Down-regulated in Transcription
  misc_feature: MA Experiment 108542 PARAMETER Experiment Name: Zm_150mM_NaCl_P Parameter: Age (day) Value: 8
  misc_feature: MA Experiment 108542 PARAMETER Experiment Name: Zm_150mM_NaCl_P Parameter: Organism Value: Zea mays
  misc_feature: MA Experiment 108542 PARAMETER Experiment Name: Zm_150mM_NaCl_P Parameter: Plant Line Value: 35A19
  misc_feature: MA Experiment 108542 PARAMETER Experiment Name: Zm_150mM_NaCl_P Parameter: Timepoint (hr) Value: 6
  misc_feature: MA Experiment 108542 PARAMETER Experiment Name: Zm_150mM_NaCl_P Parameter: Tissue Value: Aerial
  misc_feature: MA Experiment 108542 PARAMETER Experiment Name: Zm_150mM_NaCl_P Parameter: Treatment Value: 150mM NaCl vs. No Treatment
  misc_feature: MA Experiment ID: 108556 Result: Down-regulated in Transcription
  misc_feature: MA Experiment 108556 PARAMETER Experiment Name: Zm_Drought_P Parameter: Age (day) Value: 9
  misc_feature: MA Experiment 108556 PARAMETER Experiment Name: Zm_Drought_P Parameter: Organism Value: Zea mays
  misc_feature: MA Experiment 108556 PARAMETER Experiment Name: Zm_Drought_P Parameter: Plant Line Value: 35A19
  misc_feature: MA Experiment 108556 PARAMETER Experiment Name: Zm_Drought_P Parameter: Timepoint (hr) Value: 24
  misc_feature: MA Experiment 108556 PARAMETER Experiment Name: Zm_Drought_P Parameter: Tissue Value: Aerial
  misc_feature: MA Experiment 108556 PARAMETER Experiment Name: Zm_Drought_P Parameter: Treatment Value: Drought vs. No Drought
  misc_feature: MA Experiment ID: 108559 Result: Down-regulated in Transcription
  misc_feature: MA Experiment 108559 PARAMETER Experiment Name: Zm_5mM_NO_P Parameter: Age (day) Value: 8
  misc_feature: MA Experiment 108559 PARAMETER Experiment Name: Zm_5mM_NO_P Parameter: Organism Value: Zea mays
  misc_feature: MA Experiment 108559 PARAMETER Experiment Name: Zm_5mM_NO_P Parameter: Plant Line Value: 35A19
  misc_feature: MA Experiment 108559 PARAMETER Experiment Name: Zm_5mM_NO_P Parameter: Timepoint (hr) Value: 12
  misc_feature: MA Experiment 108559 PARAMETER Experiment Name: Zm_5mM_NO_P Parameter: Tissue Value: Aerial
  misc_feature: MA Experiment 108559 PARAMETER Experiment Name: Zm_5mM_NO_P Parameter: Treatment Value: 5mM NO vs. No Treatment
  misc_feature: MA Experiment ID: 108597 Result: Down-regulated in Transcription
  misc_feature: MA Experiment 108597 PARAMETER Experiment Name: Zm_100uM_ABA_P Parameter: Age (day) Value: 9
  misc_feature: MA Experiment 108597 PARAMETER Experiment Name: Zm_100uM_ABA_P Parameter: Organism Value: Zea mays
  misc_feature: MA Experiment 108597 PARAMETER Experiment Name: Zm_100uM_ABA_P Parameter: Plant Line Value: 35A19
  misc_feature: MA Experiment 108597 PARAMETER Experiment Name: Zm_100uM_ABA_P Parameter: Timepoint (hr) Value: 24
  misc_feature: MA Experiment 108597 PARAMETER Experiment Name: Zm_100uM_ABA_P Parameter: Tissue Value: Aerial
  misc_feature: MA Experiment 108597 PARAMETER Experiment Name: Zm_100uM_ABA_P Parameter: Treatment Value: 100uM ABA vs. No Treatment
  misc_feature: MA Experiment ID: 108687 Result: Down-regulated in Transcription
  misc_feature: MA Experiment 108687 PARAMETER Experiment Name: Zm_Embryos-Flowers__P Parameter: Tissue Value: Embryo vs. Aerial+
  misc_feature: MA Experiment ID: 108689 Result: Down-regulated in Transcription
  misc_feature: MA Experiment 108689 PARAMETER Experiment Name: Zm_Drought_Roots_P Parameter: Age (day) Value: 9
  misc_feature: MA Experiment 108689 PARAMETER Experiment Name: Zm_Drought_Roots_P Parameter: Organism Value: Zea mays
  misc_feature: MA Experiment 108689 PARAMETER Experiment Name: Zm_Drought_Roots_P Parameter: Plant Line Value: 35A19
  misc_feature: MA Experiment 108689 PARAMETER Experiment Name: Zm_Drought_Roots_P Parameter: Timepoint (hr) Value: 24
  misc_feature: MA Experiment 108689 PARAMETER Experiment Name: Zm_Drought_Roots_P Parameter: Tissue Value: Roots
  misc_feature: MA Experiment 108689 PARAMETER Experiment Name: Zm_Drought_Roots_P Parameter: Treatment Value: Drought vs. No Drought
  misc_feature: MA Experiment ID: 20000478 Result: Down-regulated in Transcription
  misc_feature: MA Experiment 20000478 PARAMETER Experiment Name: Zm_5mM_SA_P Parameter: Age (day) Value: 11
  misc_feature: MA Experiment 20000478 PARAMETER Experiment Name: Zm_5mM_SA_P Parameter: Organism Value: Zea mays
  misc_feature: MA Experiment 20000478 PARAMETER Experiment Name: Zm_5mM_SA_P Parameter: Plant Line Value: 35A19
  misc_feature: MA Experiment 20000478 PARAMETER Experiment Name: Zm_5mM_SA_P Parameter: Timepoint (hr) Value: 72
  misc_feature: MA Experiment 20000478 PARAMETER Experiment Name: Zm_5mM_SA_P Parameter: Tissue Value: Aerial
  misc_feature: MA Experiment 20000478 PARAMETER Experiment Name: Zm_5mM_SA_P Parameter: Treatment Value: 5mM SA vs. No Treatment
  misc_feature: MA Experiment ID: 20000480 Result: Down-regulated in Transcription
  misc_feature: MA Experiment 20000480 PARAMETER Experiment Name: Zm_Drought_P Parameter: Age (day) Value: 11
  misc_feature: MA Experiment 20000480 PARAMETER Experiment Name: Zm_Drought_P Parameter: Organism Value: Zea mays
  misc_feature: MA Experiment 20000480 PARAMETER Experiment Name: Zm_Drought_P Parameter: Plant Line Value: 35A19
  misc_feature: MA Experiment 20000480 PARAMETER Experiment Name: Zm_Drought_P Parameter: Timepoint (hr) Value: 72
  misc_feature: MA Experiment 20000480 PARAMETER Experiment Name: Zm_Drought_P Parameter: Tissue Value: Aerial
  misc_feature: MA Experiment 20000480 PARAMETER Experiment Name: Zm_Drought_P Parameter: Treatment Value: Drought vs. No Drought
  misc_feature: MA Experiment ID: 20001606 Result: Up-regulated in Transcription
  misc_feature: MA Experiment 20001606 PARAMETER Experiment Name: Zm_50ppm_KNO3_L-to-H_P Parameter: Age (day) Value: 19
  misc_feature: MA Experiment 20001606 PARAMETER Experiment Name: Zm_50ppm_KNO3_L-to-H_P Parameter: Organism Value: Zea mays
  misc_feature: MA Experiment 20001606 PARAMETER Experiment Name: Zm_50ppm_KNO3_L-to-H_P Parameter: Plant Line Value: 35A19
  misc_feature: MA Experiment 20001606 PARAMETER Experiment Name: Zm_50ppm_KNO3_L-to-H_P Parameter: Timepoint (hr) Value: 8
  misc_feature: MA Experiment 20001606 PARAMETER Experiment Name: Zm_50ppm_KNO3_L-to-H_P Parameter: Tissue Value: Shoots
  misc_feature: MA Experiment 20001606 PARAMETER Experiment Name: Zm_50ppm_KNO3_L-to-H_P Parameter: Treatment Value: 50ppm KNO3 vs. 50ppm KCl
  misc_feature: MA Experiment ID: 20001608 Result: Up-regulated in Transcription
  misc_feature: MA Experiment 20001608 PARAMETER Experiment Name: Zm_50ppm_KNO3_L-to-H_P Parameter: Age (day) Value: 21
  misc_feature: MA Experiment 20001608 PARAMETER Experiment Name: Zm_50ppm_KNO3_L-to-H_P Parameter: Organism Value: Zea mays
  misc_feature: MA Experiment 20001608 PARAMETER Experiment Name: Zm_50ppm_KNO3_L-to-H_P Parameter: Plant Line Value: 35A19
  misc_feature: MA Experiment 20001608 PARAMETER Experiment Name: Zm_50ppm_KNO3_L-to-H_P Parameter: Timepoint (hr) Value: 48
  misc_feature: MA Experiment 20001608 PARAMETER Experiment Name: Zm_50ppm_KNO3_L-to-H_P Parameter: Tissue Value: Shoots
  misc_feature: MA Experiment 20001608 PARAMETER Experiment Name: Zm_50ppm_KNO3_L-to-H_P Parameter: Treatment Value: 50ppm KNO3 vs. 50ppm KCl
  misc_feature: MA Experiment ID: 20001613 Result: Up-regulated in Transcription
  misc_feature: MA Experiment 20001613 PARAMETER Experiment Name: Zm_50ppm_KNO3_L-to-H_P Parameter: Age (day) Value: 20
  misc_feature: MA Experiment 20001613 PARAMETER Experiment Name: Zm_50ppm_KNO3_L-to-H_P Parameter: Organism Value: Zea mays
  misc_feature: MA Experiment 20001613 PARAMETER Experiment Name: Zm_50ppm_KNO3_L-to-H_P Parameter: Plant Line Value: 35A19
  misc_feature: MA Experiment 20001613 PARAMETER Experiment Name: Zm_50ppm_KNO3_L-to-H_P Parameter: Timepoint (hr) Value: 24
  misc_feature: MA Experiment 20001613 PARAMETER Experiment Name: Zm_50ppm_KNO3_L-to-H_P Parameter: Tissue Value: Roots
  misc_feature: MA Experiment 20001613 PARAMETER Experiment Name: Zm_50ppm_KNO3_L-to-H_P Parameter: Treatment Value: 50ppm KNO3 vs. 50ppm KCl
acgggtgctccaaacaactgcactagacatctcaattaattagctaatgagcaagcggctgagctgcactcaagacaaactaccatggatcagtcaaacattagcaacaagcacataacgatgacaaccctaatgctcctcctctgtgtcatagccattgcagactgcatttgccaagccgcagtggcagcccgggtggagccatccaccaccgtcggcagaactacaggaggagacgaggcgatgatgatggcgaggtacaagaagtggatggcgcagtatcgccggaagtacaaggacgacgccgagaaagcacaccgtttccaggtattcaaggcgaacgcggagtttattgacaggtctaacgctggaggcaagaagaagtacgtcctagggaccaaccagtttgccgacctgaccagcaaagagttcgcggccatgtacaccggtttgaggaaaccggcggcggtgccttccggggccaagcagatccctgcaggtttcaagtaccagaattttacgcgcctagatgatgatgtccaggttgattggaggcagcagggtgctgtcactcctgtcaagaaccaaggccaatgtggctgttgctgggcgttctctgcagtaggtgccatggaaggtttgatcatgataacgacaggaaacctggtttccctgtcggagcagcagattctagactgcgacgagtcagacgggaaccagggctgcaacggtggctacatggacaacgccttccagtacgtcgtcaacaatggcggcgtcactactgaggacgcctacccttactctgcagtccaagggacgtgccaaaacgtccagccagccgccaccatcagcggcttccaggacctgcccagcggcgacgagaacgcgctcgccaacgcagtcgccaaccagccggtgtctgttggcgtcgacggcggatcgagtcctttccagttttaccagggtggcatatacgacggggatggctgtggcacggacatgaaccatgcagtgacggcgatcggctacggcgccgatgaccagggaacccagtactggatcctcaagaactcctggggcacaggatggggtgagaacggtttcatgcagctacagatgggcgtcggcgcctgtggtatctccacgatggcctcctacccaactccatgaacacaaatcttcagataaagcatagtatatatcagtccatgcgtatgactgcagaataaagcatggaagattaattacatgcgtgcatcaaggcatgctacgtactgtattaaaacttcggtactggccagatatatgtacaaaggtagaatgttcgtgtgataatataaaagttcgtaatgcttgtacgaatgc

SEQ ID NO: 3891 - protein, 362 aa, Zea mays subsp. mays
  peptide (1)..(362): Ceres Seq. ID no. 12376415
  misc_feature (154)..(360): Pfam Name: Papain family cysteine protease Pfam Description: Papain family cysteine protease
  misc_feature (23)..(361): Homolog of NCBI NO: 37780047 NR Description: cysteine protease 8 [Trifolium repens]
  misc_feature (45)..(361): Homolog of NCBI NO: 40806498 NR Description: putative cysteine protease 1 [Iris hollandica]
  misc_feature (42)..(360): Homolog of NCBI NO: 34899394 NR Description: putative cysteine proteinase
  misc_feature (52)..(361): Homolog of NCBI NO: 24285904 NR Description: cysteine proteinase precursor [Ipomoea batatas]
  misc_feature (55)..(361): Homolog of NCBI NO: 38346007 NR Description: OSJNBa0035O13.9 [Oryza sativa (japonica
  misc_feature (52)..(361): Homolog of NCBI NO: 13491750 NR Description: cysteine protease [Ipomoea batatas]
  misc_feature (18)..(360): Homolog of NCBI NO: 21070926 NR Description: putative cysteine proteinase
  misc_feature (18)..(361): Homolog of NCBI NO: 38345008 NR Description: OSJNBa0052O21.11 [Oryza sativa (japonica
  misc_feature (19)..(361): Homolog of NCBI NO: 38346003 NR Description: OSJNBa0035O13.5 [Oryza sativa (japonica
  misc_feature (13)..(360): Homolog of NCBI NO: 7435799 NR Description: cysteine proteinase (EC 3.4.22.-) - barley
MDQSNISNKHITMTTLMLLLCVIAIADCICQAAVAARVEPSTTVGRTTGGDEAMMMARYKKWMAQYRRKYKDDAEKAHRFQVFKANAEFIDRSNAGGKKKYVLGTNQFADLTSKEFAAMYTGLRKPAAVPSGAKQIPAGFKYQNFTRLDDDVQVDWRQQGAVTPVKNQGQCGCCWAFSAVGAMEGLIMITTGNLVSLSEQQILDCDESDGNQGCNGGYMDNAFQYVVNNGGVTTEDAYPYSAVQGTCQNVQPAATISGFQDLPSGDENALANAVANQPVSVGVDGGSSPFQFYQGGIYDGDGCGTDMNHAVTAIGYGADDQGTQYWILKNSWGTGWGENGFMQLQMGVGACGISTMASYPTP

SEQ ID NO: 3892 - protein, 350 aa, Zea mays subsp. mays
  peptide (1)..(350): Ceres Seq. ID no. 12376416
  misc_feature (142)..(348): Pfam Name: Papain family cysteine protease Pfam Description: Papain family cysteine protease
  misc_feature (11)..(349): Homolog of NCBI NO: 37780047 NR Description: cysteine protease 8 [Trifolium repens]
  misc_feature (33)..(349): Homolog of NCBI NO: 40806498 NR Description: putative cysteine protease 1 [Iris hollandica]
  misc_feature (30)..(348): Homolog of NCBI NO: 34899394 NR Description: putative cysteine proteinase
  misc_feature (40)..(349): Homolog of NCBI NO: 24285904 NR Description: cysteine proteinase precursor [Ipomoea batatas]
  misc_feature (43)..(349): Homolog of NCBI NO: 38346007 NR Description: OSJNBa0035O13.9 [Oryza sativa (japonica
  misc_feature (40)..(349): Homolog of NCBI NO: 13491750 NR Description: cysteine protease [Ipomoea batatas]
  misc_feature (6)..(348): Homolog of NCBI NO: 21070926 NR Description: putative cysteine proteinase
  misc_feature (6)..(349): Homolog of NCBI NO: 38345008 NR Description: OSJNBa0052O21.11 [Oryza sativa (japonica
  misc_feature (7)..(349): Homolog of NCBI NO: 38346003 NR Description: OSJNBa0035O13.5 [Oryza sativa (japonica
  misc_feature (1)..(348): Homolog of NCBI NO: 7435799 NR Description: cysteine proteinase (EC 3.4.22.-) - barley
MTTLMLLLCVIAIADCICQAAVAARVEPSTTVGRTTGGDEAMMMARYKKWMAQYRRKYKDDAEKAHRFQVFKANAEFIDRSNAGGKKKYVLGTNQFADLTSKEFAAMYTGLRKPAAVPSGAKQIPAGFKYQNFTRLDDDVQVDWRQQGAVTPVKNQGQCGCCWAFSAVGAMEGLIMITTGNLVSLSEQQILDCDESDGNQGCNGGYMDNAFQYVVNNGGVTTEDAYPYSAVQGTCQNVQPAATISGFQDLPSGDENALANAVANQPVSVGVDGGSSPFQFYQGGIYDGDGCGTDMNHAVTAIGYGADDQGTQYWILKNSWGTGWGENGFMQLQMGVGACGISTMASYPTP

SEQ ID NO: 3893 - protein, 346 aa, Zea mays subsp. mays
  peptide (1)..(346): Ceres Seq. ID no. 12376417
  misc_feature (138)..(344): Pfam Name: Papain family cysteine protease Pfam Description: Papain family cysteine protease
  misc_feature (7)..(345): Homolog of NCBI NO: 37780047 NR Description: cysteine protease 8 [Trifolium repens]
  misc_feature (29)..(345): Homolog of NCBI NO: 40806498 NR Description: putative cysteine protease 1 [Iris hollandica]
  misc_feature (26)..(344): Homolog of NCBI NO: 34899394 NR Description: putative cysteine proteinase
  misc_feature (36)..(345): Homolog of NCBI NO: 24285904 NR Description: cysteine proteinase precursor [Ipomoea batatas]
  misc_feature (39)..(345): Homolog of NCBI NO: 38346007 NR Description: OSJNBa0035O13.9 [Oryza sativa (japonica
  misc_feature (36)..(345): Homolog of NCBI NO: 13491750 NR Description: cysteine protease [Ipomoea batatas]
  misc_feature (2)..(344): Homolog of NCBI NO: 21070926 NR Description: putative cysteine proteinase
  misc_feature (2)..(345): Homolog of NCBI NO: 38345008 NR Description: OSJNBa0052O21.11 [Oryza sativa (japonica
  misc_feature (3)..(345): Homolog of NCBI NO: 38346003 NR Description: OSJNBa0035O13.5 [Oryza sativa (japonica
  misc_feature (1)..(344): Homolog of NCBI NO: 7435799 NR Description: cysteine proteinase (EC 3.4.22.-) - barley
MLLLCVIAIADCICQAAVAARVEPSTTVGRTTGGDEAMMMARYKKWMAQYRRKYKDDAEKAHRFQVFKANAEFIDRSNAGGKKKYVLGTNQFADLTSKEFAAMYTGLRKPAAVPSGAKQIPAGFKYQNFTRLDDDVQVDWRQQGAVTPVKNQGQCGCCWAFSAVGAMEGLIMITTGNLVSLSEQQILDCDESDGNQGCNGGYMDNAFQYVVNNGGVTTEDAYPYSAVQGTCQNVQPAATISGFQDLPSGDENALANAVANQPVSVGVDGGSSPFQFYQGGIYDGDGCGTDMNHAVTAIGYGADDQGTQYWILKNSWGTGWGENGFMQLQMGVGACGISTMASYPTP

SEQ ID NO: 3894 - DNA, 1069 bp, Zea mays subsp. mays
  misc_feature (1)..(1069): Ceres Seq. ID no. 12403740
  misc_feature: MA Experiment ID: 108504 Result: Up-regulated in Transcription
  misc_feature: MA Experiment 108504 PARAMETER Experiment Name: Zm_Drought_P Parameter: Age (day) Value: 8
  misc_feature: MA Experiment 108504 PARAMETER Experiment Name: Zm_Drought_P Parameter: Organism Value: Zea mays
  misc_feature: MA Experiment 108504 PARAMETER Experiment Name: Zm_Drought_P Parameter: Plant Line Value: 35A19
  misc_feature: MA Experiment 108504 PARAMETER Experiment Name: Zm_Drought_P Parameter: Timepoint (hr) Value: 12
  misc_feature: MA Experiment 108504 PARAMETER Experiment Name: Zm_Drought_P Parameter: Tissue Value: Aerial
  misc_feature: MA Experiment 108504 PARAMETER Experiment Name: Zm_Drought_P Parameter: Treatment Value: Drought vs. No Drought
  misc_feature: MA Experiment ID: 108522 Result: Up-regulated in Transcription
  misc_feature: MA Experiment 108522 PARAMETER Experiment Name: Zm_42deg_Heat_P Parameter: Age (day) Value: 8
  misc_feature: MA Experiment 108522 PARAMETER Experiment Name: Zm_42deg_Heat_P Parameter: Organism Value: Zea mays
  misc_feature: MA Experiment 108522 PARAMETER Experiment Name: Zm_42deg_Heat_P Parameter: Plant Line Value: 35A19
  misc_feature: MA Experiment 108522 PARAMETER Experiment Name: Zm_42deg_Heat_P Parameter: Temperature (deg C) Value: 42 vs. 22
  misc_feature: MA Experiment 108522 PARAMETER Experiment Name: Zm_42deg_Heat_P Parameter: Timepoint (hr) Value: 1
  misc_feature: MA Experiment 108522 PARAMETER Experiment Name: Zm_42deg_Heat_P Parameter: Tissue Value: Aerial
  misc_feature: MA Experiment ID: 108523 Result: Up-regulated in Transcription
  misc_feature: MA Experiment 108523 PARAMETER Experiment Name: Zm_42deg_Heat_P Parameter: Age (day) Value: 8
  misc_feature: MA Experiment 108523 PARAMETER Experiment Name: Zm_42deg_Heat_P Parameter: Organism Value: Zea mays
  misc_feature: MA Experiment 108523 PARAMETER Experiment Name: Zm_42deg_Heat_P Parameter: Plant Line Value: 35A19
  misc_feature: MA Experiment 108523 PARAMETER Experiment Name: Zm_42deg_Heat_P Parameter: Temperature (deg C) Value: 42 vs. 22
  misc_feature: MA Experiment 108523 PARAMETER Experiment Name: Zm_42deg_Heat_P Parameter: Timepoint (hr) Value: 6
  misc_feature: MA Experiment 108523 PARAMETER Experiment Name: Zm_42deg_Heat_P Parameter: Tissue Value: Aerial
  misc_feature: MA Experiment ID: 108542 Result: Up-regulated in Transcription
  misc_feature: MA Experiment 108542 PARAMETER Experiment Name: Zm_150mM_NaCl_P Parameter: Age (day) Value: 8
  misc_feature: MA Experiment 108542 PARAMETER Experiment Name: Zm_150mM_NaCl_P Parameter: Organism Value: Zea mays
  misc_feature: MA Experiment 108542 PARAMETER Experiment Name: Zm_150mM_NaCl_P Parameter: Plant Line Value: 35A19
  misc_feature: MA Experiment 108542 PARAMETER Experiment Name: Zm_150mM_NaCl_P Parameter: Timepoint (hr) Value: 6
  misc_feature: MA Experiment 108542 PARAMETER Experiment Name: Zm_150mM_NaCl_P Parameter: Tissue Value: Aerial
  misc_feature: MA Experiment 108542 PARAMETER Experiment Name: Zm_150mM_NaCl_P Parameter: Treatment Value: 150mM NaCl vs. No Treatment
  misc_feature: MA Experiment ID: 108556 Result: Up-regulated in Transcription
  misc_feature: MA Experiment 108556 PARAMETER Experiment Name: Zm_Drought_P Parameter: Age (day) Value: 9
  misc_feature: MA Experiment 108556 PARAMETER Experiment Name: Zm_Drought_P Parameter: Organism Value: Zea mays
  misc_feature: MA Experiment 108556 PARAMETER Experiment Name: Zm_Drought_P Parameter: Plant Line Value: 35A19
  misc_feature: MA Experiment 108556 PARAMETER Experiment Name: Zm_Drought_P Parameter: Timepoint (hr) Value: 24
  misc_feature: MA Experiment 108556 PARAMETER Experiment Name: Zm_Drought_P Parameter: Tissue Value: Aerial
  misc_feature: MA Experiment 108556 PARAMETER Experiment Name: Zm_Drought_P Parameter: Treatment Value: Drought vs. No Drought
  misc_feature: MA Experiment ID: 108597 Result: Up-regulated in Transcription
  misc_feature: MA Experiment 108597 PARAMETER Experiment Name: Zm_100uM_ABA_P Parameter: Age (day) Value: 9
  misc_feature: MA Experiment 108597 PARAMETER Experiment Name: Zm_100uM_ABA_P Parameter: Organism Value: Zea mays
  misc_feature: MA Experiment 108597 PARAMETER Experiment Name: Zm_100uM_ABA_P Parameter: Plant Line Value: 35A19
  misc_feature: MA Experiment 108597 PARAMETER Experiment Name: Zm_100uM_ABA_P Parameter: Timepoint (hr) Value: 24
  misc_feature: MA Experiment 108597 PARAMETER Experiment Name: Zm_100uM_ABA_P Parameter: Tissue Value: Aerial
  misc_feature: MA Experiment 108597 PARAMETER Experiment Name: Zm_100uM_ABA_P Parameter: Treatment Value: 100uM ABA vs. No Treatment
  misc_feature: MA Experiment ID: 108689 Result: Up-regulated in Transcription
  misc_feature: MA Experiment 108689 PARAMETER Experiment Name: Zm_Drought_Roots_P Parameter: Age (day) Value: 9
  misc_feature: MA Experiment 108689 PARAMETER Experiment Name: Zm_Drought_Roots_P Parameter: Organism Value: Zea mays
  misc_feature: MA Experiment 108689 PARAMETER Experiment Name: Zm_Drought_Roots_P Parameter: Plant Line Value: 35A19
  misc_feature: MA Experiment 108689 PARAMETER Experiment Name: Zm_Drought_Roots_P Parameter: Timepoint (hr) Value: 24
  misc_feature: MA Experiment 108689 PARAMETER Experiment Name: Zm_Drought_Roots_P Parameter: Tissue Value: Roots
  misc_feature: MA Experiment 108689 PARAMETER Experiment Name: Zm_Drought_Roots_P Parameter: Treatment Value: Drought vs. No Drought
  misc_feature: MA Experiment ID: 20000477 Result: Up-regulated in Transcription
  misc_feature: MA Experiment 20000477 PARAMETER Experiment Name: Zm_5mM_SA_P Parameter: Age (day) Value: 10
  misc_feature: MA Experiment 20000477 PARAMETER Experiment Name: Zm_5mM_SA_P Parameter: Organism Value: Zea mays
  misc_feature: MA Experiment 20000477 PARAMETER Experiment Name: Zm_5mM_SA_P Parameter: Plant Line Value: 35A19
  misc_feature: MA Experiment 20000477 PARAMETER Experiment Name: Zm_5mM_SA_P Parameter: Timepoint (hr) Value: 48
  misc_feature: MA Experiment 20000477 PARAMETER Experiment Name: Zm_5mM_SA_P Parameter: Tissue Value: Aerial
  misc_feature: MA Experiment 20000477 PARAMETER Experiment Name: Zm_5mM_SA_P Parameter: Treatment Value: 5mM SA vs. No Treatment
  misc_feature: MA Experiment ID: 20000478 Result: Up-regulated in Transcription
  misc_feature: MA Experiment 20000478 PARAMETER Experiment Name: Zm_5mM_SA_P Parameter: Age (day) Value: 11
  misc_feature: MA Experiment 20000478 PARAMETER Experiment Name: Zm_5mM_SA_P Parameter: Organism Value: Zea mays
  misc_feature: MA Experiment 20000478 PARAMETER Experiment Name: Zm_5mM_SA_P Parameter: Plant Line Value: 35A19
  misc_feature: MA Experiment 20000478 PARAMETER Experiment Name: Zm_5mM_SA_P Parameter: Timepoint (hr) Value: 72
  misc_feature: MA Experiment 20000478 PARAMETER Experiment Name: Zm_5mM_SA_P Parameter: Tissue Value: Aerial
  misc_feature: MA Experiment 20000478 PARAMETER Experiment Name: Zm_5mM_SA_P Parameter: Treatment Value: 5mM SA vs. No Treatment
  misc_feature: MA Experiment ID: 20000479 Result: Up-regulated in Transcription
  misc_feature: MA Experiment 20000479 PARAMETER Experiment Name: Zm_Drought_P Parameter: Age (day) Value: 10
  misc_feature: MA Experiment 20000479 PARAMETER Experiment Name: Zm_Drought_P Parameter: Organism Value: Zea mays
  misc_feature: MA Experiment 20000479 PARAMETER Experiment Name: Zm_Drought_P Parameter: Plant Line Value: 35A19
  misc_feature: MA Experiment 20000479 PARAMETER Experiment Name: Zm_Drought_P Parameter: Timepoint (hr) Value: 48
  misc_feature: MA Experiment 20000479 PARAMETER Experiment Name: Zm_Drought_P Parameter: Tissue Value: Aerial
  misc_feature: MA Experiment 20000479 PARAMETER Experiment Name: Zm_Drought_P Parameter: Treatment Value: Drought vs. No Drought
  misc_feature: MA Experiment ID: 20000480 Result: Up-regulated in Transcription
  misc_feature: MA Experiment 20000480 PARAMETER Experiment Name: Zm_Drought_P Parameter: Age (day) Value: 11
  misc_feature: MA Experiment 20000480 PARAMETER Experiment Name: Zm_Drought_P Parameter: Organism Value: Zea mays
  misc_feature: MA Experiment 20000480 PARAMETER Experiment Name: Zm_Drought_P Parameter: Plant Line Value: 35A19
  misc_feature: MA Experiment 20000480 PARAMETER Experiment Name: Zm_Drought_P Parameter: Timepoint (hr) Value: 72
  misc_feature: MA Experiment 20000480 PARAMETER Experiment Name: Zm_Drought_P Parameter: Tissue Value: Aerial
  misc_feature: MA Experiment 20000480 PARAMETER Experiment Name: Zm_Drought_P Parameter: Treatment Value: Drought vs. No Drought
  misc_feature: MA Experiment ID: 20000534 Result: Up-regulated in Transcription
  misc_feature: MA Experiment 20000534 PARAMETER Experiment Name: Zm_Hybrid_Pollen_P Parameter: Age (day) Value: 8
  misc_feature: MA Experiment 20000534 PARAMETER Experiment Name: Zm_Hybrid_Pollen_P Parameter: Organism Value: Zea mays
  misc_feature: MA Experiment 20000534 PARAMETER Experiment Name: Zm_Hybrid_Pollen_P Parameter: Plant Line Value: 35A19
  misc_feature: MA Experiment 20000534 PARAMETER Experiment Name: Zm_Hybrid_Pollen_P Parameter: Tissue Value: Pollen vs. Aerial
gccccaagccgcaaccgcaaccaccttcccaaatctcagtagtcgcctctcgtcgtcttcgtctagcccggcccgttccaaaacctccgtagccgccgccgccaccccggcgaccgaagatgatctccccggacgcagcccgcaacgtagtcggcatcatcggcaatgtcatctccttcggcctcttcctgtccccagtgctgacgttctggcggatctacaaggccaaggacgtggaggagttcaagccggacccttacctggcgacgctgctcaactgcatgctctgggtgttctatggcatccccgtcgtccaccccaacagcattctcgtcgtcaccatcaacggcatcggcctcgtcatcgaggccgtctacctcactatcttcttcctctattccgacagccagaagcgcaagaaggcgttcgcgatcctggccgtggagattctgttcatggtcgccgtggtgctcggtgtgatcctcggcgcgcacactcacgagaaacgttccatgatcgtcggcatcctctgcgtcatcttcggctcgatgatgtacgcctcaccactcactatcatgagtcgagtgatcaagaccaagagcgttgagtacatgcccttcctcctgtcgctggtgagcttcctcaacggctgctgctggacggcctacgcgctcatccgcttcgacctctacgtcacgatcccgaacgccctgggcgcattcttcggcctcgtccagctgatcctctacttctgctactacaagtcgacccccaagaaggagaagaacgtggagctgcccaccgtctccagcaacgtcggcggcggcaacgtcaccgtcagcgttgagcgatagatgatgtagctgccgccgcccgtcgagaacgaactcgacgagacgtgctttacccacaagtagttttggccttgtctaattgctcttctcggatgatcgtttaagtgagtgttagttagttttgccctgcgtgtgatgtcaggaacaattaatatatccatgtggctgtgtttgccattctagataattaagaacaatcgtatctgattgctacc

SEQ ID NO: 3895 - protein, 244 aa, Zea mays subsp. mays
  peptide (1)..(244): Ceres Seq. ID no. 12403741
  misc_feature (9)..(98): Pfam Name: MtN3/saliva family Pfam Description: MtN3/saliva family
  misc_feature (1)..(225): Homolog of NCBI NO: 18421965 NR Description: putative protein; protein id: At5g40260.1, by cDNA: 11922. [Arabidopsis thaliana] contains similarity to MtN3 [Arabidopsis thaliana]
  misc_feature (1)..(194): Homolog of NCBI NO: 10177463 NR Description: contains similarity to MtN3
  misc_feature (39)..(217): Homolog of NCBI NO: 431154 NR Description: ORF [Lilium longiflorum]
  misc_feature (1)..(244): Homolog of NCBI NO: 34912454 NR Description: P0681B11.31 [Oryza sativa (japonica
  misc_feature (1)..(225): Homolog of NCBI NO: 21592355 NR Description: contains similarity to nodulin MtN3 protein
  misc_feature (8)..(219): Homolog of NCBI NO: 18413388 NR Description: putative protein; protein id: At4g10850.1, by cDNA: 33161. [Arabidopsis thaliana] contains similarity to Medicago truncatula MtN3 (GB:Y08726)
  misc_feature (1)..(225): Homolog of NCBI NO: 18405611 NR Description: Expressed protein; protein id: At3g28007.1, by cDNA: 22745., supported by cDNA: gi_16226221 [Arabidopsis >gi|16226222|gb|AAL16107.1|AF428275_1 unknown protein
  misc_feature (1)..(244): Homolog of NCBI NO: 34912462 NR Description: MtN3-like protein [Oryza sativa (japonica
  misc_feature (8)..(243): Homolog of NCBI NO: 15219732 NR Description: hypothetical protein; protein id: At1g66770.1 thaliana] >gi|12597757|gb|AAG60070.1|AC013288_4 hypothetical
  misc_feature (39)..(225): Homolog of NCBI NO: 11994120 NR Description: contains similarity to nodulin MtN3
MISPDAARNVVGIIGNVISFGLFLSPVLTFWRIYKAKDVEEFKPDPYLATLLNCMLWVFYGIPVVHPNSILVVTINGIGLVIEAVYLTIFFLYSDSQKRKKAFAILAVEILFMVAVVLGVILGAHTHEKRSMIVGILCVIFGSMMYASPLTIMSRVIKTKSVEYMPFLLSLVSFLNGCCWTAYALIRFDLYVTIPNALGAFFGLVQLILYFCYYKSTPKKEKNVELPTVSSNVGGGNVTVSVER

SEQ ID NO: 3896 - protein, 201 aa, Zea mays subsp. mays
  peptide (1)..(201): Ceres Seq. ID no. 12403742
PQAATATTFPNLSSRLSSSSSSPARSKTSVAAAATPATEDDLPGRSPQRSRHHRQCHLLRPLPVPSADVLADLQGQGRGGVQAGPLPGDAAQLHALGVLWHPRRPPQQHSRRHHQRHRPRHRGRLPHYLLPLFRQPEAQEGVRDPGRGDSVHGRRGARCDPRRAHSRETFHDRRHPLRHLRLDDVRLTTHYHESSDQDQER

SEQ ID NO: 3897 - protein, 190 aa, Zea mays subsp. mays
  peptide (1)..(190): Ceres Seq. ID no. 12403743
  misc_feature (1)..(190): Homolog of NCBI NO: 34912462 NR Description: MtN3-like protein [Oryza sativa (japonica
  misc_feature (1)..(190): Homolog of NCBI NO: 34912454 NR Description: P0681B11.31 [Oryza sativa (japonica
  misc_feature (1)..(171): Homolog of NCBI NO: 18405611 NR Description: Expressed protein; protein id: At3g28007.1, by cDNA: 22745., supported by cDNA: gi_16226221 [Arabidopsis >gi|16226222|gb|AAL16107.1|AF428275_1 unknown protein
  misc_feature (1)..(171): Homolog of NCBI NO: 21592355 NR Description: contains similarity to nodulin MtN3 protein
  misc_feature (1)..(165): Homolog of NCBI NO: 18413388 NR Description: putative protein; protein id: At4g10850.1, by cDNA: 33161. [Arabidopsis thaliana] contains similarity to Medicago truncatula MtN3 (GB:Y08726)
  misc_feature (1)..(171): Homolog of NCBI NO: 18421965 NR Description: putative protein; protein id: At5g40260.1, by cDNA: 11922. [Arabidopsis thaliana] contains similarity to MtN3 [Arabidopsis thaliana]
  misc_feature (1)..(140): Homolog of NCBI NO: 10177463 NR Description: contains similarity to MtN3
  misc_feature (1)..(163): Homolog of NCBI NO: 431154 NR Description: ORF [Lilium longiflorum]
  misc_feature (1)..(189): Homolog of NCBI NO: 15219732 NR Description: hypothetical protein; protein id: At1g66770.1 thaliana] >gi|12597757|gb|AAG60070.1|AC013288_4 hypothetical
  misc_feature (1)..(171): Homolog of NCBI NO: 11994120 NR Description: contains similarity to nodulin MtN3
MLWVFYGIPVVHPNSILVVTINGIGLVIEAVYLTIFFLYSDSQKRKKAFAILAVEILFMVAVVLGVILGAHTHEKRSMIVGILCVIFGSMMYASPLTIMSRVIKTKSVEYMPFLLSLVSFLNGCCWTAYALIRFDLYVTIPNALGAFFGLVQLILYFCYYKSTPKKEKNVELPTVSSNVGGGNVTVSVER

SEQ ID NO: 3898 - DNA, 1237 bp, Zea mays subsp. mays
  misc_feature (1)..(1237): Ceres Seq. ID no. 12365371
  misc_feature: MA Experiment ID: 108527 Result: Up-regulated in Transcription
  misc_feature: MA Experiment 108527 PARAMETER Experiment Name: Zm_5mM_NO_P Parameter: Age (day) Value: 8
  misc_feature: MA Experiment 108527 PARAMETER Experiment Name: Zm_5mM_NO_P Parameter: Organism Value: Zea mays
  misc_feature: MA Experiment 108527 PARAMETER Experiment Name: Zm_5mM_NO_P Parameter: Plant Line Value: 35A19
  misc_feature: MA Experiment 108527 PARAMETER Experiment Name: Zm_5mM_NO_P Parameter: Timepoint (hr) Value: 6
  misc_feature: MA Experiment 108527 PARAMETER Experiment Name: Zm_5mM_NO_P Parameter: Tissue Value: Aerial
  misc_feature: MA Experiment 108527 PARAMETER Experiment Name: Zm_5mM_NO_P Parameter: Treatment Value: 5mM NO vs. No Treatment
  misc_feature: MA Experiment ID: 108543 Result: Up-regulated in Transcription
aggaggggactaggggagagagagagagagagagggggaaggccaagaagaggcttcctctccccccattctccaatccgtgccctagtcgagccagccgcgaggaaggaggcgtctcgcctagcgcccgccctcggccgaccttctgctgcaccttcgaactctggaaagttcatagatttttgggcaatagcaagtggacatggaaccatcctctcagcctcagcctgcgatgggtgttgccgccggtgggtcacaagtgtatcctgcctctgcctacccgcctgcagcaacagtagctcctcctgctgttgcatctgctggtttacagtcagtgcaaccattcccagccaaccctgcccatatgaggtgctcagcaccagattgtctaccagcaagctcaacagttccaccaacagctccagcagcagcaacagcagcagcttcaccagttctgggtcgaacgcatgactgaaatcgaggcaacagctgatttcaggaaccacaacttgccacttgcgaggataaagaagatcatgaaggccgacgaagatgtccgcatgatctcagccgaagctcccgtggtcttcgcaaaagcttgcgagatattcatactggagctgacgctgaggtcgtggatgcacaccgaggagaacaagcgccgcaccttgcagaagaacgacattgccgcagccatcaccaggaccgacatttacgacttcttggtcgacattgttcccagggatgagatgaaggacgacggaatcgggcttcctaggcccgggctgccacccatgggagccccagctgacgcatatccatactactacatgccacagcagcaggtgcctggtcctgggatggtttatggcgcccagcaaggccacccggtgacgtatctgtggcaggatcctcaggaacagcaggagcaagctcctgaagagcagcagtctctgcatgaaagggactgaggatgtcgctcaagctatcacctgatttttcagagctctcattttaggttctctaaactgcaggttttcgttggctaatatcgttgggtatcaaactgaaacaggtagggtgtagcatcatggtagtttgatttctgctgtggtgttagttggagggataatgattagcggctagtggattaaagttacccataccgtttcctttcgttccaaaagttcgccttcatgaggcctctgatatgaaaaatgctgggtgttaatgcttc

SEQ ID NO: 3899 - protein, 167 aa, Zea mays subsp. mays
  peptide (1)..(167): Ceres Seq. ID no. 12365372
  misc_feature (1)..(125): Homolog of NCBI NO: 2398533 NR Description: Transcription factor [Arabidopsis thaliana]
  misc_feature (1)..(141): Homolog of NCBI NO: 25404100 NR Description: transcription factor [imported] - Arabidopsis
  misc_feature (1)..(151): Homolog of NCBI NO: 15242784 NR Description: transcription factor Hap5a-like protein
  misc_feature (1)..(167): Homolog of NCBI NO: 15228405 NR Description: transcription factor Hap5a
  misc_feature (1)..(160): Homolog of NCBI NO: 15221912 NR Description: heme activated protein, putative; protein id:
  misc_feature (1)..(159): Homolog of NCBI NO: 6289057 NR Description: heme activated protein [Arabidopsis thaliana]
  misc_feature (1)..(159): Homolog of NCBI NO: 25372763 NR Description: hypothetical protein [imported] - Arabidopsis
  misc_feature (1)..(159): Homolog of NCBI NO: 15223986 NR Description: putative transcription factor
  misc_feature (1)..(141): Homolog of NCBI NO: 21554704 NR Description: transcription factor, putative [Arabidopsis
  misc_feature (1)..(141): Homolog of NCBI NO: 15223482 NR Description: transcription factor, putative
MTEIEATADFRNHNLPLARIKKIMKADEDVRMISAEAPVVFAKACEIFILELTLRSWMHTEENKRRTLQKNDIAAAITRTDIYDFLVDIVPRDEMKDDGIGLPRPGLPPMGAPADAYPYYYMPQQQVPGPGMVYGAQQGHPVTYLWQDPQEQQEQAPEEQQSLHERD

SEQ ID NO: 3900 - protein, 156 aa, Zea mays subsp. mays
  peptide (1)..(156): Ceres Seq. ID no. 12365373
RRGLGERERERGGRPRRGFLSPHSPIRALVEPAARKEASRLAPALGRPSAAPSNSGKFIDFWAIASGHGTILSASACDGCCRRWVTSVSCLCLPACSNSSSSCCCICWFTVSATIPSQPCPYEVLSTRLSTSKLNSSTNSSSSSNSSSFTSSGSNA

SEQ ID NO: 3901 - protein, 144 aa, Zea mays subsp. mays
  peptide (1)..(144): Ceres Seq. ID no. 12365374
  misc_feature (1)..(136): Homolog of NCBI NO: 6289057 NR Description: heme activated protein [Arabidopsis thaliana]
  misc_feature (1)..(136): Homolog of NCBI NO: 25372763 NR Description: hypothetical protein [imported] - Arabidopsis
  misc_feature (1)..(136): Homolog of NCBI NO: 15223986 NR Description: putative transcription factor
  misc_feature (1)..(118): Homolog of NCBI NO: 21554704 NR Description: transcription factor, putative [Arabidopsis
  misc_feature (1)..(118): Homolog of NCBI NO: 15223482 NR Description: transcription factor, putative
  misc_feature (1)..(102): Homolog of NCBI NO: 2398533 NR Description: Transcription factor [Arabidopsis thaliana]
  misc_feature (1)..(118): Homolog of NCBI NO: 25404100 NR Description: transcription factor [imported] - Arabidopsis
  misc_feature (1)..(128): Homolog of NCBI NO: 15242784 NR Description: transcription factor Hap5a-like protein
  misc_feature (1)..(144): Homolog of NCBI NO: 15228405 NR Description: transcription factor Hap5a
  misc_feature (1)..(137): Homolog of NCBI NO: 15221912 NR Description: heme activated protein, putative; protein id:
MKADEDVRMISAEAPVVFAKACEIFILELTLRSWMHTEENKRRTLQKNDIAAAITRTDIYDFLVDIVPRDEMKDDGIGLPRPGLPPMGAPADAYPYYYMPQQQVPGPGMVYGAQQGHPVTYLWQDPQEQQEQAPEEQQSLHERD

SEQ ID NO: 3902 - DNA, 873 bp, Zea mays subsp. mays
  misc_feature (1)..(873): Ceres Seq. ID no. 12353716
  misc_feature: MA Experiment ID: 20000477 Result: Down-regulated in Transcription
  misc_feature: MA Experiment 20000477 PARAMETER Experiment Name: Zm_5mM_SA_P Parameter: Age (day) Value: 10
  misc_feature: MA Experiment 20000477 PARAMETER Experiment Name: Zm_5mM_SA_P Parameter: Organism Value: Zea mays
  misc_feature: MA Experiment 20000477 PARAMETER Experiment Name: Zm_5mM_SA_P Parameter: Plant Line Value: 35A19
  misc_feature: MA Experiment 20000477 PARAMETER Experiment Name: Zm_5mM_SA_P Parameter: Timepoint (hr) Value: 48
  misc_feature: MA Experiment 20000477 PARAMETER Experiment Name: Zm_5mM_SA_P Parameter: Tissue Value: Aerial
  misc_feature: MA Experiment 20000477 PARAMETER Experiment Name: Zm_5mM_SA_P Parameter: Treatment Value: 5mM SA vs. No Treatment
  misc_feature: MA Experiment ID: 20000478 Result: Down-regulated in Transcription
  misc_feature: MA Experiment 20000478 PARAMETER Experiment Name: Zm_5mM_SA_P Parameter: Age (day) Value: 11
  misc_feature: MA Experiment 20000478 PARAMETER Experiment Name: Zm_5mM_SA_P Parameter: Organism Value: Zea mays
  misc_feature: MA Experiment 20000478 PARAMETER Experiment Name: Zm_5mM_SA_P Parameter: Plant Line Value: 35A19
  misc_feature: MA Experiment 20000478 PARAMETER Experiment Name: Zm_5mM_SA_P Parameter: Timepoint (hr) Value: 72
  misc_feature: MA Experiment 20000478 PARAMETER Experiment Name: Zm_5mM_SA_P Parameter: Tissue Value: Aerial
  misc_feature: MA Experiment 20000478 PARAMETER Experiment Name: Zm_5mM_SA_P Parameter: Treatment Value: 5mM SA vs. No Treatment
  misc_feature: MA Experiment ID: 20000479 Result: Down-regulated in Transcription
  misc_feature: MA Experiment 20000479 PARAMETER Experiment Name: Zm_Drought_P Parameter: Age (day) Value: 10
  misc_feature: MA Experiment 20000479 PARAMETER Experiment Name: Zm_Drought_P Parameter: Organism Value: Zea mays
  misc_feature: MA Experiment 20000479 PARAMETER Experiment Name: Zm_Drought_P Parameter: Plant Line Value: 35A19
  misc_feature: MA Experiment 20000479 PARAMETER Experiment Name: Zm_Drought_P Parameter: Timepoint (hr) Value: 48
  misc_feature: MA Experiment 20000479 PARAMETER Experiment Name: Zm_Drought_P Parameter: Tissue Value: Aerial
  misc_feature: MA Experiment 20000479 PARAMETER Experiment Name: Zm_Drought_P Parameter: Treatment Value: Drought vs. No Drought
  misc_feature: MA Experiment ID: 20000535 Result: Up-regulated in Transcription
  misc_feature: MA Experiment 20000535 PARAMETER Experiment Name: Zm_Hybrid_Seed_Dev_P Parameter: DAP Value: 30 vs. 12
  misc_feature: MA Experiment 20000535 PARAMETER Experiment Name: Zm_Hybrid_Seed_Dev_P Parameter: Organism Value: Zea mays
  misc_feature: MA Experiment 20000535 PARAMETER Experiment Name: Zm_Hybrid_Seed_Dev_P Parameter: Plant Line Value: 35A19
  misc_feature: MA Experiment 20000535 PARAMETER Experiment Name: Zm_Hybrid_Seed_Dev_P Parameter: Tissue Value: Embryo vs. Unfert Floret
gtttgatgtgagccttggagtgctagattctgtttccattgtccattctcagtcacctgagcagccgaacgttctcagtcacctgcaggtcaggaaccaacgatgccgggcatccaccgctacaccgccgagctgctggtgctgctcaccatcattacccgcctcctgctgctggccacggcgtggccggcattgcccgccccagcgtcgctcgagccgtcgctgcttttcccgtccgccggcgccacctcgcccacgcagacccagtcagccggggtcgcctccacaatcccggccttcccggagcagtcagaggccgccgcggctgctgccacctccgtctgccagctcaccccgtcgcctccgctccttcccgctgtcctagcatcgtgcaacgccaatgccggcgggagtggcgtgacgctcccgccgcgcctaagatgctgcccggcgctcgccgcgtggctgtacactgcgtacgcgcccaccgcgctctcgggcagcggcgtcggagaagcgtcggtggccgcgtcggccgaggccgccgccgtggtggacttgccagtgctgccggacgacgcggaggaatgcgccggcgcggcggaccgtgcgctgcgggcggccggggtggcgctaccgcggccgcattggggcgaaagcaccggcactggcaacgggacggcggcgtgcgacgtagcgttctgctactgcggggtgaggctgcggcggcctgcgtgcgcggcgccgcagggccggatggcaaggagactggagagggactgcgcgctgccggggctcgccggctgctccaggtgcctgcgggcgctcagcaagctgggtgggaggagcaacgccacgtcgtcggcgaaggcg

SEQ ID NO: 3903 - protein, 257 aa, Zea mays subsp. mays
  peptide (1)..(257): Ceres Seq. ID no. 12353717
  misc_feature (61)..(253): Homolog of NCBI NO: 21593735 NR Description: unknown [Arabidopsis thaliana]
  misc_feature (61)..(253): Homolog of NCBI NO: 18417127 NR Description: expressed protein
  misc_feature (60)..(247): Homolog of NCBI NO: 34394002 NR Description: unknown protein [Oryza sativa (japonica
  misc_feature (44)..(251): Homolog of NCBI NO: 18401752 NR Description: expressed protein
MPGIHRYTAELLVLLTIITRLLLLATAWPALPAPASLEPSLLFPSAGATSPTQTQSAGVASTIPAFPEQSEAAAAAATSVCQLTPSPPLLPAVLASCNANAGGSGVTLPPRLRCCPALAAWLYTAYAPTALSGSGVGEASVAASAEAAAVVDLPVLPDDAEECAGAADRALRAAGVALPRPHWGESTGTGNGTAACDVAFCYCGVRLRRPACAAPQGRMARRLERDCALPGLAGCSRCLRALSKLGGRSNATSSAKA

SEQ ID NO: 3904 - protein, 144 aa, Zea mays subsp. mays
  peptide (1)..(144): Ceres Seq. ID no. 12353718
MLPGARRVAVHCVRAHRALGQRRRRSVGGRVGRGRRRGGLASAAGRRGGMRRRGGPCAAGGRGGATAAALGRKHRHWQRDGGVRRSVLLLRGEAAAACVRGAAGPDGKETGEGLRAAGARRLLQVPAGAQQAGWEEQRHVVGEG

SEQ ID NO: 3905 - DNA, 1615 bp, Zea mays subsp. mays
  misc_feature (1)..(1615): Ceres Seq. ID no. 12344675
  misc_feature: MA Experiment ID: 108535 Result: Up-regulated in Transcription
  misc_feature: MA Experiment 108535 PARAMETER Experiment Name: Zm_Meristem_P Parameter: Age (day) Value: 8
  misc_feature: MA Experiment 108535 PARAMETER Experiment Name: Zm_Meristem_P Parameter: Organism Value: Zea mays
  misc_feature: MA Experiment 108535 PARAMETER Experiment Name: Zm_Meristem_P Parameter: Plant Line Value: 35A19
  misc_feature: MA Experiment 108535 PARAMETER Experiment Name: Zm_Meristem_P Parameter: Tissue Value: Root Meristem vs. Above Root Meristem
aatccgaaccgcaaccctagatttcgcttcctctctgtcccctccgctgcgccgccataacataaatccgccgcccctctccctcagtaaacccctctcttcttcccgcggtctgctcgttcgatctgtgcagcagatctgaggtcccgggcgaccgtgaagcagcttcaatcgtcggcatggcgctcgtattgcatagtggggctggaaacaagaatgccttcaaagcacttattgctgcagaatacagtgggatcaaggttgagttgaccaaggattttgagatgggtgtctccaacaagacccctgagtttcttaagatgaacccccttgggaaggttcctgttctggagactcctgatggccctgtttttgagagtaatgctatcgcacgctatgttgctcgcttgaaggatgacaaccctctttttgggtcttcccgtattgaacaagcccacgttgagcaatggatggattttgccgcaacagaagttgatcctggtgttgcatggtacttgtatccaaggcttgggtacctcccttatgttagcacaactgaggaaacagctatttcttcattgaagaggtcgcttggtgctctgaacacacaccttgcttcaaacacataccttgttgggcatgctgttactctagctgacattgtaatgacatgcaacctctaccatggaattgcacggatcttgaccaagaccttcacgtctgatttccctcatgtcgagaggtatttctggaccatggttaaccagcctaacttcaagaaggtcattggtgaggtcaagcaggcagagtctgcacctcctattccgaaaaaggctgctccttctaaggagccaaaggcaaaggatgtcaagaaggaggctccaaaggaggcccccaagccaaaggtggttgaggcaccagcagaagaggaagcaccaaagccaaagccaaagaatcctcttgacttgctgccaccaagcaagatggtccttgatgactggaagaggctatactcaaacacaaagactaacttccgggaggttgccatcaaaggtttctgggacatgtacgacccagagggctactctttgtggttctgtgactacaagtacaatgatgagaacaccgtctcctttgtgaccctgaacaaggttggtggattcctgcagcggatggacctgtgccgcaagtacgcctttgggaagatgctcgtgataggctctgagccacccttcaagctgaagggcctttggctcttccgtggccaggatgttcccaagtttgtaatggacgaggtctatgacatcgagctctacgagtggaccaaggtggacatctctgatgaggcccagaaggagcgtgtcaatgcgatgattgaggaccaggagccctttgagggcgaggccttgcttgacgcgaaatgcttcaagtgagtgtgcttgcctggagacaactgtttagcccttgaatttgcctatggaagagtttgcccttttactagtgtcgatgttgatctggtataccttgctatgaactggttaaagtttgtgctggtttgggattttttgtgcatcttgtgatacctcaagtcttcatcatttaaatgtttagccgc

SEQ ID NO: 3906 - protein, 417 aa, Zea mays subsp. mays
  peptide (1)..(417): Ceres Seq. ID no. 12344676
  misc_feature (256)..(364): Pfam Name: Elongation factor 1 gamma, conserved domain Pfam Description: Elongation factor 1 gamma, conserved domain
  misc_feature (1)..(417): Homolog of NCBI NO: 13626392 NR Description: Elongation factor 1-gamma (EF-1-gamma) (eEF-1B
  misc_feature (10)..(417): Homolog of NCBI NO: 29367403 NR Description: elongation factor 1 gamma-like protein
  misc_feature (1)..(417): Homolog of NCBI NO: 13626515 NR Description: Elongation factor 1-gamma (EF-1-gamma) (eEF-1B
  misc_feature (4)..(417): Homolog of NCBI NO: 29367381 NR Description: elongation factor 1 gamma-like protein
MALVLHSGAGNKNAFKALIAAEYSGIKVELTKDFEMGVSNKTPEFLKMNPLGKVPVLETPDGPVFESNAIARYVARLKDDNPLFGSSRIEQAHVEQWMDFAATEVDPGVAWYLYPRLGYLPYVSTTEETAISSLKRSLGALNTHLASNTYLVGHAVTLADIVMTCNLYHGIARILTKTFTSDFPHVERYFWTMVNQPNFKKVIGEVKQAESAPPIPKKAAPSKEPKAKDVKKEAPKEAPKPKVVEAPAEEEAPKPKPKNPLDLLPPSKMVLDDWKRLYSNTKTNFREVAIKGFWDMYDPEGYSLWFCDYKYNDENTVSFVTLNKVGGFLQRMDLCRKYAFGKMLVIGSEPPFKLKGLWLFRGQDVPKFVMDEVYDIELYEWTKVDISDEAQKERVNAMIEDQEPFEGEALLDAKCFK

SEQ ID NO: 3907 - protein, 382 aa, Zea mays subsp. mays
  peptide (1)..(382): Ceres Seq. ID no. 12344677
  misc_feature (221)..(329): Pfam Name: Elongation factor 1 gamma, conserved domain Pfam Description: Elongation factor 1 gamma, conserved domain
  misc_feature (1)..(382): Homolog of NCBI NO: 13626392 NR Description: Elongation factor 1-gamma (EF-1-gamma) (eEF-1B
  misc_feature (1)..(382): Homolog of NCBI NO: 29367403 NR Description: elongation factor 1 gamma-like protein
  misc_feature (1)..(382): Homolog of NCBI NO: 13626515 NR Description: Elongation factor 1-gamma (EF-1-gamma) (eEF-1B
  misc_feature (1)..(382): Homolog of NCBI NO: 29367381 NR Description: elongation factor 1 gamma-like protein
MGVSNKTPEFLKMNPLGKVPVLETPDGPVFESNAIARYVARLKDDNPLFGSSRIEQAHVEQWMDFAATEVDPGVAWYLYPRLGYLPYVSTTEETAISSLKRSLGALNTHLASNTYLVGHAVTLADIVMTCNLYHGIARILTKTFTSDFPHVERYFWTMVNQPNFKKVIGEVKQAESAPPIPKKAAPSKEPKAKDVKKEAPKEAPKPKVVEAPAEEEAPKPKPKNPLDLLPPSKMVLDDWKRLYSNTKTNFREVAIKGFWDMYDPEGYSLWFCDYKYNDENTVSFVTLNKVGGFLQRMDLCRKYAFGKMLVIGSEPPFKLKGLWLFRGQDVPKFVMDEVYDIELYEWTKVDISDEAQKERVNAMIEDQEPFEGEALLDAKCFK

SEQ ID NO: 3908 - protein, 370 aa, Zea mays subsp. mays
  peptide (1)..(370): Ceres Seq. ID no. 12344678
  misc_feature (209)..(317): Pfam Name: Elongation factor 1 gamma, conserved domain Pfam Description: Elongation factor 1 gamma, conserved domain
  misc_feature (1)..(370): Homolog of NCBI NO: 13626392 NR Description: Elongation factor 1-gamma (EF-1-gamma) (eEF-1B
  misc_feature (1)..(370): Homolog of NCBI NO: 29367403 NR Description: elongation factor 1 gamma-like protein
  misc_feature (1)..(370): Homolog of NCBI NO: 13626515 NR Description: Elongation factor 1-gamma (EF-1-gamma) (eEF-1B
  misc_feature (1)..(370): Homolog of NCBI NO: 29367381 NR Description: elongation factor 1 gamma-like protein
MNPLGKVPVLETPDGPVFESNAIARYVARLKDDNPLFGSSRIEQAHVEQWMDFAATEVDPGVAWYLYPRLGYLPYVSTTEETAISSLKRSLGALNTHLASNTYLVGHAVTLADIVMTCNLYHGIARILTKTFTSDFPHVERYFWTMVNQPNFKKVIGEVKQAESAPPIPKKAAPSKEPKAKDVKKEAPKEAPKPKVVEAPAEEEAPKPKPKNPLDLLPPSKMVLDDWKRLYSNTKTNFREVAIKGFWDMYDPEGYSLWFCDYKYNDENTVSFVTLNKVGGFLQRMDLCRKYAFGKMLVIGSEPPFKLKGLWLFRGQDVPKFVMDEVYDIELYEWTKVDISDEAQKERVNAMIEDQEPFEGEALLDAKCFK

SEQ ID NO: 3909 - DNA, 1539 bp, Zea mays subsp. mays
  misc_feature (1)..(1539): Ceres Seq. ID no. 12391407
  misc_feature: MA Experiment ID: 108523 Result: Down-regulated in Transcription
  misc_feature: MA Experiment 108523 PARAMETER Experiment Name: Zm_42deg_Heat_P Parameter: Age (day) Value: 8
  misc_feature: MA Experiment 108523 PARAMETER Experiment Name: Zm_42deg_Heat_P Parameter: Organism Value: Zea mays
  misc_feature: MA Experiment 108523 PARAMETER Experiment Name: Zm_42deg_Heat_P Parameter: Plant Line Value: 35A19
  misc_feature: MA Experiment 108523 PARAMETER Experiment Name: Zm_42deg_Heat_P Parameter: Temperature (deg C) Value: 42 vs. 22
  misc_feature: MA Experiment 108523 PARAMETER Experiment Name: Zm_42deg_Heat_P Parameter: Timepoint (hr) Value: 6
  misc_feature: MA Experiment 108523 PARAMETER Experiment Name: Zm_42deg_Heat_P Parameter: Tissue Value: Aerial
aaaagtggattccaaaatccttcgtccagctgctgactagcgcagtcccgtcgctctcccactccttttcctccttaaatttccacacgaaaaattctcggtggacagaaaaaacaaggcaaagatcagaagagaacgcggaagtgatggccatggatccaagcgtcgcggcgcgccagagcgaggaggcggcggaggccttcttccgcgcggcgccgccgctccgtgaccgcgaccgtctcgccgccagcctcgccgatttcctcgcccgccactcagccgggggtggtggagtggtgtgcgtcacctccggcggcactacggtgcccctggagcagcgttgcgtgcgctacatcgacaattttagctccggccagcgcggtgccgcctccaccgagtattttcttaaggccggctacgctgtcatcttcatccatcgccgtgggagcaagcagccttactgtaggtttcttccagaggattcctttctcgatctttttgagctcggggaagactcagagatccaagttccacagtctcattcatcggtggtcaaggcagcaattagcaattaccggaaggcaatcgatgaatgccttcttctcaaactgcctttcacaacaatttttgagtaccttcagttactacaaatggtggctacttctatgaattgcttggggcaccgtggaatgttttatcttgctgctgcagtttccgacttctatgttccatgggaaagtatggctaaacataaaattgagtcagcaggcggccctttgaacatgcaactcaaccaagtccctaagatgcttttcatcctccggaaaaactgggcccctgctgcattttgtgtatccttcaagctcgaaacagatcctaacattctcctacagaaggcagagatggctttgaagaagtacggtatgaacgtcgtggtggcaaatgaactcgcaaactacaaagatgtagtggtgatggtcacaagcaacggggggaggacgaccgtgagcaggaggagcaaggcggaagacctggaagcgcagctaaccgacctcctggtgaagatgcactcggagcacattgcacagcccaattcgtaggaccatcgagcgagcgagatggttaaattaaatcagacatgccggcggcaagtatgagcgattctacttctactcgcctagcaaattgtgatatacagagttcaccgggtttgtcataaagacgctcatcaatgtgctgcagcagattaattcaaaaaattatagctgaatagctcacaccaggtacatgcaagtttttgaacataacctaggtaagggcatgtacagtggtgtttaatgtggaggctcttaaggtgtttaagggggttatttgaaaaaaaaatcttagagccgtctctccgtgaagagacgcttctggctcgtaaaccaagtagcaacagacgcttcacttcccactgtacgaatttgtcgtctgttctatcgatctaatgctatacaaatacatttaattatgtatttattaatagactacatttat

SEQ ID NO: 3910 - protein, 365 aa, Zea mays subsp. mays
  peptide (1)..(365): Ceres Seq. ID no. 12391408
  misc_feature (98)..(338): Pfam Name: DNA / pantothenate metabolism flavoprotein Pfam Description: DNA / pantothenate metabolism flavoprotein
  misc_feature (79)..(329): Homolog of NCBI NO: 13385982 NR Description: RIKEN cDNA 6330579B17 [Mus musculus]
  misc_feature (79)..(364): Homolog of NCBI NO: 34810081 NR Description: Chain A, Crystal Structure Of
  misc_feature (79)..(364): Homolog of NCBI NO: 18255582 NR Description: RIKEN cDNA 6330579B17 gene [Mus musculus]
  misc_feature (79)..(364): Homolog of NCBI NO: 34870890 NR Description: similar to RIKEN cDNA 6330579B17 gene [Rattus
  misc_feature (61)..(150): Homolog of NCBI NO: 8778623 NR Description: F5O11.7 [Arabidopsis thaliana]
  misc_feature (179)..(362): Homolog of NCBI NO: 8778623 NR Description: F5O11.7 [Arabidopsis thaliana]
  misc_feature (78)..(175): Homolog of NCBI NO: 15241677 NR Description: putative protein; protein id: At5g02080.1
  misc_feature (200)..(365): Homolog of NCBI NO: 15241677 NR Description: putative protein; protein id: At5g02080.1
  misc_feature (61)..(362): Homolog of NCBI NO: 30682728 NR Description: expressed protein [Arabidopsis thaliana]
  misc_feature (49)..(365): Homolog of NCBI NO: 40253297 NR Description: putative Chain A, Crystal Structure Of
KWIPKSFVQLLTSAVPSLSHSFSSLNFHTKNSRWTEKTRQRSEENAEVMAMDPSVAARQSEEAAEAFFRAAPPLRDRDRLAASLADFLARHSAGGGGVVCVTSGGTTVPLEQRCVRYIDNFSSGQRGAASTEYFLKAGYAVIFIHRRGSKQPYCRFLPEDSFLDLFELGEDSEIQVPQSHSSVVKAAISNYRKAIDECLLLKLPFTTIFEYLQLLQMVATSMNCLGHRGMFYLAAAVSDFYVPWESMAKHKIESAGGPLNMQLNQVPKMLFILRKNWAPAAFCVSFKLETDPNILLQKAEMALKKYGMNVVVANELANYKDVVVMVTSNGGRTTVSRRSKAEDLEAQLTDLLVKMHSEHIAQPNS

SEQ ID NO: 3911 - protein, 317 aa, Zea mays subsp. mays
  peptide (1)..(317): Ceres Seq. ID no. 12391409
  misc_feature (50)..(290): Pfam Name: DNA / pantothenate metabolism flavoprotein Pfam Description: DNA / pantothenate metabolism flavoprotein
  misc_feature (31)..(281): Homolog of NCBI NO: 13385982 NR Description: RIKEN cDNA 6330579B17 [Mus musculus]
  misc_feature (31)..(316): Homolog of NCBI NO: 34810081 NR Description: Chain A, Crystal Structure Of
  misc_feature (31)..(316): Homolog of NCBI NO: 18255582 NR Description: RIKEN cDNA 6330579B17 gene [Mus musculus]
  misc_feature (31)..(316): Homolog of NCBI NO: 34870890 NR Description: similar to RIKEN cDNA 6330579B17 gene [Rattus
  misc_feature (13)..(102): Homolog of NCBI NO: 8778623 NR Description: F5O11.7 [Arabidopsis thaliana]
  misc_feature (131)..(314): Homolog of NCBI NO: 8778623 NR Description: F5O11.7 [Arabidopsis thaliana]
  misc_feature (30)..(127): Homolog of NCBI NO: 15241677 NR Description: putative protein; protein id: At5g02080.1
  misc_feature (152)..(317): Homolog of NCBI NO: 15241677 NR Description: putative protein; protein id: At5g02080.1
  misc_feature (13)..(314): Homolog of NCBI NO: 30682728 NR Description: expressed protein [Arabidopsis thaliana]
  misc_feature (1)..(317): Homolog of NCBI NO: 40253297 NR Description: putative Chain A, Crystal Structure Of
MAMDPSVAARQSEEAAEAFFRAAPPLRDRDRLAASLADFLARHSAGGGGVVCVTSGGTTVPLEQRCVRYIDNFSSGQRGAASTEYFLKAGYAVIFIHRRGSKQPYCRFLPEDSFLDLFELGEDSEIQVPQSHSSVVKAAISNYRKAIDECLLLKLPFTTIFEYLQLLQMVATSMNCLGHRGMFYLAAAVSDFYVPWESMAKHKIESAGGPLNMQLNQVPKMLFILRKNWAPAAFCVSFKLETDPNILLQKAEMALKKYGMNVVVANELANYKDVVVMVTSNGGRTTVSRRSKAEDLEAQLTDLLVKMHSEHIAQPNS

SEQ ID NO: 3912 - protein, 315 aa, Zea mays subsp. mays
  peptide (1)..(315): Ceres Seq. ID no. 12391410
  misc_feature (48)..(288): Pfam Name: DNA / pantothenate metabolism flavoprotein Pfam Description: DNA / pantothenate metabolism flavoprotein
  misc_feature (29)..(279): Homolog of NCBI NO: 13385982 NR Description: RIKEN cDNA 6330579B17 [Mus musculus]
  misc_feature (29)..(314): Homolog of NCBI NO: 34810081 NR Description: Chain A, Crystal Structure Of
  misc_feature (29)..(314): Homolog of NCBI NO: 18255582 NR Description: RIKEN cDNA 6330579B17 gene [Mus musculus]
  misc_feature (29)..(314): Homolog of NCBI NO: 34870890 NR Description: similar to RIKEN cDNA 6330579B17 gene [Rattus
  misc_feature (11)..(100): Homolog of NCBI NO: 8778623 NR Description: F5O11.7 [Arabidopsis thaliana]
  misc_feature (129)..(312): Homolog of NCBI NO: 8778623 NR Description: F5O11.7 [Arabidopsis thaliana]
  misc_feature (28)..(125): Homolog of NCBI NO: 15241677 NR Description: putative protein; protein id: At5g02080.1
  misc_feature (150)..(315): Homolog of NCBI NO: 15241677 NR Description: putative protein; protein id: At5g02080.1
  misc_feature (11)..(312): Homolog of NCBI NO: 30682728 NR Description: expressed protein [Arabidopsis thaliana]
  misc_feature (1)..(315): Homolog of NCBI NO: 40253297 NR Description: putative Chain A, Crystal Structure Of
MDPSVAARQSEEAAEAFFRAAPPLRDRDRLAASLADFLARHSAGGGGVVCVTSGGTTVPLEQRCVRYIDNFSSGQRGAASTEYFLKAGYAVIFIHRRGSKQPYCRFLPEDSFLDLFELGEDSEIQVPQSHSSVVKAAISNYRKAIDECLLLKLPFTTIFEYLQLLQMVATSMNCLGHRGMFYLAAAVSDFYVPWESMAKHKIESAGGPLNMQLNQVPKMLFILRKNWAPAAFCVSFKLETDPNILLQKAEMALKKYGMNVVVANELANYKDVVVMVTSNGGRTTVSRRSKAEDLEAQLTDLLVKMHSEHIAQPNS

SEQ ID NO: 3913 - DNA, 1285 bp, Zea mays subsp. mays
  misc_feature (1)..(1285): Ceres Seq. ID no. 12357949
  misc_feature: MA Experiment ID: 108504 Result: Down-regulated in Transcription
  misc_feature: MA Experiment 108504 PARAMETER Experiment Name: Zm_Drought_P Parameter: Age (day) Value: 8
  misc_feature: MA Experiment 108504 PARAMETER Experiment Name: Zm_Drought_P Parameter: Organism Value: Zea mays
  misc_feature: MA Experiment 108504 PARAMETER Experiment Name: Zm_Drought_P Parameter: Plant Line Value: 35A19
  misc_feature: MA Experiment 108504 PARAMETER Experiment Name: Zm_Drought_P Parameter: Timepoint (hr) Value: 12
  misc_feature: MA Experiment 108504 PARAMETER Experiment Name: Zm_Drought_P Parameter: Tissue Value: Aerial
  misc_feature: MA Experiment 108504 PARAMETER Experiment Name: Zm_Drought_P Parameter: Treatment Value: Drought vs. No Drought
  misc_feature: MA Experiment ID: 108523 Result: Down-regulated in Transcription
  misc_feature: MA Experiment 108523 PARAMETER Experiment Name: Zm_42deg_Heat_P Parameter: Age (day) Value: 8
  misc_feature: MA Experiment 108523 PARAMETER Experiment Name: Zm_42deg_Heat_P Parameter: Organism Value: Zea mays
  misc_feature: MA Experiment 108523 PARAMETER Experiment Name: Zm_42deg_Heat_P Parameter: Plant Line Value: 35A19
  misc_feature: MA Experiment 108523 PARAMETER Experiment Name: Zm_42deg_Heat_P Parameter: Temperature (deg C) Value: 42 vs. 22
  misc_feature: MA Experiment 108523 PARAMETER Experiment Name: Zm_42deg_Heat_P Parameter: Timepoint (hr) Value: 6
  misc_feature: MA Experiment 108523 PARAMETER Experiment Name: Zm_42deg_Heat_P Parameter: Tissue Value: Aerial
  misc_feature: MA Experiment ID: 108528 Result: Up-regulated in Transcription
  misc_feature: MA Experiment 108528 PARAMETER Experiment Name: Zm_Imbibed_Seeds_P Parameter: Age (day) Value: 5 vs. 2
  misc_feature: MA Experiment 108528 PARAMETER Experiment Name: Zm_Imbibed_Seeds_P Parameter: Organism Value: Zea mays
  misc_feature: MA Experiment 108528 PARAMETER Experiment Name: Zm_Imbibed_Seeds_P Parameter: Plant Line Value: 35A19
  misc_feature: MA Experiment 108528 PARAMETER Experiment Name: Zm_Imbibed_Seeds_P Parameter: Tissue Value: Aerial vs. Embryo
  misc_feature: MA Experiment ID: 108529 Result: Down-regulated in Transcription
  misc_feature: MA Experiment 108529 PARAMETER Experiment Name: Zm_Imbibed_Seeds_P Parameter: Age (day) Value: 5 vs. 2
  misc_feature: MA Experiment 108529 PARAMETER Experiment Name: Zm_Imbibed_Seeds_P Parameter: Organism Value: Zea mays
  misc_feature: MA Experiment 108529 PARAMETER Experiment Name: Zm_Imbibed_Seeds_P Parameter: Plant Line Value: 35A19
  misc_feature: MA Experiment 108529 PARAMETER Experiment Name: Zm_Imbibed_Seeds_P Parameter: Tissue Value: Roots vs. Embryo
  misc_feature: MA Experiment ID: 108535 Result: Up-regulated in Transcription
  misc_feature: MA Experiment 108535 PARAMETER Experiment Name: Zm_Meristem_P Parameter: Age (day) Value: 8
  misc_feature: MA Experiment 108535 PARAMETER Experiment Name: Zm_Meristem_P Parameter: Organism Value: Zea mays
  misc_feature: MA Experiment 108535 PARAMETER Experiment Name: Zm_Meristem_P Parameter: Plant Line Value: 35A19
  misc_feature: MA Experiment 108535 PARAMETER Experiment Name: Zm_Meristem_P Parameter: Tissue Value: Root Meristem vs. Above Root Meristem
  misc_feature: MA Experiment ID: 108536 Result: Down-regulated in Transcription
  misc_feature: MA Experiment 108536 PARAMETER Experiment Name: Zm_Meristem_P Parameter: Age (day) Value: 8
  misc_feature: MA Experiment 108536 PARAMETER Experiment Name: Zm_Meristem_P Parameter: Organism Value: Zea mays
  misc_feature: MA Experiment 108536 PARAMETER Experiment Name: Zm_Meristem_P Parameter: Plant Line Value: 35A19
  misc_feature: MA Experiment 108536 PARAMETER Experiment Name: Zm_Meristem_P Parameter: Tissue Value: Shoot Meristem vs. Above Shoot Meristem
  misc_feature: MA Experiment ID: 108543 Result: Up-regulated in Transcription
  misc_feature: MA Experiment ID: 108544 Result: Up-regulated in Transcription
  misc_feature: MA Experiment ID: 108545 Result: Up-regulated in Transcription
  misc_feature: MA Experiment 108545 PARAMETER Experiment Name: Zm_Imbibed_Seeds_P Parameter: Age (day) Value: 3 vs. 2
  misc_feature: MA Experiment 108545 PARAMETER Experiment Name: Zm_Imbibed_Seeds_P Parameter: Organism Value: Zea mays
  misc_feature: MA Experiment 108545 PARAMETER Experiment Name: Zm_Imbibed_Seeds_P Parameter: Plant Line Value: 35A19
  misc_feature: MA Experiment 108545 PARAMETER Experiment Name: Zm_Imbibed_Seeds_P Parameter: Tissue Value: Aerial vs. Embryo
  misc_feature: MA Experiment ID: 108546 Result: Down-regulated in Transcription
  misc_feature: MA Experiment 108546 PARAMETER Experiment Name: Zm_Imbibed_Seeds_P Parameter: Age (day) Value: 3 vs. 2
  misc_feature: MA Experiment 108546 PARAMETER Experiment Name: Zm_Imbibed_Seeds_P Parameter: Organism Value: Zea mays
  misc_feature: MA Experiment 108546 PARAMETER Experiment Name: Zm_Imbibed_Seeds_P Parameter: Plant Line Value: 35A19
  misc_feature: MA Experiment 108546 PARAMETER Experiment Name: Zm_Imbibed_Seeds_P Parameter: Tissue Value: Roots vs. Embryo
  misc_feature: MA Experiment ID: 108547 Result: Up-regulated in Transcription
  misc_feature: MA Experiment 108547 PARAMETER Experiment Name: Zm_Imbibed_Seeds_P Parameter: Age (day) Value: 4 vs. 2
  misc_feature: MA Experiment 108547 PARAMETER Experiment Name: Zm_Imbibed_Seeds_P Parameter: Organism Value: Zea mays
  misc_feature: MA Experiment 108547 PARAMETER Experiment Name: Zm_Imbibed_Seeds_P Parameter: Plant Line Value: 35A19
  misc_feature: MA Experiment 108547 PARAMETER Experiment Name: Zm_Imbibed_Seeds_P Parameter: Tissue Value: Aerial vs. Embryo
  misc_feature: MA Experiment ID: 108556 Result: Down-regulated in Transcription
  misc_feature: MA Experiment 108556 PARAMETER Experiment Name: Zm_Drought_P Parameter: Age (day) Value: 9
  misc_feature: MA Experiment 108556 PARAMETER Experiment Name: Zm_Drought_P Parameter: Organism Value: Zea mays
  misc_feature: MA Experiment 108556 PARAMETER Experiment Name: Zm_Drought_P Parameter: Plant Line Value: 35A19
  misc_feature: MA Experiment 108556 PARAMETER Experiment Name: Zm_Drought_P Parameter: Timepoint (hr) Value: 24
  misc_feature: MA Experiment 108556 PARAMETER Experiment Name: Zm_Drought_P Parameter: Tissue Value: Aerial
  misc_feature: MA Experiment 108556 PARAMETER Experiment Name: Zm_Drought_P Parameter: Treatment Value: Drought vs. No Drought
  misc_feature: MA Experiment ID: 108597 Result: Down-regulated in Transcription
  misc_feature: MA Experiment 108597 PARAMETER Experiment Name: Zm_100uM_ABA_P Parameter: Age (day) Value: 9
  misc_feature: MA Experiment 108597 PARAMETER Experiment Name: Zm_100uM_ABA_P Parameter: Organism Value: Zea mays
  misc_feature: MA Experiment 108597 PARAMETER Experiment Name: Zm_100uM_ABA_P Parameter: Plant Line Value: 35A19
  misc_feature: MA Experiment 108597 PARAMETER Experiment Name: Zm_100uM_ABA_P Parameter: Timepoint (hr) Value: 24
  misc_feature: MA Experiment 108597 PARAMETER Experiment Name: Zm_100uM_ABA_P Parameter: Tissue Value: Aerial
  misc_feature: MA Experiment 108597 PARAMETER Experiment Name: Zm_100uM_ABA_P Parameter: Treatment Value: 100uM ABA vs. No Treatment
  misc_feature: MA Experiment ID: 108688 Result: Down-regulated in Transcription
  misc_feature: MA Experiment 108688 PARAMETER Experiment Name: Zm_Embryos-Flowers__P Parameter: Tissue Value: Immature Flowers vs. Aerial+
  misc_feature: MA Experiment ID: 108689 Result: Down-regulated in Transcription
  misc_feature: MA Experiment 108689 PARAMETER Experiment Name: Zm_Drought_Roots_P Parameter: Age (day) Value: 9
  misc_feature: MA Experiment 108689 PARAMETER Experiment Name: Zm_Drought_Roots_P Parameter: Organism Value: Zea mays
  misc_feature: MA Experiment 108689 PARAMETER Experiment Name: Zm_Drought_Roots_P Parameter: Plant Line Value: 35A19
  misc_feature: MA Experiment 108689 PARAMETER Experiment Name: Zm_Drought_Roots_P Parameter: Timepoint (hr) Value: 24
  misc_feature: MA Experiment 108689 PARAMETER Experiment Name: Zm_Drought_Roots_P Parameter: Tissue Value: Roots
  misc_feature: MA Experiment 108689 PARAMETER Experiment Name: Zm_Drought_Roots_P Parameter: Treatment Value: Drought vs. No Drought
  misc_feature: MA Experiment ID: 20000477 Result: Down-regulated in Transcription
  misc_feature: MA Experiment 20000477 PARAMETER Experiment Name: Zm_5mM_SA_P Parameter: Age (day) Value: 10
  misc_feature: MA Experiment 20000477 PARAMETER Experiment Name: Zm_5mM_SA_P Parameter: Organism Value: Zea mays
  misc_feature: MA Experiment 20000477 PARAMETER Experiment Name: Zm_5mM_SA_P Parameter: Plant Line Value: 35A19
  misc_feature: MA Experiment 20000477 PARAMETER Experiment Name: Zm_5mM_SA_P Parameter: Timepoint (hr) Value: 48
  misc_feature: MA Experiment 20000477 PARAMETER Experiment Name: Zm_5mM_SA_P Parameter: Tissue Value: Aerial
  misc_feature: MA Experiment 20000477 PARAMETER Experiment Name: Zm_5mM_SA_P Parameter: Treatment Value: 5mM SA vs. No Treatment
  misc_feature: MA Experiment ID: 20000478 Result: Down-regulated in Transcription
  misc_feature: MA Experiment 20000478 PARAMETER Experiment Name: Zm_5mM_SA_P Parameter: Age (day) Value: 11
  misc_feature: MA Experiment 20000478 PARAMETER Experiment Name: Zm_5mM_SA_P Parameter: Organism Value: Zea mays
  misc_feature: MA Experiment 20000478 PARAMETER Experiment Name: Zm_5mM_SA_P Parameter: Plant Line Value: 35A19
  misc_feature: MA Experiment 20000478 PARAMETER Experiment Name: Zm_5mM_SA_P Parameter: Timepoint (hr) Value: 72
  misc_feature: MA Experiment 20000478 PARAMETER Experiment Name: Zm_5mM_SA_P Parameter: Tissue Value: Aerial
  misc_feature: MA Experiment 20000478 PARAMETER Experiment Name: Zm_5mM_SA_P Parameter: Treatment Value: 5mM SA vs. No Treatment
  misc_feature: MA Experiment ID: 20000479 Result: Down-regulated in Transcription
  misc_feature: MA Experiment 20000479 PARAMETER Experiment Name: Zm_Drought_P Parameter: Age (day) Value: 10
  misc_feature: MA Experiment 20000479 PARAMETER Experiment Name: Zm_Drought_P Parameter: Organism Value: Zea mays
  misc_feature: MA Experiment 20000479 PARAMETER Experiment Name: Zm_Drought_P Parameter: Plant Line Value: 35A19
  misc_feature: MA Experiment 20000479 PARAMETER Experiment Name: Zm_Drought_P Parameter: Timepoint (hr) Value: 48
  misc_feature: MA Experiment 20000479 PARAMETER Experiment Name: Zm_Drought_P Parameter: Tissue Value: Aerial
  misc_feature: MA Experiment 20000479 PARAMETER Experiment Name: Zm_Drought_P Parameter: Treatment Value: Drought vs. No Drought
  misc_feature: MA Experiment ID: 20000480 Result: Down-regulated in Transcription
  misc_feature: MA Experiment 20000480 PARAMETER Experiment Name: Zm_Drought_P Parameter: Age (day) Value: 11
  misc_feature: MA Experiment 20000480 PARAMETER Experiment Name: Zm_Drought_P Parameter: Organism Value: Zea mays
  misc_feature: MA Experiment 20000480 PARAMETER Experiment Name: Zm_Drought_P Parameter: Plant Line Value: 35A19
  misc_feature: MA Experiment 20000480 PARAMETER Experiment Name: Zm_Drought_P Parameter: Timepoint (hr) Value: 72
  misc_feature: MA Experiment 20000480 PARAMETER Experiment Name: Zm_Drought_P Parameter: Tissue Value: Aerial
  misc_feature: MA Experiment 20000480 PARAMETER Experiment Name: Zm_Drought_P Parameter: Treatment Value: Drought vs. No Drought
  misc_feature: MA Experiment ID: 20000487 Result: Down-regulated in Transcription
  misc_feature: MA Experiment 20000487 PARAMETER Experiment Name: Zm_50mM_NH4NO3_L_to_H_P Parameter: Organism Value: Zea mays
  misc_feature: MA Experiment 20000487 PARAMETER Experiment Name: Zm_50mM_NH4NO3_L_to_H_P Parameter: Timepoint (hr) Value: 4
  misc_feature: MA Experiment 20000487 PARAMETER Experiment Name: Zm_50mM_NH4NO3_L_to_H_P Parameter: Tissue Value: Leaves
  misc_feature: MA Experiment 20000487 PARAMETER Experiment Name: Zm_50mM_NH4NO3_L_to_H_P Parameter: Treatment Value: 50mM NH4NO3 vs. 100mM Mannitol
  misc_feature: MA Experiment ID: 20000492 Result: Up-regulated in Transcription
  misc_feature: MA Experiment 20000492 PARAMETER Experiment Name: Zm_Hybrid_Seed_Dev_P Parameter: DAP Value: 12
  misc_feature: MA Experiment 20000492 PARAMETER Experiment Name: Zm_Hybrid_Seed_Dev_P Parameter: Organism Value: Zea mays
  misc_feature: MA Experiment 20000492 PARAMETER Experiment Name: Zm_Hybrid_Seed_Dev_P Parameter: Plant Line Value: 35A19
  misc_feature: MA Experiment 20000492 PARAMETER Experiment Name: Zm_Hybrid_Seed_Dev_P Parameter: Tissue Value: Fert Kernel vs. Unfert Floret
  misc_feature: MA Experiment ID: 20000535 Result: Down-regulated in Transcription
  misc_feature: MA Experiment 20000535 PARAMETER Experiment Name: Zm_Hybrid_Seed_Dev_P Parameter: DAP Value: 30 vs. 12
  misc_feature: MA Experiment 20000535 PARAMETER Experiment Name: Zm_Hybrid_Seed_Dev_P Parameter: Organism Value: Zea mays
  misc_feature: MA Experiment 20000535 PARAMETER Experiment Name: Zm_Hybrid_Seed_Dev_P Parameter: Plant Line Value: 35A19
  misc_feature: MA Experiment 20000535 PARAMETER Experiment Name: Zm_Hybrid_Seed_Dev_P Parameter: Tissue Value: Embryo vs. Unfert Floret
  misc_feature: MA Experiment ID: 20000626 Result: Down-regulated in Transcription
  misc_feature: MA Experiment 20000626 PARAMETER Experiment Name: Zm_Herbicide-Treatments_P Parameter: Timepoint (hr) Value: 12
  misc_feature: MA Experiment 20000626 PARAMETER Experiment Name: Zm_Herbicide-Treatments_P Parameter: Tissue Value: Aerial
  misc_feature: MA Experiment 20000626 PARAMETER Experiment Name: Zm_Herbicide-Treatments_P Parameter: Treatment Value: Roundup vs. No Treatment
  misc_feature: MA Experiment ID: 20000628 Result: Down-regulated in Transcription
  misc_feature: MA Experiment 20000628 PARAMETER Experiment Name: Zm_Herbicide-Treatments_P Parameter: Timepoint (hr) Value: 12
  misc_feature: MA Experiment 20000628 PARAMETER Experiment Name: Zm_Herbicide-Treatments_P Parameter: Tissue Value: Aerial
  misc_feature: MA Experiment 20000628 PARAMETER Experiment Name: Zm_Herbicide-Treatments_P Parameter: Treatment Value: Glean vs. No Treatment
  misc_feature: MA Experiment ID: 20000629 Result: Down-regulated in Transcription
  misc_feature: MA Experiment 20000629 PARAMETER Experiment Name: Zm_Herbicide-Treatments_P Parameter: Timepoint (hr) Value: 12
  misc_feature: MA Experiment 20000629 PARAMETER Experiment Name: Zm_Herbicide-Treatments_P Parameter: Tissue Value: Aerial
  misc_feature: MA Experiment 20000629 PARAMETER Experiment Name: Zm_Herbicide-Treatments_P Parameter: Treatment Value: Trimec vs. No Treatment
  misc_feature: MA Experiment ID: 20000632 Result: Down-regulated in Transcription
  misc_feature: MA Experiment 20000632 PARAMETER Experiment Name: Zm_Herbicide-Treatments_P Parameter: Timepoint (hr) Value: 4
  misc_feature: MA Experiment 20000632 PARAMETER Experiment Name: Zm_Herbicide-Treatments_P Parameter: Tissue Value: Aerial
  misc_feature: MA Experiment 20000632 PARAMETER Experiment Name: Zm_Herbicide-Treatments_P Parameter: Treatment Value: Glean vs. No Treatment
ctggtacttggcaatcctctctagctagctcagcatccgacgacgggacttgcacgatggatgctgctctgctcgtcgtctccctcgtcctctgcctgctggcggctgcccctgcggcgtccgcggcgcgggccttcttcgtcttcggcgactccctcgtcgacaacggcaacaacaactacctgctgaccacggcgcgcgccgacgcgcccccctacggcatcgacttccccacgcaccaagccacgggccgcttctccaacgggcttaacatccccgacatcatcagcgagcacctcggggccgaacctgcgctgccgtacctgagccccgagctccgaggggagaagctgctcgtcggcgccaacttcgcgtcggccggcgtcgggatcctcaacgacacaggaatacagtttgtgaacatcatcaggatcggcgaccagctgcagtacttccgggagtaccagcggaagctgcgagccctcgtcggcgagccgcaggcgacgcagctcgtgaaccaggccctcgtgctcatcacgctcggcggcaacgacttcgtgaacaactactacctggtgcccatgtccgtgcggtcgcgccagtacgcactcccggactacgtccgcttcatcgtctccgagtacaggaagatcctctcgaggctgtacgagctgggcgcgcggcgcgtgatcgtgacggggacggggccgctggggtgcgtcccggccgagctggcgctgcacagccagaacggcgagtgcgcggcggagctgacgcgcgccgtgaacctcttcaacccgcagatggtggacatggtgcgcggcatcaaccgcgccatcggcgccgacgtcttcgtcaccgccaacacctaccgcatgaacttcgactacctcgcaaacccgcaggacttcgggttcacgaacgtgcaggtggcgtgctgcggccagggccccgtacaacgggatcgggctgtgcacggcggcgtcgaacgtgtgcgacaaccgcgacgtgttcgcgttctgggacgcgttccaccccacggagagggcaaaccgcatcatcgtcgcccagttcatgcacggcgacacggactacatgcaccccatgaacctcagcaccatcctcgccacggaccaggagggcctctagactatagcttgatcagccggacacgattatacgtacatgcgtgatgtgtctcacgtgcctagcacgttagccatgtgttggatgatggcagcccaatttgccaataatattcgtgcctcgatccaagtttcacctt

SEQ ID NO: 3914 - protein, 396 aa, Zea mays subsp. mays
  peptide (1)..(396): Ceres Seq. ID no. 12357950
  misc_feature (45)..(317): Pfam Name: GDSL-like Lipase/Acylhydrolase Pfam Description: GDSL-like Lipase/Acylhydrolase
  misc_feature (7)..(316): Homolog of NCBI NO: 15227849 NR Description: putative GDSL-motif lipase/hydrolase
  misc_feature (29)..(204): Homolog of NCBI NO: 37789825 NR Description: putative GDSL-motif lipase [Vitis vinifera]
  misc_feature (18)..(317): Homolog of NCBI NO: 15238814 NR Description: putative protein; protein id: At5g18430.1
  misc_feature (23)..(316): Homolog of NCBI NO: 15235421 NR Description: Proline-rich APG - like protein
  misc_feature (21)..(317): Homolog of NCBI NO: 28071322 NR Description: P0705A05.30 [Oryza sativa (japonica
  misc_feature (22)..(317): Homolog of NCBI NO: 15242808 NR Description: putative protein
  misc_feature (23)..(317): Homolog of NCBI NO: 22758315 NR Description: putative early nodulin gene (Enod) related
  misc_feature (25)..(317): Homolog of NCBI NO: 15229265 NR Description: putative GDSL-motif lipase/acylhydrolase
  misc_feature (17)..(317): Homolog of NCBI NO: 37535146 NR Description: putative early nodulin gene (Enod) related
  misc_feature (15)..(317): Homolog of NCBI NO: 32489520 NR Description: OSJNBa0043L24.11 [Oryza sativa (japonica
GTWQSSLASSASDDGTCTMDAALLVVSLVLCLLAAAPAASAARAFFVFGDSLVDNGNNNYLLTTARADAPPYGIDFPTHQATGRFSNGLNIPDIISEHLGAEPALPYLSPELRGEKLLVGANFASAGVGILNDTGIQFVNIIRIGDQLQYFREYQRKLRALVGEPQATQLVNQALVLITLGGNDFVNNYYLVPMSVRSRQYALPDYVRFIVSEYRKILSRLYELGARRVIVTGTGPLGCVPAELALHSQNGECAAELTRAVNLFNPQMVDMVRGINRAIGADVFVTANTYRMNFDYLANPQDFGFTNVQVACCGQGPVQRDRAVHGGVERVRQPRRVRVLGRVPPHGEGKPHHRRPVHARRHGLHAPHEPQHHPRHGPGGPLDYSLISRTRLYVHA

SEQ ID NO: 3915 - protein, 378 aa, Zea mays subsp. mays
  peptide (1)..(378): Ceres Seq. ID no. 12357951
  misc_feature (27)..(299): Pfam Name: GDSL-like Lipase/Acylhydrolase Pfam Description: GDSL-like Lipase/Acylhydrolase
  misc_feature (1)..(298): Homolog of NCBI NO: 15227849 NR Description: putative GDSL-motif lipase/hydrolase
  misc_feature (11)..(186): Homolog of NCBI NO: 37789825 NR Description: putative GDSL-motif lipase [Vitis vinifera]
  misc_feature (1)..(299): Homolog of NCBI NO: 15238814 NR Description: putative protein; protein id: At5g18430.1
  misc_feature (5)..(298): Homolog of NCBI NO: 15235421 NR Description: Proline-rich APG - like protein
  misc_feature (3)..(299): Homolog of NCBI NO: 28071322 NR Description: P0705A05.30 [Oryza sativa (japonica
  misc_feature (4)..(299): Homolog of NCBI NO: 15242808 NR Description: putative protein
  misc_feature (5)..(299): Homolog of NCBI NO: 22758315 NR Description: putative early nodulin gene (Enod) related
  misc_feature (7)..(299): Homolog of NCBI NO: 15229265 NR Description: putative GDSL-motif lipase/acylhydrolase
  misc_feature (1)..(299): Homolog of NCBI NO: 37535146 NR Description: putative early nodulin gene (Enod) related
  misc_feature (1)..(299): Homolog of NCBI NO: 32489520 NR Description: OSJNBa0043L24.11 [Oryza sativa (japonica
MDAALLVVSLVLCLLAAAPAASAARAFFVFGDSLVDNGNNNYLLTTARADAPPYGIDFPTHQATGRFSNGLNIPDIISEHLGAEPALPYLSPELRGEKLLVGANFASAGVGILNDTGIQFVNIIRIGDQLQYFREYQRKLRALVGEPQATQLVNQALVLITLGGNDFVNNYYLVPMSVRSRQYALPDYVRFIVSEYRKILSRLYELGARRVIVTGTGPLGCVPAELALHSQNGECAAELTRAVNLFNPQMVDMVRGINRAIGADVFVTANTYRMNFDYLANPQDFGFTNVQVACCGQGPVQRDRAVHGGVERVRQPRRVRVLGRVPPHGEGKPHHRRPVHARRHGLHAPHEPQHHPRHGPGGPLDYSLISRTRLYVHA

SEQ ID NO: 3916 - protein, 203 aa, Zea mays subsp. mays
  peptide (1)..(203): Ceres Seq. ID no. 12357952
  misc_feature (1)..(124): Pfam Name: GDSL-like Lipase/Acylhydrolase Pfam Description: GDSL-like Lipase/Acylhydrolase
  misc_feature (1)..(123): Homolog of NCBI NO: 15227849 NR Description: putative GDSL-motif lipase/hydrolase
  misc_feature (1)..(11): Homolog of NCBI NO: 37789825 NR Description: putative GDSL-motif lipase [Vitis vinifera]
  misc_feature (1)..(124): Homolog of NCBI NO: 15238814 NR Description: putative protein; protein id: At5g18430.1
  misc_feature (1)..(123): Homolog of NCBI NO: 15235421 NR Description: Proline-rich APG - like protein
  misc_feature (1)..(124): Homolog of NCBI NO: 28071322 NR Description: P0705A05.30 [Oryza sativa (japonica
  misc_feature (1)..(124): Homolog of NCBI NO: 15242808 NR Description: putative protein
  misc_feature (1)..(124): Homolog of NCBI NO: 22758315 NR Description: putative early nodulin gene (Enod) related
  misc_feature (1)..(124): Homolog of NCBI NO: 15229265 NR Description: putative GDSL-motif lipase/acylhydrolase
  misc_feature (1)..(124): Homolog of NCBI NO: 37535146 NR Description: putative early nodulin gene (Enod) related
  misc_feature (1)..(124): Homolog of NCBI NO: 32489520 NR Description: OSJNBa0043L24.11 [Oryza sativa (japonica
MSVRSRQYALPDYVRFIVSEYRKILSRLYELGARRVIVTGTGPLGCVPAELALHSQNGECAAELTRAVNLFNPQMVDMVRGINRAIGADVFVTANTYRMNFDYLANPQDFGFTNVQVACCGQGPVQRDRAVHGGVERVRQPRRVRVLGRVPPHGEGKPHHRRPVHARRHGLHAPHEPQHHPRHGPGGPLDYSLISRTRLYVHA

SEQ ID NO: 3917 - DNA, 1579 bp, Zea mays subsp. mays
  misc_feature (1)..(1579): Ceres Seq. ID no. 12376418
  misc_feature: MA Experiment ID: 20000492 Result: Up-regulated in Transcription
  misc_feature: MA Experiment 20000492 PARAMETER Experiment Name: Zm_Hybrid_Seed_Dev_P Parameter: DAP Value: 12
  misc_feature: MA Experiment 20000492 PARAMETER Experiment Name: Zm_Hybrid_Seed_Dev_P Parameter: Organism Value: Zea mays
  misc_feature: MA Experiment 20000492 PARAMETER Experiment Name: Zm_Hybrid_Seed_Dev_P Parameter: Plant Line Value: 35A19
  misc_feature: MA Experiment 20000492 PARAMETER Experiment Name: Zm_Hybrid_Seed_Dev_P Parameter: Tissue Value: Fert Kernel vs. Unfert Floret
agaaccgaacctcgccgccgccgactcctcttccgtctctctctctatcatctactccttgtctccttccctctaaacccgcacccgcagcagcgccgctagggtttgctcaggccccgaaccccacccttggattgctctgatttcgtggcggctgtttcccgaagtttgcagtatggcggggtacccggaggacaaccagcacgagttgaacgggtacgacgaggaggtcgacgaagaggagggacaccccgggaggcgggtaggccgggatgggggctctgggtacgctgatgctgtcggagaggatgggaggggggcgggtggcgactcgttgggaaagatttttgtcggaggcgttgcttgggagacaactgaagaatcattctccaagcattttgagaagtatggggcaataactgattctgtaattatgaaggacaagcatactaagatgcctcgtggatttggatttgttacattttctgatccatctgttatagacaaggttttggaggatgatcacgttatagatggcagaacggttgaagttaagaggactgtcccgagggaagagatgatcaccaaagacggccctaagacaagaaagatcttcatcggtgggctaccaccatctcttactgaagatgaattgaaggatcacttttcatcatatggtaatgtggttgaacatcagataatgcttgatcatagcactgggcgttctagagggtttggttttgtcacatttgaaagtgaagattctgttgaaagggtcatatcagaggggagaatgcgtgatcttggtgggaagcaggttgaaataaagaaggctgaaccaaagaaacatggatctgaccacagcagtaatgggagatcaaaccacggaggtggagcttaccgcaattcttaccgtagtggtggtggagctggtagtggcagcagtggaggcggcggtggttatgggtatggtggtgcttatcgatctgctgcagcaggttatggatatgatggtggcgcaggagcaggatatggctatggtagagggtatggctatggaggcaatgctggctttgggtctagttttggtggtggttatggtggatccatgtatggaggtgctgcctatggtgcatatggtgcctatggtggtggcgcctatggaggaggtgcctacggaggcggtgcctatggaggtggtgctgcctatggtggcgccccaggtggttatggcactggcggatacggcagttatggcggagcaggtagtactggtggtgggagcacaggtgctcggggttctagcaggtatcatccatacggaaaataagcgacgagtttaaactatttttctgggtctcaggtgttcctcttctcctagaagttcagatttcatggcatgtccatctaaacagtgggcattggaacgtagttgggtctaattaagtcaccgtgagaactgtgtaattgctgcagctgagcctccctgcctgccttgtttgcagtacaagctacacataaaacctgtgttgtattctttagtttggtatatgcagagtttagaaccctgagatcgagc

SEQ ID NO: 3918 - protein, 384 aa, Zea mays subsp. mays
  peptide (1)..(384): Ceres Seq. ID no. 12376419
  misc_feature (146)..(217): Pfam Name: RNA recognition motif. (a.k.a. RRM, RBD, or RNP domain) Pfam Description: RNA recognition motif. (a.k.a. RRM, RBD, or RNP
  misc_feature (52)..(383): Homolog of NCBI NO: 1710626 NR Description: Heterogeneous nuclear ribonucleoprotein A3
  misc_feature (52)..(383): Homolog of NCBI NO: 28374304 NR Description: similar to heterogeneous ribonuclear particle
  misc_feature (42)..(383): Homolog of NCBI NO: 27882514 NR Description: Similar to heterogeneous nuclear
  misc_feature (55)..(134): Homolog of NCBI NO: 37535274 NR Description: putative RNA-binding protein
  misc_feature (140)..(377): Homolog of NCBI NO: 37535274 NR Description: putative RNA-binding protein
  misc_feature (56)..(360): Homolog of NCBI NO: 8778468 NR Description: F1L3.34 [Arabidopsis thaliana]
  misc_feature (7)..(360): Homolog of NCBI NO: 15220810 NR Description: RRM-containing RNA-binding protein, putative
  misc_feature (51)..(384): Homolog of NCBI NO: 30682553 NR Description: RNA recognition motif (RRM)-containing protein
  misc_feature (51)..(384): Homolog of NCBI NO: 35215091 NR Description: putative heterogeneous nuclear ribonucleoprotein
  misc_feature (48)..(379): Homolog of NCBI NO: 15242719 NR Description: RRM-containing RNA-binding protein, putative
MAGYPEDNQHELNGYDEEVDEEEGHPGRRVGRDGGSGYADAVGEDGRGAGGDSLGKIFVGGVAWETTEESFSKHFEKYGAITDSVIMKDKHTKMPRGFGFVTFSDPSVIDKVLEDDHVIDGRTVEVKRTVPREEMITKDGPKTRKIFIGGLPPSLTEDELKDHFSSYGNVVEHQIMLDHSTGRSRGFGFVTFESEDSVERVISEGRMRDLGGKQVEIKKAEPKKHGSDHSSNGRSNHGGGAYRNSYRSGGGAGSGSSGGGGGYGYGGAYRSAAAGYGYDGGAGAGYGYGRGYGYGGNAGFGSSFGGGYGGSMYGGAAYGAYGAYGGGAYGGGAYGGGAYGGGAAYGGAPGGYGTGGYGSYGGAGSTGGGSTGARGSSRYHPYGK

SEQ ID NO: 3919 - protein, 298 aa, Zea mays subsp. mays
  peptide (1)..(298): Ceres Seq. ID no. 12376420
  misc_feature (60)..(131): Pfam Name: RNA recognition motif. (a.k.a. RRM, RBD, or RNP domain) Pfam Description: RNA recognition motif. (a.k.a. RRM, RBD, or RNP
  misc_feature (1)..(297): Homolog of NCBI NO: 1710626 NR Description: Heterogeneous nuclear ribonucleoprotein A3
  misc_feature (1)..(297): Homolog of NCBI NO: 28374304 NR Description: similar to heterogeneous ribonuclear particle
  misc_feature (1)..(297): Homolog of NCBI NO: 27882514 NR Description: Similar to heterogeneous nuclear
  misc_feature (1)..(48): Homolog of NCBI NO: 37535274 NR Description: putative RNA-binding protein
  misc_feature (54)..(291): Homolog of NCBI NO: 37535274 NR Description: putative RNA-binding protein
  misc_feature (1)..(274): Homolog of NCBI NO: 8778468 NR Description: F1L3.34 [Arabidopsis thaliana]
  misc_feature (1)..(274): Homolog of NCBI NO: 15220810 NR Description: RRM-containing RNA-binding protein, putative
  misc_feature (1)..(298): Homolog of NCBI NO: 30682553 NR Description: RNA recognition motif (RRM)-containing protein
  misc_feature (1)..(298): Homolog of NCBI NO: 35215091 NR Description: putative heterogeneous nuclear ribonucleoprotein
  misc_feature (1)..(293): Homolog of NCBI NO: 15242719 NR Description: RRM-containing RNA-binding protein, putative
MKDKHTKMPRGFGFVTFSDPSVIDKVLEDDHVIDGRTVEVKRTVPREEMITKDGPKTRKIFIGGLPPSLTEDELKDHFSSYGNVVEHQIMLDHSTGRSRGFGFVTFESEDSVERVISEGRMRDLGGKQVEIKKAEPKKHGSDHSSNGRSNHGGGAYRNSYRSGGGAGSGSSGGGGGYGYGGAYRSAAAGYGYDGGAGAGYGYGRGYGYGGNAGFGSSFGGGYGGSMYGGAAYGAYGAYGGGAYGGGAYGGGAYGGGAAYGGAPGGYGTGGYGSYGGAGSTGGGSTGARGSSRYHPYGK

SEQ ID NO: 3920 - protein, 291 aa, Zea mays subsp. mays
  peptide (1)..(291): Ceres Seq. ID no. 12376421
  misc_feature (53)..(124): Pfam Name: RNA recognition motif. (a.k.a. RRM, RBD, or RNP domain) Pfam Description: RNA recognition motif. (a.k.a. RRM, RBD, or RNP
  misc_feature (1)..(290): Homolog of NCBI NO: 1710626 NR Description: Heterogeneous nuclear ribonucleoprotein A3
  misc_feature (1)..(290): Homolog of NCBI NO: 28374304 NR Description: similar to heterogeneous ribonuclear particle
  misc_feature (1)..(290): Homolog of NCBI NO: 27882514 NR Description: Similar to heterogeneous nuclear
  misc_feature (1)..(41): Homolog of NCBI NO: 37535274 NR Description: putative RNA-binding protein
  misc_feature (47)..(284): Homolog of NCBI NO: 37535274 NR Description: putative RNA-binding protein
  misc_feature (1)..(267): Homolog of NCBI NO: 8778468 NR Description: F1L3.34 [Arabidopsis thaliana]
  misc_feature (1)..(267): Homolog of NCBI NO: 15220810 NR Description: RRM-containing RNA-binding protein, putative
  misc_feature (1)..(291): Homolog of NCBI NO: 30682553 NR Description: RNA recognition motif (RRM)-containing protein
  misc_feature (1)..(291): Homolog of NCBI NO: 35215091 NR Description: putative heterogeneous nuclear ribonucleoprotein
  misc_feature (1)..(286): Homolog of NCBI NO: 15242719 NR Description: RRM-containing RNA-binding protein, putative
MPRGFGFVTFSDPSVIDKVLEDDHVIDGRTVEVKRTVPREEMITKDGPKTRKIFIGGLPPSLTEDELKDHFSSYGNVVEHQIMLDHSTGRSRGFGFVTFESEDSVERVISEGRMRDLGGKQVEIKKAEPKKHGSDHSSNGRSNHGGGAYRNSYRSGGGAGSGSSGGGGGYGYGGAYRSAAAGYGYDGGAGAGYGYGRGYGYGGNAGFGSSFGGGYGGSMYGGAAYGAYGAYGGGAYGGGAYGGGAYGGGAAYGGAPGGYGTGGYGSYGGAGSTGGGSTGARGSSRYHPYGK

SEQ ID NO: 3921 - DNA, 1494 bp, Zea mays subsp. mays
  misc_feature (1)..(1494): Ceres Seq. ID no. 12566181
  misc_feature: MA Experiment ID: 108528 Result: Up-regulated in Transcription
  misc_feature: MA Experiment 108528 PARAMETER Experiment Name: Zm_Imbibed_Seeds_P Parameter: Age (day) Value: 5 vs. 2
  misc_feature: MA Experiment 108528 PARAMETER Experiment Name: Zm_Imbibed_Seeds_P Parameter: Organism Value: Zea mays
  misc_feature: MA Experiment 108528 PARAMETER Experiment Name: Zm_Imbibed_Seeds_P Parameter: Plant Line Value: 35A19
  misc_feature: MA Experiment 108528 PARAMETER Experiment Name: Zm_Imbibed_Seeds_P Parameter: Tissue Value: Aerial vs. Embryo
  misc_feature: MA Experiment ID: 108529 Result: Down-regulated in Transcription
  misc_feature: MA Experiment 108529 PARAMETER Experiment Name: Zm_Imbibed_Seeds_P Parameter: Age (day) Value: 5 vs. 2
  misc_feature: MA Experiment 108529 PARAMETER Experiment Name: Zm_Imbibed_Seeds_P Parameter: Organism Value: Zea mays
  misc_feature: MA Experiment 108529 PARAMETER Experiment Name: Zm_Imbibed_Seeds_P Parameter: Plant Line Value: 35A19
  misc_feature: MA Experiment 108529 PARAMETER Experiment Name: Zm_Imbibed_Seeds_P Parameter: Tissue Value: Roots vs. Embryo
  misc_feature: MA Experiment ID: 108530 Result: Up-regulated in Transcription
  misc_feature: MA Experiment 108530 PARAMETER Experiment Name: Zm_Imbibed_Seeds_P Parameter: Age (day) Value: 6 vs. 2
  misc_feature: MA Experiment 108530 PARAMETER Experiment Name: Zm_Imbibed_Seeds_P Parameter: Organism Value: Zea mays
  misc_feature: MA Experiment 108530 PARAMETER Experiment Name: Zm_Imbibed_Seeds_P Parameter: Plant Line Value: 35A19
  misc_feature: MA Experiment 108530 PARAMETER Experiment Name: Zm_Imbibed_Seeds_P Parameter: Tissue Value: Aerial vs. Embryo
  misc_feature: MA Experiment ID: 108536 Result: Down-regulated in Transcription
  misc_feature: MA Experiment 108536 PARAMETER Experiment Name: Zm_Meristem_P Parameter: Age (day) Value: 8
  misc_feature: MA Experiment 108536 PARAMETER Experiment Name: Zm_Meristem_P Parameter: Organism Value: Zea mays
  misc_feature: MA Experiment 108536 PARAMETER Experiment Name: Zm_Meristem_P Parameter: Plant Line Value: 35A19
  misc_feature: MA Experiment 108536 PARAMETER Experiment Name: Zm_Meristem_P Parameter: Tissue Value: Shoot Meristem vs. Above Shoot Meristem
  misc_feature: MA Experiment ID: 108543 Result: Up-regulated in Transcription
  misc_feature: MA Experiment ID: 108545 Result: Up-regulated in Transcription
  misc_feature: MA Experiment 108545 PARAMETER Experiment Name: Zm_Imbibed_Seeds_P Parameter: Age (day) Value: 3 vs. 2
  misc_feature: MA Experiment 108545 PARAMETER Experiment Name: Zm_Imbibed_Seeds_P Parameter: Organism Value: Zea mays
  misc_feature: MA Experiment 108545 PARAMETER Experiment Name: Zm_Imbibed_Seeds_P Parameter: Plant Line Value: 35A19
  misc_feature: MA Experiment 108545 PARAMETER Experiment Name: Zm_Imbibed_Seeds_P Parameter: Tissue Value: Aerial vs. Embryo
  misc_feature: MA Experiment ID: 108546 Result: Down-regulated in Transcription
  misc_feature: MA Experiment 108546 PARAMETER Experiment Name: Zm_Imbibed_Seeds_P Parameter: Age (day) Value: 3 vs. 2
  misc_feature: MA Experiment 108546 PARAMETER Experiment Name: Zm_Imbibed_Seeds_P Parameter: Organism Value: Zea mays
  misc_feature: MA Experiment 108546 PARAMETER Experiment Name: Zm_Imbibed_Seeds_P Parameter: Plant Line Value: 35A19
  misc_feature: MA Experiment 108546 PARAMETER Experiment Name: Zm_Imbibed_Seeds_P Parameter: Tissue Value: Roots vs. Embryo
  misc_feature: MA Experiment ID: 108547 Result: Up-regulated in Transcription
  misc_feature: MA Experiment 108547 PARAMETER Experiment Name: Zm_Imbibed_Seeds_P Parameter: Age (day) Value: 4 vs. 2
  misc_feature: MA Experiment 108547 PARAMETER Experiment Name: Zm_Imbibed_Seeds_P Parameter: Organism Value: Zea mays
  misc_feature: MA Experiment 108547 PARAMETER Experiment Name: Zm_Imbibed_Seeds_P Parameter: Plant Line Value: 35A19
  misc_feature: MA Experiment 108547 PARAMETER Experiment Name: Zm_Imbibed_Seeds_P Parameter: Tissue Value: Aerial vs. Embryo
  misc_feature: MA Experiment ID: 108687 Result: Down-regulated in Transcription
  misc_feature: MA Experiment 108687 PARAMETER Experiment Name: Zm_Embryos-Flowers__P Parameter: Tissue Value: Embryo vs. Aerial+
  misc_feature: MA Experiment ID: 108688 Result: Down-regulated in Transcription
  misc_feature: MA Experiment 108688 PARAMETER Experiment Name: Zm_Embryos-Flowers__P Parameter: Tissue Value: Immature Flowers vs. Aerial+
  misc_feature: MA Experiment ID: 20000478 Result: Down-regulated in Transcription
  misc_feature: MA Experiment 20000478 PARAMETER Experiment Name: Zm_5mM_SA_P Parameter: Age (day) Value: 11
  misc_feature: MA Experiment 20000478 PARAMETER Experiment Name: Zm_5mM_SA_P Parameter: Organism Value: Zea mays
  misc_feature: MA Experiment 20000478 PARAMETER Experiment Name: Zm_5mM_SA_P Parameter: Plant Line Value: 35A19
  misc_feature: MA Experiment 20000478 PARAMETER Experiment Name: Zm_5mM_SA_P Parameter: Timepoint (hr) Value: 72
  misc_feature: MA Experiment 20000478 PARAMETER Experiment Name: Zm_5mM_SA_P Parameter: Tissue Value: Aerial
  misc_feature: MA Experiment 20000478 PARAMETER Experiment Name: Zm_5mM_SA_P Parameter: Treatment Value: 5mM SA vs. No Treatment
  misc_feature: MA Experiment ID: 20000492 Result: Down-regulated in Transcription
  misc_feature: MA Experiment 20000492 PARAMETER Experiment Name: Zm_Hybrid_Seed_Dev_P Parameter: DAP Value: 12
  misc_feature: MA Experiment 20000492 PARAMETER Experiment Name: Zm_Hybrid_Seed_Dev_P Parameter: Organism Value: Zea mays
  misc_feature: MA Experiment 20000492 PARAMETER Experiment Name: Zm_Hybrid_Seed_Dev_P Parameter: Plant Line Value: 35A19
  misc_feature: MA Experiment 20000492 PARAMETER Experiment Name: Zm_Hybrid_Seed_Dev_P Parameter: Tissue Value: Fert Kernel vs. Unfert Floret
  misc_feature: MA Experiment ID: 20000633 Result: Up-regulated in Transcription
  misc_feature: MA Experiment 20000633 PARAMETER Experiment Name: Zm_Herbicide-Treatments_P Parameter: Timepoint (hr) Value: 4
  misc_feature: MA Experiment 20000633 PARAMETER Experiment Name: Zm_Herbicide-Treatments_P Parameter: Tissue Value: Aerial
  misc_feature: MA Experiment 20000633 PARAMETER Experiment Name: Zm_Herbicide-Treatments_P Parameter: Treatment Value: Trimec vs. No Treatment
gcacgagaccattacctagaacatcctaatcaaaaaacaagcaacgagagctactagctagctagcagcactgcgggtacgtacccaactactacacattacgtacgtgagctagctagctagcagctagtgatagagaccagatcagctgcagcggcgacgatggctcctgagaagctgaagctgctcgtcggagtgctggccctgcagttccttctggcagggttccacatcgtctccagggcggcgctcaacatgggcatcagcgagatcgtgttcatggtgtacaggaacctcatctccctcgccttgctcgctccgttcgcctacttcctcgagaagaaagacaggccgccactcaccttctctttgctggtggagttcttcctgctagcgctgtgtgggataactgcgaaccagggcttctacctcctgggcctgtatcacctgtcaccaacctacgcctctgcgatacagaacaccgtccccgcgatcaccttcgccatggccgctgtcctcaggctagagcaggtggacctgagcaggaggcatgggctggccaaggtggtgggcacggtggtgagcatcggaggggccaccgtcataaccctgtacaagggcctgccgctgctccatcacagtgatgtgcacgtcaagtcgtctccggtgacgctgtcctcctccagcggcagccccatcctcaactggactctcggctgcgtcttcatcctcggccactgcctctcctggtccggatggatggtccttcaggtgccggtgctgaagaggtacccagccaggctctcggttctgtcactgacctgcatcttcgggctcctccagttcctggccattgccgccttcaccgaggaggacctgagcaggtggaaggtccgctcaggaggggagctcttcaccatcctatacgctggccttgtggcatccggggtagcgtttgctctgcagatctggtgcatcgacaggggaggcccgctcttcaccgccgtcttccagccagtgcagaccgtggccgtcgccgtcatggcttccgccatcctcggggaccagctctacacgggagggatcattggagctgtgctgatcgtcatcggcctctacttcgtgctgtggggcaagagcgccgagaagaagggcgccaggaacctgctgcaggatcagctggcgcagggagcagacgtgacgcggcacctgctcggcggagaagcttcggcgaaagatgaagaagcagccccggccatgctggcgtgatgatcgtttagtcgtctgtcaattggagcacagcgtagtcctgttgcatttgggaccgtatgagtcgtgtgatttcagctgttccaatctggcaaccaagaacaagtgtgcatgggttgccggtgtggaacagtgtgtagccatgctgctgtgagtctgtactctgttgctgtaatgttctgtgcaagcgtaggtaaggtgtataactataaaatcacttcatcc

SEQ ID NO: 3922 - protein, 368 aa, Zea mays subsp. mays
  peptide (1)..(368): Ceres Seq. ID no. 12566182
  misc_feature (17)..(150): Pfam Name: Integral membrane protein DUF6 Pfam Description: Integral membrane protein DUF6
  misc_feature (1)..(358): Homolog of NCBI NO: 38605909 NR Description: OSJNBb0088C09.3 [Oryza sativa (japonica
  misc_feature (12)..(368): Homolog of NCBI NO: 15240683 NR Description: MtN21 nodulin protein-like; protein id:
  misc_feature (20)..(344): Homolog of NCBI NO: 21593130 NR Description: nodulin-like protein [Arabidopsis thaliana]
  misc_feature (3)..(81): Homolog of NCBI NO: 25404978 NR Description: protein F10A5.28 [imported] - Arabidopsis
  misc_feature (142)..(332): Homolog of NCBI NO: 25404978 NR Description: protein F10A5.28 [imported] - Arabidopsis
  misc_feature (3)..(344): Homolog of NCBI NO: 18409794 NR Description: putative protein
  misc_feature (4)..(362): Homolog of NCBI NO: 15229596 NR Description: integral membrane protein, putative; protein id:
  misc_feature (1)..(362): Homolog of NCBI NO: 9294076 NR Description: nodulin-like protein [Arabidopsis thaliana]
  misc_feature (3)..(332): Homolog of NCBI NO: 18410867 NR Description: nodulin-like protein
  misc_feature (1)..(363): Homolog of NCBI NO: 34895316 NR Description: putative nodulin [Oryza sativa (japonica
MAPEKLKLLVGVLALQFLLAGFHIVSRAALNMGISEIVFMVYRNLISLALLAPFAYFLEKKDRPPLTFSLLVEFFLLALCGITANQGFYLLGLYHLSPTYASAIQNTVPAITFAMAAVLRLEQVDLSRRHGLAKVVGTVVSIGGATVITLYKGLPLLHHSDVHVKSSPVTLSSSSGSPILNWTLGCVFILGHCLSWSGWMVLQVPVLKRYPARLSVLSLTCIFGLLQFLAIAAFTEEDLSRWKVRSGGELFTILYAGLVASGVAFALQIWCIDRGGPLFTAVFQPVQTVAVAVMASAILGDQLYTGGIIGAVLIVIGLYFVLWGKSAEKKGARNLLQDQLAQGADVTRHLLGGEASAKDEEAAPAMLA

SEQ ID NO: 3923 - protein, 337 aa, Zea mays subsp. mays
  peptide (1)..(337): Ceres Seq. ID no. 12566183
  misc_feature (1)..(119): Pfam Name: Integral membrane protein DUF6 Pfam Description: Integral membrane protein DUF6
  misc_feature (1)..(327): Homolog of NCBI NO: 38605909 NR Description: OSJNBb0088C09.3 [Oryza sativa (japonica
  misc_feature (1)..(337): Homolog of NCBI NO: 15240683 NR Description: MtN21 nodulin protein-like; protein id:
  misc_feature (1)..(313): Homolog of NCBI NO: 21593130 NR Description: nodulin-like protein [Arabidopsis thaliana]
  misc_feature (1)..(50): Homolog of NCBI NO: 25404978 NR Description: protein F10A5.28 [imported] - Arabidopsis
  misc_feature (111)..(301): Homolog of NCBI NO: 25404978 NR Description: protein F10A5.28 [imported] - Arabidopsis
  misc_feature (1)..(313): Homolog of NCBI NO: 18409794 NR Description: putative protein
  misc_feature (1)..(331): Homolog of NCBI NO: 15229596 NR Description: integral membrane protein, putative; protein id:
  misc_feature (1)..(331): Homolog of NCBI NO: 9294076 NR Description: nodulin-like protein [Arabidopsis thaliana]
  misc_feature (1)..(301): Homolog of NCBI NO: 18410867 NR Description: nodulin-like protein
  misc_feature (1)..(332): Homolog of NCBI NO: 34895316 NR Description: putative nodulin [Oryza sativa (japonica
MGISEIVFMVYRNLISLALLAPFAYFLEKKDRPPLTFSLLVEFFLLALCGITANQGFYLLGLYHLSPTYASAIQNTVPAITFAMAAVLRLEQVDLSRRHGLAKVVGTVVSIGGATVITLYKGLPLLHHSDVHVKSSPVTLSSSSGSPILNWTLGCVFILGHCLSWSGWMVLQVPVLKRYPARLSVLSLTCIFGLLQFLAIAAFTEEDLSRWKVRSGGELFTILYAGLVASGVAFALQIWCIDRGGPLFTAVFQPVQTVAVAVMASAILGDQLYTGGIIGAVLIVIGLYFVLWGKSAEKKGARNLLQDQLAQGADVTRHLLGGEASAKDEEAAPAMLA

SEQ ID NO: 3924 - protein, 329 aa, Zea mays subsp. mays
  peptide (1)..(329): Ceres Seq. ID no. 12566184
  misc_feature (1)..(111): Pfam Name: Integral membrane protein DUF6 Pfam Description: Integral membrane protein DUF6
  misc_feature (1)..(319): Homolog of NCBI NO: 38605909 NR Description: OSJNBb0088C09.3 [Oryza sativa (japonica
  misc_feature (1)..(329): Homolog of NCBI NO: 15240683 NR Description: MtN21 nodulin protein-like; protein id:
  misc_feature (1)..(305): Homolog of NCBI NO: 21593130 NR Description: nodulin-like protein [Arabidopsis thaliana]
  misc_feature (1)..(42): Homolog of NCBI NO: 25404978 NR Description: protein F10A5.28 [imported] - Arabidopsis
  misc_feature (103)..(293): Homolog of NCBI NO: 25404978 NR Description: protein F10A5.28 [imported] - Arabidopsis
  misc_feature (1)..(305): Homolog of NCBI NO: 18409794 NR Description: putative protein
  misc_feature (1)..(323): Homolog of NCBI NO: 15229596 NR Description: integral membrane protein, putative; protein id:
  misc_feature (1)..(323): Homolog of NCBI NO: 9294076 NR Description: nodulin-like protein [Arabidopsis thaliana]
  misc_feature (1)..(293): Homolog of NCBI NO: 18410867 NR Description: nodulin-like protein
  misc_feature (1)..(324): Homolog of NCBI NO: 34895316 NR Description: putative nodulin [Oryza sativa (japonica
MVYRNLISLALLAPFAYFLEKKDRPPLTFSLLVEFFLLALCGITANQGFYLLGLYHLSPTYASAIQNTVPAITFAMAAVLRLEQVDLSRRHGLAKVVGTVVSIGGATVITLYKGLPLLHHSDVHVKSSPVTLSSSSGSPILNWTLGCVFILGHCLSWSGWMVLQVPVLKRYPARLSVLSLTCIFGLLQFLAIAAFTEEDLSRWKVRSGGELFTILYAGLVASGVAFALQIWCIDRGGPLFTAVFQPVQTVAVAVMASAILGDQLYTGGIIGAVLIVIGLYFVLWGKSAEKKGARNLLQDQLAQGADVTRHLLGGEASAKDEEAAPAMLA

SEQ ID NO: 3925 - DNA, 1592 bp, Zea mays subsp. mays
  misc_feature (1)..(1592): Ceres Seq. ID no. 12345312
  misc_feature: MA Experiment ID: 108528 Result: Down-regulated in Transcription
  misc_feature: MA Experiment 108528 PARAMETER Experiment Name: Zm_Imbibed_Seeds_P Parameter: Age (day) Value: 5 vs. 2
  misc_feature: MA Experiment 108528 PARAMETER Experiment Name: Zm_Imbibed_Seeds_P Parameter: Organism Value: Zea mays
  misc_feature: MA Experiment 108528 PARAMETER Experiment Name: Zm_Imbibed_Seeds_P Parameter: Plant Line Value: 35A19
  misc_feature: MA Experiment 108528 PARAMETER Experiment Name: Zm_Imbibed_Seeds_P Parameter: Tissue Value: Aerial vs. Embryo
  misc_feature: MA Experiment ID: 108530 Result: Down-regulated in Transcription
  misc_feature: MA Experiment 108530 PARAMETER Experiment Name: Zm_Imbibed_Seeds_P Parameter: Age (day) Value: 6 vs. 2
  misc_feature: MA Experiment 108530 PARAMETER Experiment Name: Zm_Imbibed_Seeds_P Parameter: Organism Value: Zea mays
  misc_feature: MA Experiment 108530 PARAMETER Experiment Name: Zm_Imbibed_Seeds_P Parameter: Plant Line Value: 35A19
  misc_feature: MA Experiment 108530 PARAMETER Experiment Name: Zm_Imbibed_Seeds_P Parameter: Tissue Value: Aerial vs. Embryo
  misc_feature: MA Experiment ID: 108535 Result: Up-regulated in Transcription
  misc_feature: MA Experiment 108535 PARAMETER Experiment Name: Zm_Meristem_P Parameter: Age (day) Value: 8
  misc_feature: MA Experiment 108535 PARAMETER Experiment Name: Zm_Meristem_P Parameter: Organism Value: Zea mays
  misc_feature: MA Experiment 108535 PARAMETER Experiment Name: Zm_Meristem_P Parameter: Plant Line Value: 35A19
  misc_feature: MA Experiment 108535 PARAMETER Experiment Name: Zm_Meristem_P Parameter: Tissue Value: Root Meristem vs. Above Root Meristem
  misc_feature: MA Experiment ID: 108547 Result: Down-regulated in Transcription
  misc_feature: MA Experiment 108547 PARAMETER Experiment Name: Zm_Imbibed_Seeds_P Parameter: Age (day) Value: 4 vs. 2
  misc_feature: MA Experiment 108547 PARAMETER Experiment Name: Zm_Imbibed_Seeds_P Parameter: Organism Value: Zea mays
  misc_feature: MA Experiment 108547 PARAMETER Experiment Name: Zm_Imbibed_Seeds_P Parameter: Plant Line Value: 35A19
  misc_feature: MA Experiment 108547 PARAMETER Experiment Name: Zm_Imbibed_Seeds_P Parameter: Tissue Value: Aerial vs. Embryo
  misc_feature: MA Experiment ID: 20000108 Result: Up-regulated in Transcription
  misc_feature: MA Experiment 20000108 PARAMETER Experiment Name: Zm_Root-Tips_P Parameter: Age (day) Value: 12
  misc_feature: MA Experiment 20000108 PARAMETER Experiment Name: Zm_Root-Tips_P Parameter: Organism Value: Zea mays
  misc_feature: MA Experiment 20000108 PARAMETER Experiment Name: Zm_Root-Tips_P Parameter: Tissue Value: Root tips vs. Root mid region    35
  misc_feature: MA Experiment 20000108 PARAMETER Experiment Name: Zm_Root-Tips_P Parameter: Tissue Value: Root tips vs. Root mid region   Sequence Listing-Misc Features (4)
gtcgctgcctgctctgcttgctgcgccactccaaacccaacccaaaacccccacacgagatctgcgcagcaatggcgacgcggtgccacgtcctgctcctcctcgccgccgccttcgcgtccctcctcgcgctcgtggccgcggaagggggcgaagaggggccccgcgggcgccggctgctcgtcctcctggacgacctggccgtgcggtcgtcgcactcggccttcttcggctcgctccaggcgcgtgggttcgatctcgacttccgcctcgctgacgatccaaagctctcgctccaccgctacggccagtacctctacgacggcctcgtgctcttcgccccctccacaccacgttttggtggatcagtggaccagaacgcagtcctcgaatttattgatgctgggcatgacatgatcctggcggcagattcctctgcctctgatctcattcgtggcattgcaacagagtgtggggttgattttgatgaggatccagaggcaatggttattgaccatatgaactatgccgtcacagatgttgaaggtgatcacaccttgattgctggtgacgatcttatccattcggatgtgatactagggtctgaaaagattgaggctcctgtattgtttcgaggaattggacacatggctaatccatcaaacagtttggttctgaaggttctatcagcctctccatcagcatattcagctaatccaaagactaagttagcgtctcctccatcgctcactgggtcagctatatcattggtttcggttatgcaggcaagaaataatgctcgggtgctgttatctggatcactcgatctgtttagcaaccggttcctgaagtctggtgttcaaaaggctgatagcaaaacaagatatgagagagctggaaacgagcaatttgtggcagagataagcaaatgggttttccatgagaggggacatctaaaggctgttaatgttaggcatcacaaggttggggagaccaatgaaccaggcatgtaccgcattaatgatgacctggaatactctgttgagatctatgaatggtccggaacaagctggaagccgtatgttgctgatgatgtgcagcttcaatttttcatgatgagcccttacgttctgaaaactatgtcgactgacaacaagggtttgtattcaacaaccttcaaagttccagatgtttatggagttttccagttcaaagttgagtaccaaagactgggatatactggtctgtcttttacaaagcagattccagtacgtccttacagacataatgagtatgagagattcataacatcagcgtacccatactacaccgcctcattttcaacaatgggtgctttcttcgtattctcgtttgtgtacctgtaccacaaataaaggactcatgggagcgcacaagtctctggaggctgacgtgaccaagatctgtgggcactgaatgttgtgctataagccaagagttacccggcgccaattttatggaaccatgtttttgtactgccaacttagataacatttgacgaccgtgaccgcactcatgggaaatttactcgtgctaggatgttcgatctgccg

SEQ ID NO: 3926 - protein, 463 aa, Zea mays subsp. mays
  peptide (1)..(463): Ceres Seq. ID no. 12345313
  misc_feature (41)..(463): Pfam Name: Dolichyl-diphosphooligosaccharide-protein Pfam Description: Dolichyl-diphosphooligosaccharide-protein
  misc_feature (56)..(463): Homolog of NCBI NO: 627424 NR Description: dolichyl-diphosphooligosaccharide-protein
  misc_feature (56)..(463): Homolog of NCBI NO: 1581615 NR Description: oligosaccharyltransferase
  misc_feature (36)..(463): Homolog of NCBI NO: 30584753 NR Description: Homo sapiens
  misc_feature (36)..(463): Homolog of NCBI NO: 21104416 NR Description: dolichyl-diphosphooligosaccharide-protein
  misc_feature (36)..(463): Homolog of NCBI NO: 20070197 NR Description: dolichyl-diphosphooligosaccharide-protein
  misc_feature (41)..(463): Homolog of NCBI NO: 8843726 NR Description: dolichyl-di-phosphooligosaccharide-protein
  misc_feature (41)..(463): Homolog of NCBI NO: 14334506 NR Description: putative
  misc_feature (41)..(463): Homolog of NCBI NO: 21553942 NR Description: dolichyl-di-phosphooligosaccharide-protein
  misc_feature (41)..(463): Homolog of NCBI NO: 18425101 NR Description: dolichyl-di-phosphooligosaccharide-protein
  misc_feature (24)..(463): Homolog of NCBI NO: 38175467 NR Description: putative dolichyl-di-phosphooligosaccharide-
RCLLCLLRHSKPNPKPPHEICAAMATRCHVLLLLAAAFASLLALVAAEGGEEGPRGRRLLVLLDDLAVRSSHSAFFGSLQARGFDLDFRLADDPKLSLHRYGQYLYDGLVLFAPSTPRFGGSVDQNAVLEFIDAGHDMILAADSSASDLIRGIATECGVDFDEDPEAMVIDHMNYAVTDVEGDHTLIAGDDLIHSDVILGSEKIEAPVLFRGIGHMANPSNSLVLKVLSASPSAYSANPKTKLASPPSLTGSAISLVSVMQARNNARVLLSGSLDLFSNRFLKSGVQKADSKTRYERAGNEQFVAEISKWVFHERGHLKAVNVRHHKVGETNEPGMYRINDDLEYSVEIYEWSGTSWKPYVADDVQLQFFMMSPYVLKTMSTDNKGLYSTTFKVPDVYGVFQFKVEYQRLGYTGLSFTKQIPVRPYRHNEYERFITSAYPYYTASFSTMGAFFVFSFVYLYHK

SEQ ID NO: 3927 - protein, 440 aa, Zea mays subsp. mays
  peptide (1)..(440): Ceres Seq. ID no. 12345314
  misc_feature (18)..(440): Pfam Name: Dolichyl-diphosphooligosaccharide-protein Pfam Description: Dolichyl-diphosphooligosaccharide-protein
  misc_feature (33)..(440): Homolog of NCBI NO: 627424 NR Description: dolichyl-diphosphooligosaccharide-protein
  misc_feature (33)..(440): Homolog of NCBI NO: 1581615 NR Description: oligosaccharyltransferase
  misc_feature (13)..(440): Homolog of NCBI NO: 30584753 NR Description: Homo sapiens
  misc_feature (13)..(440): Homolog of NCBI NO: 21104416 NR Description: dolichyl-diphosphooligosaccharide-protein
  misc_feature (13)..(440): Homolog of NCBI NO: 20070197 NR Description: dolichyl-diphosphooligosaccharide-protein
  misc_feature (18)..(440): Homolog of NCBI NO: 8843726 NR Description: dolichyl-di-phosphooligosaccharide-protein
  misc_feature (18)..(440): Homolog of NCBI NO: 14334506 NR Description: putative
  misc_feature (18)..(440): Homolog of NCBI NO: 21553942 NR Description: dolichyl-di-phosphooligosaccharide-protein
  misc_feature (18)..(440): Homolog of NCBI NO: 18425101 NR Description: dolichyl-di-phosphooligosaccharide-protein
  misc_feature (1)..(440): Homolog of NCBI NO: 38175467 NR Description: putative dolichyl-di-phosphooligosaccharide-
MATRCHVLLLLAAAFASLLALVAAEGGEEGPRGRRLLVLLDDLAVRSSHSAFFGSLQARGFDLDFRLADDPKLSLHRYGQYLYDGLVLFAPSTPRFGGSVDQNAVLEFIDAGHDMILAADSSASDLIRGIATECGVDFDEDPEAMVIDHMNYAVTDVEGDHTLIAGDDLIHSDVILGSEKIEAPVLFRGIGHMANPSNSLVLKVLSASPSAYSANPKTKLASPPSLTGSAISLVSVMQARNNARVLLSGSLDLFSNRFLKSGVQKADSKTRYERAGNEQFVAEISKWVFHERGHLKAVNVRHHKVGETNEPGMYRINDDLEYSVEIYEWSGTSWKPYVADDVQLQFFMMSPYVLKTMSTDNKGLYSTTFKVPDVYGVFQFKVEYQRLGYTGLSFTKQIPVRPYRHNEYERFITSAYPYYTASFSTMGAFFVFSFVYLYHK

SEQ ID NO: 3928 - protein, 326 aa, Zea mays subsp. mays
  peptide (1)..(326): Ceres Seq. ID no. 12345315
  misc_feature (1)..(326): Pfam Name: Dolichyl-diphosphooligosaccharide-protein Pfam Description: Dolichyl-diphosphooligosaccharide-protein
  misc_feature (1)..(326): Homolog of NCBI NO: 18425101 NR Description: dolichyl-di-phosphooligosaccharide-protein
  misc_feature (1)..(326): Homolog of NCBI NO: 627424 NR Description: dolichyl-diphosphooligosaccharide-protein
  misc_feature (1)..(326): Homolog of NCBI NO: 30584753 NR Description: Homo sapiens
  misc_feature (1)..(326): Homolog of NCBI NO: 20070197 NR Description: dolichyl-diphosphooligosaccharide-protein
  misc_feature (1)..(326): Homolog of NCBI NO: 14334506 NR Description: putative
  misc_feature (1)..(326): Homolog of NCBI NO: 21553942 NR Description: dolichyl-di-phosphooligosaccharide-protein
  misc_feature (1)..(326): Homolog of NCBI NO: 8843726 NR Description: dolichyl-di-phosphooligosaccharide-protein
  misc_feature (1)..(326): Homolog of NCBI NO: 21104416 NR Description: dolichyl-diphosphooligosaccharide-protein
  misc_feature (1)..(326): Homolog of NCBI NO: 1581615 NR Description: oligosaccharyltransferase
  misc_feature (1)..(326): Homolog of NCBI NO: 38175467 NR Description: putative dolichyl-di-phosphooligosaccharide-
MILAADSSASDLIRGIATECGVDFDEDPEAMVIDHMNYAVTDVEGDHTLIAGDDLIHSDVILGSEKIEAPVLFRGIGHMANPSNSLVLKVLSASPSAYSANPKTKLASPPSLTGSAISLVSVMQARNNARVLLSGSLDLFSNRFLKSGVQKADSKTRYERAGNEQFVAEISKWVFHERGHLKAVNVRHHKVGETNEPGMYRINDDLEYSVEIYEWSGTSWKPYVADDVQLQFFMMSPYVLKTMSTDNKGLYSTTFKVPDVYGVFQFKVEYQRLGYTGLSFTKQIPVRPYRHNEYERFITSAYPYYTASFSTMGAFFVFSFVYLYHK

SEQ ID NO: 3929 - DNA, 1252 bp, Zea mays subsp. mays
  misc_feature (1)..(1252): Ceres Seq. ID no. 12577727
  misc_feature: MA Experiment ID: 108544 Result: Up-regulated in Transcription
gcacgagaccattacctagaacatcctaatcgaaaaatcgaattcctcgtcaccaacacgcacgcggcctctgcctccgcgatccgcgtctccatcctgaggctccgaatcgatctcccttcctcaccaaaccggagcacttcggaggccggacccggcgagaagcgaccgaccgcagccagctcacgtctccctcttcatccaccatgctgagggtcgcgggcaggcgcctctcgtccgctctcgcctggcgccccgccgccgccgcctcaggctcccggggccctctcgccggtacactacccggccgcgacgacgacgacacacgcgactgcagggcgcgtttcgccatcgaatctcccttcttcgccgctgccagagggttttctgcagagactcttgctccaagaaaccaggatgtgggcttatccgagctcccagcaactgtggcagctgtgaagaatccaagtggaaaaatcgtgtatgatgagtataaccatgagcgctacccgcctggagaccccagcaagcgtgcatttgcctactttgtgctgagtggtgggaggttcatttacgcatctttgctgcgacttctcgtcttaaaatttgtcctgagcatgtcagcaagtaaggatgttctcgcgcttgcctcacttgaggttgacctctcaagcattgagcctggaaccacggtgacggtgaagtggcgtggcaagccggtcttcataaggcggaggacagaggatgatatcaagttggccaacagtgttgacgtcgcatccctccgccacccagagcaggatgcagagcgtgtcaagaaccccgaatggctggtcgtcattggggtctgcactcacctgggctgcatcccgctccctaatgcaggagactttggtggctggttctgcccgtgccacggctcgcactacgacatttctggtaggatccgcaagggcccggcacccttcaacctggaagtgccgacatacagcttcttggaagagaacaagcttctcatcggctgagattgctgttagtgttgttcgtgtggccctgtcgtttttgtttgatcaacaacttcaccttttctcttgcctgggttagggcatacctttgtgggttgtttctgagtgcagtgttgttgctagcacctgacagtaatgaataacctgctgctacataaaggatactgttaattgttgtcaaatttggttctgtttttttcctgacagcaatgaacaaacttctgctg

SEQ ID NO: 3930 - protein, 272 aa, Zea mays subsp. mays; identical to SEQ ID NO: 3119
  peptide (1)..(272): Ceres Seq. ID no. 12577728
  misc_feature (172)..(268): Pfam Name: Rieske [2Fe-2S] domain Pfam Description: Rieske [2Fe-2S] domain
  misc_feature (1)..(272): Homolog of NCBI NO: 21553507 NR Description: ubiquinol--cytochrome-c reductase-like protein
  misc_feature (1)..(272): Homolog of NCBI NO: 18417067 NR Description: ubiquinol--cytochrome-c reductase - like protein
  misc_feature (15)..(272): Homolog of NCBI NO: 1717949 NR Description: Ubiquinol-cytochrome C reductase iron-sulfur
  misc_feature (1)..(272): Homolog of NCBI NO: 586145 NR Description: Ubiquinol-cytochrome C reductase iron-sulfur
  misc_feature (1)..(272): Homolog of NCBI NO: 1076675 NR Description: ubiquinol-cytochrome-c reductase (EC 1.10.2.2)
  misc_feature (1)..(272): Homolog of NCBI NO: 1717950 NR Description: Ubiquinol-cytochrome C reductase iron-sulfur
  misc_feature (1)..(272): Homolog of NCBI NO: 1717953 NR Description: Ubiquinol-cytochrome C reductase iron-sulfur
  misc_feature (1)..(272): Homolog of NCBI NO: 1717951 NR Description: Ubiquinol-cytochrome C reductase iron-sulfur
  misc_feature (1)..(272): Homolog of NCBI NO: 38347166 NR Description: OSJNBa0039C07.12 [Oryza sativa (japonica
  misc_feature (1)..(272): Homolog of NCBI NO: 1717957 NR Description: Ubiquinol-cytochrome C reductase iron-sulfur

SEQ ID NO: 3931 - DNA, 909 bp, Zea mays subsp. mays
  misc_feature (1)..(909): Ceres Seq. ID no. 12403151
  misc_feature: MA Experiment ID: 108523 Result: Down-regulated in Transcription
  misc_feature: MA Experiment 108523 PARAMETER Experiment Name: Zm_42deg_Heat_P Parameter: Age (day) Value: 8
  misc_feature: MA Experiment 108523 PARAMETER Experiment Name: Zm_42deg_Heat_P Parameter: Organism Value: Zea mays
  misc_feature: MA Experiment 108523 PARAMETER Experiment Name: Zm_42deg_Heat_P Parameter: Plant Line Value: 35A19
  misc_feature: MA Experiment 108523 PARAMETER Experiment Name: Zm_42deg_Heat_P Parameter: Temperature (deg C) Value: 42 vs. 22
  misc_feature: MA Experiment 108523 PARAMETER Experiment Name: Zm_42deg_Heat_P Parameter: Timepoint (hr) Value: 6
  misc_feature: MA Experiment 108523 PARAMETER Experiment Name: Zm_42deg_Heat_P Parameter: Tissue Value: Aerial
  misc_feature: MA Experiment ID: 108527 Result: Down-regulated in Transcription
  misc_feature: MA Experiment 108527 PARAMETER Experiment Name: Zm_5mM_NO_P Parameter: Age (day) Value: 8
  misc_feature: MA Experiment 108527 PARAMETER Experiment Name: Zm_5mM_NO_P Parameter: Organism Value: Zea mays
  misc_feature: MA Experiment 108527 PARAMETER Experiment Name: Zm_5mM_NO_P Parameter: Plant Line Value: 35A19
  misc_feature: MA Experiment 108527 PARAMETER Experiment Name: Zm_5mM_NO_P Parameter: Timepoint (hr) Value: 6
  misc_feature: MA Experiment 108527 PARAMETER Experiment Name: Zm_5mM_NO_P Parameter: Tissue Value: Aerial
  misc_feature: MA Experiment 108527 PARAMETER Experiment Name: Zm_5mM_NO_P Parameter: Treatment Value: 5mM NO vs. No Treatment
  misc_feature: MA Experiment ID: 108528 Result: Up-regulated in Transcription
  misc_feature: MA Experiment 108528 PARAMETER Experiment Name: Zm_Imbibed_Seeds_P Parameter: Age (day) Value: 5 vs. 2
  misc_feature: MA Experiment 108528 PARAMETER Experiment Name: Zm_Imbibed_Seeds_P Parameter: Organism Value: Zea mays
  misc_feature: MA Experiment 108528 PARAMETER Experiment Name: Zm_Imbibed_Seeds_P Parameter: Plant Line Value: 35A19
  misc_feature: MA Experiment 108528 PARAMETER Experiment Name: Zm_Imbibed_Seeds_P Parameter: Tissue Value: Aerial vs. Embryo
  misc_feature: MA Experiment ID: 108529 Result: Down-regulated in Transcription
  misc_feature: MA Experiment 108529 PARAMETER Experiment Name: Zm_Imbibed_Seeds_P Parameter: Age (day) Value: 5 vs. 2
  misc_feature: MA Experiment 108529 PARAMETER Experiment Name: Zm_Imbibed_Seeds_P Parameter: Organism Value: Zea mays
  misc_feature: MA Experiment 108529 PARAMETER Experiment Name: Zm_Imbibed_Seeds_P Parameter: Plant Line Value: 35A19
  misc_feature: MA Experiment 108529 PARAMETER Experiment Name: Zm_Imbibed_Seeds_P Parameter: Tissue Value: Roots vs. Embryo
  misc_feature: MA Experiment ID: 108530 Result: Up-regulated in Transcription
  misc_feature: MA Experiment 108530 PARAMETER Experiment Name: Zm_Imbibed_Seeds_P Parameter: Age (day) Value: 6 vs. 2
  misc_feature: MA Experiment 108530 PARAMETER Experiment Name: Zm_Imbibed_Seeds_P Parameter: Organism Value: Zea mays
  misc_feature: MA Experiment 108530 PARAMETER Experiment Name: Zm_Imbibed_Seeds_P Parameter: Plant Line Value: 35A19
  misc_feature: MA Experiment 108530 PARAMETER Experiment Name: Zm_Imbibed_Seeds_P Parameter: Tissue Value: Aerial vs. Embryo
  misc_feature: MA Experiment ID: 108536 Result: Down-regulated in Transcription
  misc_feature: MA Experiment 108536 PARAMETER Experiment Name: Zm_Meristem_P Parameter: Age (day) Value: 8
  misc_feature: MA Experiment 108536 PARAMETER Experiment Name: Zm_Meristem_P Parameter: Organism Value: Zea mays
  misc_feature: MA Experiment 108536 PARAMETER Experiment Name: Zm_Meristem_P Parameter: Plant Line Value: 35A19
  misc_feature: MA Experiment 108536 PARAMETER Experiment Name: Zm_Meristem_P Parameter: Tissue Value: Shoot Meristem vs. Above Shoot Meristem
  misc_feature: MA Experiment ID: 108544 Result: Up-regulated in Transcription
  misc_feature: MA Experiment ID: 108545 Result: Up-regulated in Transcription
  misc_feature: MA Experiment 108545 PARAMETER Experiment Name: Zm_Imbibed_Seeds_P Parameter: Age (day) Value: 3 vs. 2
  misc_feature: MA Experiment 108545 PARAMETER Experiment Name: Zm_Imbibed_Seeds_P Parameter: Organism Value: Zea mays
  misc_feature: MA Experiment 108545 PARAMETER Experiment Name: Zm_Imbibed_Seeds_P Parameter: Plant Line Value: 35A19
  misc_feature: MA Experiment 108545 PARAMETER Experiment Name: Zm_Imbibed_Seeds_P Parameter: Tissue Value: Aerial vs. Embryo
  misc_feature: MA Experiment ID: 108546 Result: Down-regulated in Transcription
  misc_feature: MA Experiment 108546 PARAMETER Experiment Name: Zm_Imbibed_Seeds_P Parameter: Age (day) Value: 3 vs. 2
  misc_feature: MA Experiment 108546 PARAMETER Experiment Name: Zm_Imbibed_Seeds_P Parameter: Organism Value: Zea mays
  misc_feature: MA Experiment 108546 PARAMETER Experiment Name: Zm_Imbibed_Seeds_P Parameter: Plant Line Value: 35A19
  misc_feature: MA Experiment 108546 PARAMETER Experiment Name: Zm_Imbibed_Seeds_P Parameter: Tissue Value: Roots vs. Embryo
  misc_feature: MA Experiment ID: 108547 Result: Up-regulated in Transcription
  misc_feature: MA Experiment 108547 PARAMETER Experiment Name: Zm_Imbibed_Seeds_P Parameter: Age (day) Value: 4 vs. 2
  misc_feature: MA Experiment 108547 PARAMETER Experiment Name: Zm_Imbibed_Seeds_P Parameter: Organism Value: Zea mays
  misc_feature: MA Experiment 108547 PARAMETER Experiment Name: Zm_Imbibed_Seeds_P Parameter: Plant Line Value: 35A19
  misc_feature: MA Experiment 108547 PARAMETER Experiment Name: Zm_Imbibed_Seeds_P Parameter: Tissue Value: Aerial vs. Embryo
  misc_feature: MA Experiment ID: 108559 Result: Down-regulated in Transcription
  misc_feature: MA Experiment 108559 PARAMETER Experiment Name: Zm_5mM_NO_P Parameter: Age (day) Value: 8
  misc_feature: MA Experiment 108559 PARAMETER Experiment Name: Zm_5mM_NO_P Parameter: Organism Value: Zea mays
  misc_feature: MA Experiment 108559 PARAMETER Experiment Name: Zm_5mM_NO_P Parameter: Plant Line Value: 35A19
  misc_feature: MA Experiment 108559 PARAMETER Experiment Name: Zm_5mM_NO_P Parameter: Timepoint (hr) Value: 12
  misc_feature: MA Experiment 108559 PARAMETER Experiment Name: Zm_5mM_NO_P Parameter: Tissue Value: Aerial
  misc_feature: MA Experiment 108559 PARAMETER Experiment Name: Zm_5mM_NO_P Parameter: Treatment Value: 5mM NO vs. No Treatment
  misc_feature: MA Experiment ID: 108687 Result: Down-regulated in Transcription
  misc_feature: MA Experiment 108687 PARAMETER Experiment Name: Zm_Embryos-Flowers__P Parameter: Tissue Value: Embryo vs. Aerial+
  misc_feature: MA Experiment ID: 108688 Result: Down-regulated in Transcription
  misc_feature: MA Experiment 108688 PARAMETER Experiment Name: Zm_Embryos-Flowers__P Parameter: Tissue Value: Immature Flowers vs. Aerial+
ctccgctccgcagctcatggcttcctcggtctccctccgtggcgccatcctccagcgcccccacctcaggccccgccccgacgcccgccgcgcgcccacgacgaggcgccgcgccgtgcctgcaaagatctgctgcatcggatgggaaccccgagggcatcctgggcgcgccgcagggcggccacatcgcgcgcctcgagttccgccgccgcctcgagagggactccgaggcgcgcgaggacttcgagcgccaggtgcgcgaggagaaggagcggcggcgcagcgagcgcgaggcgcgggtgatcccggacacggacgccggcctcgtcgagttcttcctcgacaccgacgcgcgcgagatcgagatcgagatcggcaggctgcggcccaggctcagccaggacttcttcggccacgtctcgcgcgagatagcgcagatcaaatttgcagtcaccaggacagcggagatggaagacagactgatcgagctggaggcgatgcagaaggttcttctcgagggagttgaggcgtacgacaagttgcagaacgaccttgttacagcgaaagaacggctcatgaagattctgcagtcaagtgacagaaaatcgacactgctggaaatggtggagcggaacgagctcaatatatccatactaacacttctcgatgagaacattgcgagcgcgaagacgagtaatcaggatgaggcggccgctttcatggaggacgtgagatcatctcttgtgaaatatataacaatatagatctgggacgcttttacataccaatggttcgttcattgcttgggcatggtttgatcgtttttagaagtgtggttgctgttcgttcattgtgaaatatataacaatataaatctggattatttccgcctgtttgtagttgggctgc

SEQ ID NO: 3932 - protein, 253 aa, Zea mays subsp. mays
  peptide (1)..(253): Ceres Seq. ID no. 12403152
  misc_feature (98)..(253): Homolog of NCBI NO: 25373192 NR Description: protein F23N19.15 [imported] - Arabidopsis
  misc_feature (49)..(253): Homolog of NCBI NO: 15221583 NR Description: unknown protein
  misc_feature (17)..(253): Homolog of NCBI NO: 29368099 NR Description: unknown [Oryza sativa (japonica cultivar-group)]
PLRSSWLPRSPSVAPSSSAPTSGPAPTPAARPRRGAAPCLQRSAASDGNPEGILGAPQGGHIARLEFRRRLERDSEAREDFERQVREEKERRRSEREARVIPDTDAGLVEFFLDTDAREIEIEIGRLRPRLSQDFFGHVSREIAQIKFAVTRTAEMEDRLIELEAMQKVLLEGVEAYDKLQNDLVTAKERLMKILQSSDRKSTLLEMVERNELNISILTLLDENIASAKTSNQDEAAAFMEDVRSSLVKYITI

SEQ ID NO: 3933 - protein, 174 aa, Zea mays subsp. mays
  peptide (1)..(174): Ceres Seq. ID no. 12403153
SAPQLMASSVSLRGAILQRPHLRPRPDARRAPTTRRRAVPAKICCIGWEPRGHPGRAAGRPHRAPRVPPPPREGLRGARGLRAPGARGEGAAAQRARGAGDPGHGRRPRRVLPRHRRARDRDRDRQAAAQAQPGLLRPRLARDSADQICSHQDSGDGRQTDRAGGDAEGSSRGS

SEQ ID NO: 3934 - protein, 169 aa, Zea mays subsp. mays
  peptide (1)..(169): Ceres Seq. ID no. 12403154
MASSVSLRGAILQRPHLRPRPDARRAPTTRRRAVPAKICCIGWEPRGHPGRAAGRPHRAPRVPPPPREGLRGARGLRAPGARGEGAAAQRARGAGDPGHGRRPRRVLPRHRRARDRDRDRQAAAQAQPGLLRPRLARDSADQICSHQDSGDGRQTDRAGGDAEGSSRGS

SEQ ID NO: 3935 - DNA, 1104 bp, Zea mays subsp. mays
  misc_feature (1)..(1104): Ceres Seq. ID no. 12379137
  misc_feature: MA Experiment ID: 108527 Result: Down-regulated in Transcription
  misc_feature: MA Experiment 108527 PARAMETER Experiment Name: Zm_5mM_NO_P Parameter: Age (day) Value: 8
  misc_feature: MA Experiment 108527 PARAMETER Experiment Name: Zm_5mM_NO_P Parameter: Organism Value: Zea mays
  misc_feature: MA Experiment 108527 PARAMETER Experiment Name: Zm_5mM_NO_P Parameter: Plant Line Value: 35A19
  misc_feature: MA Experiment 108527 PARAMETER Experiment Name: Zm_5mM_NO_P Parameter: Timepoint (hr) Value: 6
  misc_feature: MA Experiment 108527 PARAMETER Experiment Name: Zm_5mM_NO_P Parameter: Tissue Value: Aerial
  misc_feature: MA Experiment 108527 PARAMETER Experiment Name: Zm_5mM_NO_P Parameter: Treatment Value: 5mM NO vs. No Treatment
  misc_feature: MA Experiment ID: 108528 Result: Up-regulated in Transcription
  misc_feature: MA Experiment 108528 PARAMETER Experiment Name: Zm_Imbibed_Seeds_P Parameter: Age (day) Value: 5 vs. 2
  misc_feature: MA Experiment 108528 PARAMETER Experiment Name: Zm_Imbibed_Seeds_P Parameter: Organism Value: Zea mays
  misc_feature: MA Experiment 108528 PARAMETER Experiment Name: Zm_Imbibed_Seeds_P Parameter: Plant Line Value: 35A19
  misc_feature: MA Experiment 108528 PARAMETER Experiment Name: Zm_Imbibed_Seeds_P Parameter: Tissue Value: Aerial vs. Embryo
  misc_feature: MA Experiment ID: 108530 Result: Up-regulated in Transcription
  misc_feature: MA Experiment 108530 PARAMETER Experiment Name: Zm_Imbibed_Seeds_P Parameter: Age (day) Value: 6 vs. 2
  misc_feature: MA Experiment 108530 PARAMETER Experiment Name: Zm_Imbibed_Seeds_P Parameter: Organism Value: Zea mays
  misc_feature: MA Experiment 108530 PARAMETER Experiment Name: Zm_Imbibed_Seeds_P Parameter: Plant Line Value: 35A19
  misc_feature: MA Experiment 108530 PARAMETER Experiment Name: Zm_Imbibed_Seeds_P Parameter: Tissue Value: Aerial vs. Embryo
  misc_feature: MA Experiment ID: 108543 Result: Down-regulated in Transcription
  misc_feature: MA Experiment ID: 108559 Result: Down-regulated in Transcription
  misc_feature: MA Experiment 108559 PARAMETER Experiment Name: Zm_5mM_NO_P Parameter: Age (day) Value: 8
  misc_feature: MA Experiment 108559 PARAMETER Experiment Name: Zm_5mM_NO_P Parameter: Organism Value: Zea mays
  misc_feature: MA Experiment 108559 PARAMETER Experiment Name: Zm_5mM_NO_P Parameter: Plant Line Value: 35A19
  misc_feature: MA Experiment 108559 PARAMETER Experiment Name: Zm_5mM_NO_P Parameter: Timepoint (hr) Value: 12
  misc_feature: MA Experiment 108559 PARAMETER Experiment Name: Zm_5mM_NO_P Parameter: Tissue Value: Aerial
  misc_feature: MA Experiment 108559 PARAMETER Experiment Name: Zm_5mM_NO_P Parameter: Treatment Value: 5mM NO vs. No Treatment
tcatgcagttcacacactctcctctgacctctcctctcctctcctctcgacctctcccttctatctagccaccgaagccaagaccaaggaacggcatggctcagctgctgcacctgccggacctcgcggcggcgcggccgccggcgcggaggaggaggggtgtggcggtggcggtggcgggggggcgcgtcaagcagggggaggcggggcgggtgatcagggtcgccgaccccgtgcgggagggccggatgccgcctcctcttcttgccgcgccggccacgccgtcggagtctccgccggtcgcggggaggcgcggggacgaggacgacgaggtgaggcagaggtactacctcaacatggggtacgcgatccggacgctcagggaggagctccccgatgtgctctacaaggagcccagctttgacatctacagagatgacattgtcttcacagaccctttgaatacattcaagggcctggaaaattacaagacgatattctgggcgcttcgttttactggccggatcttcttcaaggcattgtgggttgatgtagttagtatatggcagcctgctgagaacattatcatgattcgctggatcgcccacggcattcctcgagtaccttgggatgggcatggccgcttcgatggtgcttctgtgtataaactcgacaaggatggtaagatctacgagcataaggtccacaatgttgctatgaatccaccaacgaagttcaaggtcctaccagtccatgagctaatcagatcacttggttgcccctctactgcaaaaccaacttattttgaagcttcatcacaatatctgtgcgctgggccatcttatttgagattagcttggataagatgctacatctcattgtgccgcatgctttcgctcgcaaatctgggagaaggatagcctgggtttagtgatacctccaaattttgtattttcagtatgacagcacacatgttactaagtactattgagtcatgacagttgtatatatgaacactgatagtttatagaataagacctcttagttaaggtgtacaacacttgttattgattgttataagcatcagtcagcaaactagtcaag

SEQ ID NO: 3936 - protein, 274 aa, Zea mays subsp. mays
  peptide (1)..(274): Ceres Seq. ID no. 12379138
  misc_feature (105)..(204): Homolog of NCBI NO: 37522054 NR Description: hypothetical protein glr2485 [Gloeobacter
  misc_feature (92)..(201): Homolog of NCBI NO: 17228448 NR Description: hypothetical protein [Nostoc sp. PCC 7120]
  misc_feature (92)..(201): Homolog of NCBI NO: 23040676 NR Description: hypothetical protein [Trichodesmium erythraeum
  misc_feature (80)..(201): Homolog of NCBI NO: 23126421 NR Description: hypothetical protein [Nostoc punctiforme]
  misc_feature (47)..(237): Homolog of NCBI NO: 15219209 NR Description: unknown protein
  misc_feature (1)..(238): Homolog of NCBI NO: 38347356 NR Description: OSJNBa0070C17.17 [Oryza sativa (japonica
  misc_feature (53)..(243): Homolog of NCBI NO: 18412399 NR Description: expressed protein
  misc_feature (61)..(202): Homolog of NCBI NO: 25408977 NR Description: hypothetical protein At2g46220 [imported] -
  misc_feature (61)..(238): Homolog of NCBI NO: 18407008 NR Description: Expressed protein
  misc_feature (1)..(203): Homolog of NCBI NO: 34904098 NR Description: unnamed protein product [Oryza sativa (japonica
MAQLLHLPDLAAARPPARRRRGVAVAVAGGRVKQGEAGRVIRVADPVREGRMPPPLLAAPATPSESPPVAGRRGDEDDEVRQRYYLNMGYAIRTLREELPDVLYKEPSFDIYRDDIVFTDPLNTFKGLENYKTIFWALRFTGRIFFKALWVDVVSIWQPAENIIMIRWIAHGIPRVPWDGHGRFDGASVYKLDKDGKIYEHKVHNVAMNPPTKFKVLPVHELIRSLGCPSTAKPTYFEASSQYLCAGPSYLRLAWIRCYISLCRMLSLANLGEG

SEQ ID NO: 3937 - protein, 223 aa, Zea mays subsp. mays
  peptide (1)..(223): Ceres Seq. ID no. 12379139
  misc_feature (54)..(153): Homolog of NCBI NO: 37522054 NR Description: hypothetical protein glr2485 [Gloeobacter
  misc_feature (41)..(150): Homolog of NCBI NO: 17228448 NR Description: hypothetical protein [Nostoc sp. PCC 7120]
  misc_feature (41)..(150): Homolog of NCBI NO: 23040676 NR Description: hypothetical protein [Trichodesmium erythraeum
  misc_feature (29)..(150): Homolog of NCBI NO: 23126421 NR Description: hypothetical protein [Nostoc punctiforme]
  misc_feature (1)..(186): Homolog of NCBI NO: 15219209 NR Description: unknown protein
  misc_feature (1)..(187): Homolog of NCBI NO: 38347356 NR Description: OSJNBa0070C17.17 [Oryza sativa (japonica
  misc_feature (2)..(192): Homolog of NCBI NO: 18412399 NR Description: expressed protein
  misc_feature (10)..(151): Homolog of NCBI NO: 25408977 NR Description: hypothetical protein At2g46220 [imported] -
  misc_feature (10)..(187): Homolog of NCBI NO: 18407008 NR Description: Expressed protein
  misc_feature (1)..(152): Homolog of NCBI NO: 34904098 NR Description: unnamed protein product [Oryza sativa (japonica
MPPPLLAAPATPSESPPVAGRRGDEDDEVRQRYYLNMGYAIRTLREELPDVLYKEPSFDIYRDDIVFTDPLNTFKGLENYKTIFWALRFTGRIFFKALWVDVVSIWQPAENIIMIRWIAHGIPRVPWDGHGRFDGASVYKLDKDGKIYEHKVHNVAMNPPTKFKVLPVHELIRSLGCPSTAKPTYFEASSQYLCAGPSYLRLAWIRCYISLCRMLSLANLGEG

SEQ ID NO: 3938 - protein, 187 aa, Zea mays subsp. mays
  peptide (1)..(187): Ceres Seq. ID no. 12379140
  misc_feature (18)..(117): Homolog of NCBI NO: 37522054 NR Description: hypothetical protein glr2485 [Gloeobacter
  misc_feature (5)..(114): Homolog of NCBI NO: 17228448 NR Description: hypothetical protein [Nostoc sp. PCC 7120]
  misc_feature (5)..(114): Homolog of NCBI NO: 23040676 NR Description: hypothetical protein [Trichodesmium erythraeum
  misc_feature (1)..(114): Homolog of NCBI NO: 23126421 NR Description: hypothetical protein [Nostoc punctiforme]
  misc_feature (1)..(150): Homolog of NCBI NO: 15219209 NR Description: unknown protein
  misc_feature (1)..(151): Homolog of NCBI NO: 38347356 NR Description: OSJNBa0070C17.17 [Oryza sativa (japonica
  misc_feature (1)..(156): Homolog of NCBI NO: 18412399 NR Description: expressed protein
  misc_feature (1)..(115): Homolog of NCBI NO: 25408977 NR Description: hypothetical protein At2g46220 [imported] -
  misc_feature (1)..(151): Homolog of NCBI NO: 18407008 NR Description: Expressed protein
  misc_feature (1)..(116): Homolog of NCBI NO: 34904098 NR Description: unnamed protein product [Oryza sativa (japonica
MGYAIRTLREELPDVLYKEPSFDIYRDDIVFTDPLNTFKGLENYKTIFWALRFTGRIFFKALWVDVVSIWQPAENIIMIRWIAHGIPRVPWDGHGRFDGASVYKLDKDGKIYEHKVHNVAMNPPTKFKVLPVHELIRSLGCPSTAKPTYFEASSQYLCAGPSYLRLAWIRCYISLCRMLSLANLGEG

SEQ ID NO: 3939 - DNA, 964 bp, Zea mays subsp. mays
  misc_feature (1)..(964): Ceres Seq. ID no. 12403052
  misc_feature: MA Experiment ID: 108515 Result: Up-regulated in Transcription
  misc_feature: MA Experiment 108515 PARAMETER Experiment Name: Zm_2mM_SA_P Parameter: Age (day) Value: 8
  misc_feature: MA Experiment 108515 PARAMETER Experiment Name: Zm_2mM_SA_P Parameter: Organism Value: Zea mays
  misc_feature: MA Experiment 108515 PARAMETER Experiment Name: Zm_2mM_SA_P Parameter: Plant Line Value: 35A19
  misc_feature: MA Experiment 108515 PARAMETER Experiment Name: Zm_2mM_SA_P Parameter: Timepoint (hr) Value: 12
  misc_feature: MA Experiment 108515 PARAMETER Experiment Name: Zm_2mM_SA_P Parameter: Tissue Value: Aerial
  misc_feature: MA Experiment 108515 PARAMETER Experiment Name: Zm_2mM_SA_P Parameter: Treatment Value: 2mM SA vs. No Treatment
  misc_feature: MA Experiment ID: 108523 Result: Down-regulated in Transcription
  misc_feature: MA Experiment 108523 PARAMETER Experiment Name: Zm_42deg_Heat_P Parameter: Age (day) Value: 8
  misc_feature: MA Experiment 108523 PARAMETER Experiment Name: Zm_42deg_Heat_P Parameter: Organism Value: Zea mays
  misc_feature: MA Experiment 108523 PARAMETER Experiment Name: Zm_42deg_Heat_P Parameter: Plant Line Value: 35A19
  misc_feature: MA Experiment 108523 PARAMETER Experiment Name: Zm_42deg_Heat_P Parameter: Temperature (deg C) Value: 42 vs. 22
  misc_feature: MA Experiment 108523 PARAMETER Experiment Name: Zm_42deg_Heat_P Parameter: Timepoint (hr) Value: 6
  misc_feature: MA Experiment 108523 PARAMETER Experiment Name: Zm_42deg_Heat_P Parameter: Tissue Value: Aerial
  misc_feature: MA Experiment ID: 108527 Result: Up-regulated in Transcription
  misc_feature: MA Experiment 108527 PARAMETER Experiment Name: Zm_5mM_NO_P Parameter: Age (day) Value: 8
  misc_feature: MA Experiment 108527 PARAMETER Experiment Name: Zm_5mM_NO_P Parameter: Organism Value: Zea mays
  misc_feature: MA Experiment 108527 PARAMETER Experiment Name: Zm_5mM_NO_P Parameter: Plant Line Value: 35A19
  misc_feature: MA Experiment 108527 PARAMETER Experiment Name: Zm_5mM_NO_P Parameter: Timepoint (hr) Value: 6
  misc_feature: MA Experiment 108527 PARAMETER Experiment Name: Zm_5mM_NO_P Parameter: Tissue Value: Aerial
  misc_feature: MA Experiment 108527 PARAMETER Experiment Name: Zm_5mM_NO_P Parameter: Treatment Value: 5mM NO vs. No Treatment
  misc_feature: MA Experiment ID: 108528 Result: Down-regulated in Transcription
  misc_feature: MA Experiment 108528 PARAMETER Experiment Name: Zm_Imbibed_Seeds_P Parameter: Age (day) Value: 5 vs. 2
  misc_feature: MA Experiment 108528 PARAMETER Experiment Name: Zm_Imbibed_Seeds_P Parameter: Organism Value: Zea mays
  misc_feature: MA Experiment 108528 PARAMETER Experiment Name: Zm_Imbibed_Seeds_P Parameter: Plant Line Value: 35A19
  misc_feature: MA Experiment 108528 PARAMETER Experiment Name: Zm_Imbibed_Seeds_P Parameter: Tissue Value: Aerial vs. Embryo
  misc_feature: MA Experiment ID: 108530 Result: Down-regulated in Transcription
  misc_feature: MA Experiment 108530 PARAMETER Experiment Name: Zm_Imbibed_Seeds_P Parameter: Age (day) Value: 6 vs. 2
  misc_feature: MA Experiment 108530 PARAMETER Experiment Name: Zm_Imbibed_Seeds_P Parameter: Organism Value: Zea mays
  misc_feature: MA Experiment 108530 PARAMETER Experiment Name: Zm_Imbibed_Seeds_P Parameter: Plant Line Value: 35A19
  misc_feature: MA Experiment 108530 PARAMETER Experiment Name: Zm_Imbibed_Seeds_P Parameter: Tissue Value: Aerial vs. Embryo
  misc_feature: MA Experiment ID: 108534 Result: Down-regulated in Transcription
  misc_feature: MA Experiment 108534 PARAMETER Experiment Name: Zm_4deg_Cold_P Parameter: Age (hr) Value: 8
  misc_feature: MA Experiment 108534 PARAMETER Experiment Name: Zm_4deg_Cold_P Parameter: Organism Value: Zea mays
  misc_feature: MA Experiment 108534 PARAMETER Experiment Name: Zm_4deg_Cold_P Parameter: Plant Line Value: 35A19
  misc_feature: MA Experiment 108534 PARAMETER Experiment Name: Zm_4deg_Cold_P Parameter: Temperature (deg C) Value: 4 vs. 22
  misc_feature: MA Experiment 108534 PARAMETER Experiment Name: Zm_4deg_Cold_P Parameter: Timepoint (hr) Value: 6
  misc_feature: MA Experiment 108534 PARAMETER Experiment Name: Zm_4deg_Cold_P Parameter: Tissue Value: Aerial
  misc_feature: MA Experiment ID: 108535 Result: Down-regulated in Transcription
  misc_feature: MA Experiment 108535 PARAMETER Experiment Name: Zm_Meristem_P Parameter: Age (day) Value: 8
  misc_feature: MA Experiment 108535 PARAMETER Experiment Name: Zm_Meristem_P Parameter: Organism Value: Zea mays
  misc_feature: MA Experiment 108535 PARAMETER Experiment Name: Zm_Meristem_P Parameter: Plant Line Value: 35A19
  misc_feature: MA Experiment 108535 PARAMETER Experiment Name: Zm_Meristem_P Parameter: Tissue Value: Root Meristem vs. Above Root Meristem
  misc_feature: MA Experiment ID: 108544 Result: Up-regulated in Transcription
  misc_feature: MA Experiment ID: 108556 Result: Up-regulated in Transcription
  misc_feature: MA Experiment 108556 PARAMETER Experiment Name: Zm_Drought_P Parameter: Age (day) Value: 9
  misc_feature: MA Experiment 108556 PARAMETER Experiment Name: Zm_Drought_P Parameter: Organism Value: Zea mays
  misc_feature: MA Experiment 108556 PARAMETER Experiment Name: Zm_Drought_P Parameter: Plant Line Value: 35A19
  misc_feature: MA Experiment 108556 PARAMETER Experiment Name: Zm_Drought_P Parameter: Timepoint (hr) Value: 24
  misc_feature: MA Experiment 108556 PARAMETER Experiment Name: Zm_Drought_P Parameter: Tissue Value: Aerial
  misc_feature: MA Experiment 108556 PARAMETER Experiment Name: Zm_Drought_P Parameter: Treatment Value: Drought vs. No Drought
  misc_feature: MA Experiment ID: 20000108 Result: Down-regulated in Transcription
  misc_feature: MA Experiment 20000108 PARAMETER Experiment Name: Zm_Root-Tips_P Parameter: Age (day) Value: 12
  misc_feature: MA Experiment 20000108 PARAMETER Experiment Name: Zm_Root-Tips_P Parameter: Organism Value: Zea mays
  misc_feature: MA Experiment 20000108 PARAMETER Experiment Name: Zm_Root-Tips_P Parameter: Tissue Value: Root tips vs. Root mid region    35
  misc_feature: MA Experiment 20000108 PARAMETER Experiment Name: Zm_Root-Tips_P Parameter: Tissue Value: Root tips vs. Root mid region   Sequence Listing-Misc Features (4)
  misc_feature: MA Experiment ID: 20000477 Result: Up-regulated in Transcription
  misc_feature: MA Experiment 20000477 PARAMETER Experiment Name: Zm_5mM_SA_P Parameter: Age (day) Value: 10
  misc_feature: MA Experiment 20000477 PARAMETER Experiment Name: Zm_5mM_SA_P Parameter: Organism Value: Zea mays
  misc_feature: MA Experiment 20000477 PARAMETER Experiment Name: Zm_5mM_SA_P Parameter: Plant Line Value: 35A19
  misc_feature: MA Experiment 20000477 PARAMETER Experiment Name: Zm_5mM_SA_P Parameter: Timepoint (hr) Value: 48
  misc_feature: MA Experiment 20000477 PARAMETER Experiment Name: Zm_5mM_SA_P Parameter: Tissue Value: Aerial
  misc_feature: MA Experiment 20000477 PARAMETER Experiment Name: Zm_5mM_SA_P Parameter: Treatment Value: 5mM SA vs. No Treatment
  misc_feature: MA Experiment ID: 20000478 Result: Up-regulated in Transcription
  misc_feature: MA Experiment 20000478 PARAMETER Experiment Name: Zm_5mM_SA_P Parameter: Age (day) Value: 11
  misc_feature: MA Experiment 20000478 PARAMETER Experiment Name: Zm_5mM_SA_P Parameter: Organism Value: Zea mays
  misc_feature: MA Experiment 20000478 PARAMETER Experiment Name: Zm_5mM_SA_P Parameter: Plant Line Value: 35A19
  misc_feature: MA Experiment 20000478 PARAMETER Experiment Name: Zm_5mM_SA_P Parameter: Timepoint (hr) Value: 72
  misc_feature: MA Experiment 20000478 PARAMETER Experiment Name: Zm_5mM_SA_P Parameter: Tissue Value: Aerial
  misc_feature: MA Experiment 20000478 PARAMETER Experiment Name: Zm_5mM_SA_P Parameter: Treatment Value: 5mM SA vs. No Treatment
  misc_feature: MA Experiment ID: 20000479 Result: Up-regulated in Transcription
  misc_feature: MA Experiment 20000479 PARAMETER Experiment Name: Zm_Drought_P Parameter: Age (day) Value: 10
  misc_feature: MA Experiment 20000479 PARAMETER Experiment Name: Zm_Drought_P Parameter: Organism Value: Zea mays
  misc_feature: MA Experiment 20000479 PARAMETER Experiment Name: Zm_Drought_P Parameter: Plant Line Value: 35A19
  misc_feature: MA Experiment 20000479 PARAMETER Experiment Name: Zm_Drought_P Parameter: Timepoint (hr) Value: 48
  misc_feature: MA Experiment 20000479 PARAMETER Experiment Name: Zm_Drought_P Parameter: Tissue Value: Aerial
  misc_feature: MA Experiment 20000479 PARAMETER Experiment Name: Zm_Drought_P Parameter: Treatment Value: Drought vs. No Drought
  misc_feature: MA Experiment ID: 20000480 Result: Up-regulated in Transcription
  misc_feature: MA Experiment 20000480 PARAMETER Experiment Name: Zm_Drought_P Parameter: Age (day) Value: 11
  misc_feature: MA Experiment 20000480 PARAMETER Experiment Name: Zm_Drought_P Parameter: Organism Value: Zea mays
  misc_feature: MA Experiment 20000480 PARAMETER Experiment Name: Zm_Drought_P Parameter: Plant Line Value: 35A19
  misc_feature: MA Experiment 20000480 PARAMETER Experiment Name: Zm_Drought_P Parameter: Timepoint (hr) Value: 72
  misc_feature: MA Experiment 20000480 PARAMETER Experiment Name: Zm_Drought_P Parameter: Tissue Value: Aerial
  misc_feature: MA Experiment 20000480 PARAMETER Experiment Name: Zm_Drought_P Parameter: Treatment Value: Drought vs. No Drought
  misc_feature: MA Experiment ID: 20000534 Result: Down-regulated in Transcription
  misc_feature: MA Experiment 20000534 PARAMETER Experiment Name: Zm_Hybrid_Pollen_P Parameter: Age (day) Value: 8
  misc_feature: MA Experiment 20000534 PARAMETER Experiment Name: Zm_Hybrid_Pollen_P Parameter: Organism Value: Zea mays
  misc_feature: MA Experiment 20000534 PARAMETER Experiment Name: Zm_Hybrid_Pollen_P Parameter: Plant Line Value: 35A19
  misc_feature: MA Experiment 20000534 PARAMETER Experiment Name: Zm_Hybrid_Pollen_P Parameter: Tissue Value: Pollen vs. Aerial
  misc_feature: MA Experiment ID: 20000626 Result: Up-regulated in Transcription
  misc_feature: MA Experiment 20000626 PARAMETER Experiment Name: Zm_Herbicide-Treatments_P Parameter: Timepoint (hr) Value: 12
  misc_feature: MA Experiment 20000626 PARAMETER Experiment Name: Zm_Herbicide-Treatments_P Parameter: Tissue Value: Aerial
  misc_feature: MA Experiment 20000626 PARAMETER Experiment Name: Zm_Herbicide-Treatments_P Parameter: Treatment Value: Roundup vs. No Treatment
aaattctccctttccacaagaacatcacacggcgatagcaaaaccttccgtcggaggatggcttccgccggcgctggagaaggcaaggagacggggacggctgccgggagcagcctccacagcaagactctcctcaagagccaaccactgtaccagtacatactggaatccaccgtcttcccacgcgagccggactgcctgcgggagctccgcgtcgccaccgccacccaccccatggcgggcatggctgcgtcgccggacgaggtgcagctgctgcagctcctgatcgagattcttggcgtcaagaacgccatcgaggttggcgtcttcaccgggtactcgctgctcgccaccgccctcgccctccccgacgacggcaagattgtggccatcgacgttacccgcgagagctacgaccagattgggtcgccggtgatcgagaaggccggcgtggcgcacaagatcgacttccgcgtcgggctcgcgctgcccgtgctggaccagatggtttccgaggaggggaacaagggcaagttcgacttcgcgttcgtggacgcggacaaggtgaacttcctcaactaccacgagcggctgctgcagctgctcagggtcgggggcctcatcgcctacgacaacacgctgtggggcgggtccgtggccgcgccccacgacgagccgctctccgagcgggaccgcgcgctcgctgcggccaccagggagttcaacgcggccgtggccgccgatccccgcgttcacgtctgccaggtcgccatcgccgacgggctcacgctgtgccgccgcgtcgcctgatccgtatccggttatccgcctcgaaatgcagcagagctgtgggctgtcgctgacactgctgtgagctctgtgcttgaaatggccatggtctgtaatagcgaactgggcttgagtgaaaataaatccaccagcgcgctagcgtgtgtcagcgacc

SEQ ID NO: 3940 - protein, 269 aa, Zea mays subsp. mays
  peptide (1)..(269): Ceres Seq. ID no. 12403053
  misc_feature (55)..(268): Pfam Name: O-methyltransferase Pfam Description: O-methyltransferase
  misc_feature (19)..(269): Homolog of NCBI NO: 15235213 NR Description: caffeoyl-CoA 3-O-methyltransferase
  misc_feature (25)..(268): Homolog of NCBI NO: 30580333 NR Description: Caffeoyl-CoA O-methyltransferase 1
  misc_feature (20)..(269): Homolog of NCBI NO: 30580332 NR Description: Caffeoyl-CoA O-methyltransferase
  misc_feature (25)..(268): Homolog of NCBI NO: 3023436 NR Description: Caffeoyl-CoA O-methyltransferase
  misc_feature (20)..(269): Homolog of NCBI NO: 30580349 NR Description: Caffeoyl-CoA O-methyltransferase
  misc_feature (23)..(269): Homolog of NCBI NO: 30580336 NR Description: Caffeoyl-CoA O-methyltransferase 1
  misc_feature (23)..(269): Homolog of NCBI NO: 30580381 NR Description: Caffeoyl-CoA O-methyltransferase 2
  misc_feature (23)..(269): Homolog of NCBI NO: 3023419 NR Description: Caffeoyl-CoA O-methyltransferase
  misc_feature (41)..(268): Homolog of NCBI NO: 5257275 NR Description: ESTs AU030740(E60171),AU030739(E60171) correspond a region of the predicted gene.~Similar to Populus tremuloides
  misc_feature (21)..(268): Homolog of NCBI NO: 5091498 NR Description: ESTs AU058067(E20733), AAU058070(E20873) to a region of the predicted gene.~Similar to Populus tremuloides
KFSLSTRTSHGDSKTFRRRMASAGAGEGKETGTAAGSSLHSKTLLKSQPLYQYILESTVFPREPDCLRELRVATATHPMAGMAASPDEVQLLQLLIEILGVKNAIEVGVFTGYSLLATALALPDDGKIVAIDVTRESYDQIGSPVIEKAGVAHKIDFRVGLALPVLDQMVSEEGNKGKFDFAFVDADKVNFLNYHERLLQLLRVGGLIAYDNTLWGGSVAAPHDEPLSERDRALAAATREFNAAVAADPRVHVCQVAIADGLTLCRRVA

SEQ ID NO: 3941 - protein, 250 aa, Zea mays subsp. mays
  peptide (1)..(250): Ceres Seq. ID no. 12403054
  misc_feature (36)..(249): Pfam Name: O-methyltransferase Pfam Description: O-methyltransferase
  misc_feature (6)..(249): Homolog of NCBI NO: 30580333 NR Description: Caffeoyl-CoA O-methyltransferase 1
  misc_feature (1)..(250): Homolog of NCBI NO: 30580332 NR Description: Caffeoyl-CoA O-methyltransferase
  misc_feature (6)..(249): Homolog of NCBI NO: 3023436 NR Description: Caffeoyl-CoA O-methyltransferase
  misc_feature (1)..(250): Homolog of NCBI NO: 30580349 NR Description: Caffeoyl-CoA O-methyltransferase
  misc_feature (4)..(250): Homolog of NCBI NO: 30580336 NR Description: Caffeoyl-CoA O-methyltransferase 1
  misc_feature (1)..(250): Homolog of NCBI NO: 15235213 NR Description: caffeoyl-CoA 3-O-methyltransferase
  misc_feature (4)..(250): Homolog of NCBI NO: 30580381 NR Description: Caffeoyl-CoA O-methyltransferase 2
  misc_feature (4)..(250): Homolog of NCBI NO: 3023419 NR Description: Caffeoyl-CoA O-methyltransferase
  misc_feature (22)..(249): Homolog of NCBI NO: 5257275 NR Description: ESTs AU030740(E60171),AU030739(E60171) correspond a region of the predicted gene.~Similar to Populus tremuloides
  misc_feature (2)..(249): Homolog of NCBI NO: 5091498 NR Description: ESTs AU058067(E20733), AAU058070(E20873) to a region of the predicted gene.~Similar to Populus tremuloides
MASAGAGEGKETGTAAGSSLHSKTLLKSQPLYQYILESTVFPREPDCLRELRVATATHPMAGMAASPDEVQLLQLLIEILGVKNAIEVGVFTGYSLLATALALPDDGKIVAIDVTRESYDQIGSPVIEKAGVAHKIDFRVGLALPVLDQMVSEEGNKGKFDFAFVDADKVNFLNYHERLLQLLRVGGLIAYDNTLWGGSVAAPHDEPLSERDRALAAATREFNAAVAADPRVHVCQVAIADGLTLCRRVA

SEQ ID NO: 3942 - protein, 191 aa, Zea mays subsp. mays
  peptide (1)..(191): Ceres Seq. ID no. 12403055
  misc_feature (1)..(190): Pfam Name: O-methyltransferase Pfam Description: O-methyltransferase
  misc_feature (1)..(191): Homolog of NCBI NO: 15235213 NR Description: caffeoyl-CoA 3-O-methyltransferase
  misc_feature (1)..(190): Homolog of NCBI NO: 30580333 NR Description: Caffeoyl-CoA O-methyltransferase 1
  misc_feature (1)..(191): Homolog of NCBI NO: 30580332 NR Description: Caffeoyl-CoA O-methyltransferase
  misc_feature (1)..(190): Homolog of NCBI NO: 3023436 NR Description: Caffeoyl-CoA O-methyltransferase
  misc_feature (1)..(191): Homolog of NCBI NO: 30580349 NR Description: Caffeoyl-CoA O-methyltransferase
  misc_feature (1)..(191): Homolog of NCBI NO: 30580336 NR Description: Caffeoyl-CoA O-methyltransferase 1
  misc_feature (1)..(191): Homolog of NCBI NO: 30580381 NR Description: Caffeoyl-CoA O-methyltransferase 2
  misc_feature (1)..(191): Homolog of NCBI NO: 3023419 NR Description: Caffeoyl-CoA O-methyltransferase
  misc_feature (1)..(190): Homolog of NCBI NO: 5257275 NR Description: ESTs AU030740(E60171),AU030739(E60171) correspond a region of the predicted gene.~Similar to Populus tremuloides
  misc_feature (1)..(190): Homolog of NCBI NO: 5091498 NR Description: ESTs AU058067(E20733), AAU058070(E20873) to a region of the predicted gene.~Similar to Populus tremuloides
MAGMAASPDEVQLLQLLIEILGVKNAIEVGVFTGYSLLATALALPDDGKIVAIDVTRESYDQIGSPVIEKAGVAHKIDFRVGLALPVLDQMVSEEGNKGKFDFAFVDADKVNFLNYHERLLQLLRVGGLIAYDNTLWGGSVAAPHDEPLSERDRALAAATREFNAAVAADPRVHVCQVAIADGLTLCRRVA

SEQ ID NO: 3943 - DNA, 868 bp, Zea mays subsp. mays
  misc_feature (1)..(868): Ceres Seq. ID no. 12365359
  misc_feature: MA Experiment ID: 108504 Result: Up-regulated in Transcription
  misc_feature: MA Experiment 108504 PARAMETER Experiment Name: Zm_Drought_P Parameter: Age (day) Value: 8
  misc_feature: MA Experiment 108504 PARAMETER Experiment Name: Zm_Drought_P Parameter: Organism Value: Zea mays
  misc_feature: MA Experiment 108504 PARAMETER Experiment Name: Zm_Drought_P Parameter: Plant Line Value: 35A19
  misc_feature: MA Experiment 108504 PARAMETER Experiment Name: Zm_Drought_P Parameter: Timepoint (hr) Value: 12
  misc_feature: MA Experiment 108504 PARAMETER Experiment Name: Zm_Drought_P Parameter: Tissue Value: Aerial
  misc_feature: MA Experiment 108504 PARAMETER Experiment Name: Zm_Drought_P Parameter: Treatment Value: Drought vs. No Drought
  misc_feature: MA Experiment ID: 108540 Result: Up-regulated in Transcription
  misc_feature: MA Experiment 108540 PARAMETER Experiment Name: Zm_20percent_PEG_P Parameter: Age (day) Value: 8
  misc_feature: MA Experiment 108540 PARAMETER Experiment Name: Zm_20percent_PEG_P Parameter: Organism Value: Zea mays
  misc_feature: MA Experiment 108540 PARAMETER Experiment Name: Zm_20percent_PEG_P Parameter: Plant Line Value: 35A19
  misc_feature: MA Experiment 108540 PARAMETER Experiment Name: Zm_20percent_PEG_P Parameter: Timepoint (hr) Value: 6
  misc_feature: MA Experiment 108540 PARAMETER Experiment Name: Zm_20percent_PEG_P Parameter: Tissue Value: Aerial
  misc_feature: MA Experiment 108540 PARAMETER Experiment Name: Zm_20percent_PEG_P Parameter: Treatment Value: 20percent PEG vs. No Treatment
  misc_feature: MA Experiment ID: 108556 Result: Up-regulated in Transcription
  misc_feature: MA Experiment 108556 PARAMETER Experiment Name: Zm_Drought_P Parameter: Age (day) Value: 9
  misc_feature: MA Experiment 108556 PARAMETER Experiment Name: Zm_Drought_P Parameter: Organism Value: Zea mays
  misc_feature: MA Experiment 108556 PARAMETER Experiment Name: Zm_Drought_P Parameter: Plant Line Value: 35A19
  misc_feature: MA Experiment 108556 PARAMETER Experiment Name: Zm_Drought_P Parameter: Timepoint (hr) Value: 24
  misc_feature: MA Experiment 108556 PARAMETER Experiment Name: Zm_Drought_P Parameter: Tissue Value: Aerial
  misc_feature: MA Experiment 108556 PARAMETER Experiment Name: Zm_Drought_P Parameter: Treatment Value: Drought vs. No Drought
  misc_feature: MA Experiment ID: 108597 Result: Up-regulated in Transcription
  misc_feature: MA Experiment 108597 PARAMETER Experiment Name: Zm_100uM_ABA_P Parameter: Age (day) Value: 9
  misc_feature: MA Experiment 108597 PARAMETER Experiment Name: Zm_100uM_ABA_P Parameter: Organism Value: Zea mays
  misc_feature: MA Experiment 108597 PARAMETER Experiment Name: Zm_100uM_ABA_P Parameter: Plant Line Value: 35A19
  misc_feature: MA Experiment 108597 PARAMETER Experiment Name: Zm_100uM_ABA_P Parameter: Timepoint (hr) Value: 24
  misc_feature: MA Experiment 108597 PARAMETER Experiment Name: Zm_100uM_ABA_P Parameter: Tissue Value: Aerial
  misc_feature: MA Experiment 108597 PARAMETER Experiment Name: Zm_100uM_ABA_P Parameter: Treatment Value: 100uM ABA vs. No Treatment
  misc_feature: MA Experiment ID: 108689 Result: Up-regulated in Transcription
  misc_feature: MA Experiment 108689 PARAMETER Experiment Name: Zm_Drought_Roots_P Parameter: Age (day) Value: 9
  misc_feature: MA Experiment 108689 PARAMETER Experiment Name: Zm_Drought_Roots_P Parameter: Organism Value: Zea mays
  misc_feature: MA Experiment 108689 PARAMETER Experiment Name: Zm_Drought_Roots_P Parameter: Plant Line Value: 35A19
  misc_feature: MA Experiment 108689 PARAMETER Experiment Name: Zm_Drought_Roots_P Parameter: Timepoint (hr) Value: 24
  misc_feature: MA Experiment 108689 PARAMETER Experiment Name: Zm_Drought_Roots_P Parameter: Tissue Value: Roots
  misc_feature: MA Experiment 108689 PARAMETER Experiment Name: Zm_Drought_Roots_P Parameter: Treatment Value: Drought vs. No Drought
  misc_feature: MA Experiment ID: 20000478 Result: Up-regulated in Transcription
  misc_feature: MA Experiment 20000478 PARAMETER Experiment Name: Zm_5mM_SA_P Parameter: Age (day) Value: 11
  misc_feature: MA Experiment 20000478 PARAMETER Experiment Name: Zm_5mM_SA_P Parameter: Organism Value: Zea mays
  misc_feature: MA Experiment 20000478 PARAMETER Experiment Name: Zm_5mM_SA_P Parameter: Plant Line Value: 35A19
  misc_feature: MA Experiment 20000478 PARAMETER Experiment Name: Zm_5mM_SA_P Parameter: Timepoint (hr) Value: 72
  misc_feature: MA Experiment 20000478 PARAMETER Experiment Name: Zm_5mM_SA_P Parameter: Tissue Value: Aerial
  misc_feature: MA Experiment 20000478 PARAMETER Experiment Name: Zm_5mM_SA_P Parameter: Treatment Value: 5mM SA vs. No Treatment
  misc_feature: MA Experiment ID: 20000479 Result: Up-regulated in Transcription
  misc_feature: MA Experiment 20000479 PARAMETER Experiment Name: Zm_Drought_P Parameter: Age (day) Value: 10
  misc_feature: MA Experiment 20000479 PARAMETER Experiment Name: Zm_Drought_P Parameter: Organism Value: Zea mays
  misc_feature: MA Experiment 20000479 PARAMETER Experiment Name: Zm_Drought_P Parameter: Plant Line Value: 35A19
  misc_feature: MA Experiment 20000479 PARAMETER Experiment Name: Zm_Drought_P Parameter: Timepoint (hr) Value: 48
  misc_feature: MA Experiment 20000479 PARAMETER Experiment Name: Zm_Drought_P Parameter: Tissue Value: Aerial
  misc_feature: MA Experiment 20000479 PARAMETER Experiment Name: Zm_Drought_P Parameter: Treatment Value: Drought vs. No Drought
tctgccctctgctcaaaatttcccccaaaacttctcctcttgaggaaggcagcccgagcgagcgcgctgcaatggcggactcgtcggcgccgacgagagtgatgatggcggtgaacgagtcgtcgctcaaggggtacccgcacccctccatcagctgtcgcaccgccttcgactggacgctctccaagctcgtccgctccaaccctgggggcttccacttcctcttcgtccacgttcatgtccccgacgaggacggatttgatgacatggatagcatctatgcttcgccggaggactttcaccaaatgaagcagagagacaagataagagggcttcatttgctcgagtactttgtaaaccaatgccatcagttagggataaaatgcgaggcatggatcagacatggagatccaaaggaggttatctgcagcgaagtgaagagagtccagcctgaccttctagttgtgggaagtaggggtcttgggccatttcagagggttttcgtgggcacggtgagcgagttctgcgttaagcatgccgaatgccccgtcatcaccataaaacggaacgctaccgaagctcctcaggaccctgtcgacgattgatgcttccaagccaagccatgccatgtcactggagaatgagatgttcttcttcactgcttttataatgggttgatgtacaaaatacgatatggaagtggtgcctggaactagttctcggagggttccaactcttgcacactgcgcccccaaaaactagagttgaagatgtaaaacgccgtcgtccgccgagggacgacgagagattgtacgtgatacatcgatcgagtctcgtgaacctaaaaagctgccgctacattattgtt

SEQ ID NO: 3944 - protein, 200 aa, Zea mays subsp. mays
  peptide (1)..(200): Ceres Seq. ID no. 12365360
  misc_feature (30)..(187): Pfam Name: Universal stress protein family Pfam Description: Universal stress protein family
  misc_feature (13)..(187): Homolog of NCBI NO: 40539010 NR Description: putative stress-related protein
  misc_feature (91)..(187): Homolog of NCBI NO: 21594903 NR Description: ethylene-responsive protein, putative
  misc_feature (91)..(187): Homolog of NCBI NO: 18399413 NR Description: ethylene-responsive protein, putative
  misc_feature (24)..(188): Homolog of NCBI NO: 34914610 NR Description: P0520B06.18 [Oryza sativa (japonica
  misc_feature (9)..(187): Homolog of NCBI NO: 30681955 NR Description: ethylene-responsive protein -related [Arabidopsis
  misc_feature (34)..(200): Homolog of NCBI NO: 21536534 NR Description: putative ethylene-responsive protein [Arabidopsis
  misc_feature (28)..(200): Homolog of NCBI NO: 18395845 NR Description: expressed protein
  misc_feature (28)..(200): Homolog of NCBI NO: 6016711 NR Description: unknown protein [Arabidopsis thaliana]
  misc_feature (28)..(200): Homolog of NCBI NO: 15241464 NR Description: putative protein; protein id: At5g14680.1
  misc_feature (24)..(200): Homolog of NCBI NO: 19387249 NR Description: putative ethylene-responsive protein
CPLLKISPKTSPLEEGSPSERAAMADSSAPTRVMMAVNESSLKGYPHPSISCRTAFDWTLSKLVRSNPGGFHFLFVHVHVPDEDGFDDMDSIYASPEDFHQMKQRDKIRGLHLLEYFVNQCHQLGIKCEAWIRHGDPKEVICSEVKRVQPDLLVVGSRGLGPFQRVFVGTVSEFCVKHAECPVITIKRNATEAPQDPVDD

SEQ ID NO: 3945 - protein, 177 aa, Zea mays subsp. mays
  peptide (1)..(177): Ceres Seq. ID no. 12365361
  misc_feature (7)..(164): Pfam Name: Universal stress protein family Pfam Description: Universal stress protein family
  misc_feature (1)..(164): Homolog of NCBI NO: 40539010 NR Description: putative stress-related protein
  misc_feature (68)..(164): Homolog of NCBI NO: 21594903 NR Description: ethylene-responsive protein, putative
  misc_feature (68)..(164): Homolog of NCBI NO: 18399413 NR Description: ethylene-responsive protein, putative
  misc_feature (1)..(165): Homolog of NCBI NO: 34914610 NR Description: P0520B06.18 [Oryza sativa (japonica
  misc_feature (1)..(164): Homolog of NCBI NO: 30681955 NR Description: ethylene-responsive protein -related [Arabidopsis
  misc_feature (11)..(177): Homolog of NCBI NO: 21536534 NR Description: putative ethylene-responsive protein [Arabidopsis
  misc_feature (5)..(177): Homolog of NCBI NO: 18395845 NR Description: expressed protein
  misc_feature (5)..(177): Homolog of NCBI NO: 6016711 NR Description: unknown protein [Arabidopsis thaliana]
  misc_feature (5)..(177): Homolog of NCBI NO: 15241464 NR Description: putative protein; protein id: At5g14680.1
  misc_feature (1)..(177): Homolog of NCBI NO: 19387249 NR Description: putative ethylene-responsive protein
MADSSAPTRVMMAVNESSLKGYPHPSISCRTAFDWTLSKLVRSNPGGFHFLFVHVHVPDEDGFDDMDSIYASPEDFHQMKQRDKIRGLHLLEYFVNQCHQLGIKCEAWIRHGDPKEVICSEVKRVQPDLLVVGSRGLGPFQRVFVGTVSEFCVKHAECPVITIKRNATEAPQDPVDD

SEQ ID NO: 3946 - protein, 167 aa, Zea mays subsp. mays
  peptide (1)..(167): Ceres Seq. ID no. 12365362
  misc_feature (1)..(154): Pfam Name: Universal stress protein family Pfam Description: Universal stress protein family
  misc_feature (1)..(154): Homolog of NCBI NO: 40539010 NR Description: putative stress-related protein
  misc_feature (58)..(154): Homolog of NCBI NO: 21594903 NR Description: ethylene-responsive protein, putative
  misc_feature (58)..(154): Homolog of NCBI NO: 18399413 NR Description: ethylene-responsive protein, putative
  misc_feature (1)..(155): Homolog of NCBI NO: 34914610 NR Description: P0520B06.18 [Oryza sativa (japonica
  misc_feature (1)..(154): Homolog of NCBI NO: 30681955 NR Description: ethylene-responsive protein -related [Arabidopsis
  misc_feature (1)..(167): Homolog of NCBI NO: 21536534 NR Description: putative ethylene-responsive protein [Arabidopsis
  misc_feature (1)..(167): Homolog of NCBI NO: 18395845 NR Description: expressed protein
  misc_feature (1)..(167): Homolog of NCBI NO: 6016711 NR Description: unknown protein [Arabidopsis thaliana]
  misc_feature (1)..(167): Homolog of NCBI NO: 15241464 NR Description: putative protein; protein id: At5g14680.1
  misc_feature (1)..(167): Homolog of NCBI NO: 19387249 NR Description: putative ethylene-responsive protein
MMAVNESSLKGYPHPSISCRTAFDWTLSKLVRSNPGGFHFLFVHVHVPDEDGFDDMDSIYASPEDFHQMKQRDKIRGLHLLEYFVNQCHQLGIKCEAWIRHGDPKEVICSEVKRVQPDLLVVGSRGLGPFQRVFVGTVSEFCVKHAECPVITIKRNATEAPQDPVDD

SEQ ID NO: 3947 - DNA, 937 bp, Zea mays subsp. mays
  misc_feature (1)..(937): Ceres Seq. ID no. 12403587
  misc_feature: MA Experiment ID: 108547 Result: Down-regulated in Transcription
  misc_feature: MA Experiment 108547 PARAMETER Experiment Name: Zm_Imbibed_Seeds_P Parameter: Age (day) Value: 4 vs. 2
  misc_feature: MA Experiment 108547 PARAMETER Experiment Name: Zm_Imbibed_Seeds_P Parameter: Organism Value: Zea mays
  misc_feature: MA Experiment 108547 PARAMETER Experiment Name: Zm_Imbibed_Seeds_P Parameter: Plant Line Value: 35A19
  misc_feature: MA Experiment 108547 PARAMETER Experiment Name: Zm_Imbibed_Seeds_P Parameter: Tissue Value: Aerial vs. Embryo
tttttcttccgttgctccatgtccatggcttcccgtccgcctcttcgtcgtcgacgtcgtcttcccctcgtcccgctcctcgttctgctctgcctctccccggcatgcgccgccgggagagtcccggtttcggtctactacgaagcgctgtgcccgttctgctccgcgtttgtcgtgaacgacctctccagggtcttccgcgacgggatctcctccatcgctgagctgcggctcgtccctttcggcaatgggcgtgtctcggccgacggaaccgtcacttgccagcatggagaggacgagtgccaactcaacgctatagaagcttgcgtgatcagaatatggcctgacgcggagcagcattttcctttcattcaatgcgttgagcatttagcactgactcggaaatgggacgcctggcagtcttgctttcatgaaactggtctcgcttatcaacctgctattgactgctacatctcagggtatggaaggcagctcgtactccagtatgctgccgagacaaatgctctgcagcctcctcatcggtttgtaccttgggtggtcgtcaacggcaaaccgctcggtgatgattacatgaactttgaggcatacatctgcagcgcttatgacggcaatcttccaaaggcatgcaaggggaagcacctagcaattgctcaggagacgaaagccagccgaggagacaaggtgtgcccagctagcaaaactatcagctaactcgcgtgcgaaaatttattttttttggaatttggataaaactgagtactactttgagtttggttctaagaggttctgcgtttctgctgtcttgttgggtctccgtctattttgaagttagttgaaataacagtgctgtcaaacctttgacagaaaaacatcaaatgcaaacatttcatgttgatattcactagcattttcaggc

SEQ ID NO: 3948 - protein, 243 aa, Zea mays subsp. mays
  peptide (1)..(243): Ceres Seq. ID no. 12403588
  misc_feature (41)..(149): Pfam Name: Gamma interferon inducible lysosomal thiol Pfam Description: Gamma interferon inducible lysosomal thiol
  misc_feature (38)..(198): Homolog of NCBI NO: 7487272 NR Description: hypothetical protein T20K18.240 - Arabidopsis
  misc_feature (9)..(216): Homolog of NCBI NO: 15235523 NR Description: putative protein; protein id: At4g12900.1
  misc_feature (38)..(216): Homolog of NCBI NO: 21593852 NR Description: unknown [Arabidopsis thaliana]
  misc_feature (38)..(216): Homolog of NCBI NO: 15235540 NR Description: putative protein
  misc_feature (38)..(231): Homolog of NCBI NO: 18413888 NR Description: putative protein
  misc_feature (38)..(231): Homolog of NCBI NO: 21593076 NR Description: unknown [Arabidopsis thaliana]
  misc_feature (40)..(217): Homolog of NCBI NO: 30793446 NR Description: 27K protein [Triticum aestivum]
  misc_feature (40)..(216): Homolog of NCBI NO: 25406953 NR Description: hypothetical protein [imported] - Arabidopsis
  misc_feature (40)..(216): Homolog of NCBI NO: 18390723 NR Description: expressed protein
  misc_feature (19)..(217): Homolog of NCBI NO: 15241015 NR Description: putative protein; protein id: At5g01580.1
FFFRCSMSMASRPPLRRRRRLPLVPLLVLLCLSPACAAGRVPVSVYYEALCPFCSAFVVNDLSRVFRDGISSIAELRLVPFGNGRVSADGTVTCQHGEDECQLNAIEACVIRIWPDAEQHFPFIQCVEHLALTRKWDAWQSCFHETGLAYQPAIDCYISGYGRQLVLQYAAETNALQPPHRFVPWVVVNGKPLGDDYMNFEAYICSAYDGNLPKACKGKHLAIAQETKASRGDKVCPASKTIS

SEQ ID NO: 3949 - protein, 237 aa, Zea mays subsp. mays
  peptide (1)..(237): Ceres Seq. ID no. 12403589
  misc_feature (35)..(143): Pfam Name: Gamma interferon inducible lysosomal thiol Pfam Description: Gamma interferon inducible lysosomal thiol
  misc_feature (32)..(192): Homolog of NCBI NO: 7487272 NR Description: hypothetical protein T20K18.240 - Arabidopsis
  misc_feature (3)..(210): Homolog of NCBI NO: 15235523 NR Description: putative protein; protein id: At4g12900.1
  misc_feature (32)..(210): Homolog of NCBI NO: 21593852 NR Description: unknown [Arabidopsis thaliana]
  misc_feature (32)..(210): Homolog of NCBI NO: 15235540 NR Description: putative protein
  misc_feature (32)..(225): Homolog of NCBI NO: 18413888 NR Description: putative protein
  misc_feature (32)..(225): Homolog of NCBI NO: 21593076 NR Description: unknown [Arabidopsis thaliana]
  misc_feature (34)..(211): Homolog of NCBI NO: 30793446 NR Description: 27K protein [Triticum aestivum]
  misc_feature (34)..(210): Homolog of NCBI NO: 25406953 NR Description: hypothetical protein [imported] - Arabidopsis
  misc_feature (34)..(210): Homolog of NCBI NO: 18390723 NR Description: expressed protein
  misc_feature (13)..(211): Homolog of NCBI NO: 15241015 NR Description: putative protein; protein id: At5g01580.1
MSMASRPPLRRRRRLPLVPLLVLLCLSPACAAGRVPVSVYYEALCPFCSAFVVNDLSRVFRDGISSIAELRLVPFGNGRVSADGTVTCQHGEDECQLNAIEACVIRIWPDAEQHFPFIQCVEHLALTRKWDAWQSCFHETGLAYQPAIDCYISGYGRQLVLQYAAETNALQPPHRFVPWVVVNGKPLGDDYMNFEAYICSAYDGNLPKACKGKHLAIAQETKASRGDKVCPASKTIS

SEQ ID NO: 3950 - protein, 235 aa, Zea mays subsp. mays
  peptide (1)..(235): Ceres Seq. ID no. 12403590
  misc_feature (33)..(141): Pfam Name: Gamma interferon inducible lysosomal thiol Pfam Description: Gamma interferon inducible lysosomal thiol
  misc_feature (30)..(190): Homolog of NCBI NO: 7487272 NR Description: hypothetical protein T20K18.240 - Arabidopsis
  misc_feature (1)..(208): Homolog of NCBI NO: 15235523 NR Description: putative protein; protein id: At4g12900.1
  misc_feature (30)..(208): Homolog of NCBI NO: 21593852 NR Description: unknown [Arabidopsis thaliana]
  misc_feature (30)..(208): Homolog of NCBI NO: 15235540 NR Description: putative protein
  misc_feature (30)..(223): Homolog of NCBI NO: 18413888 NR Description: putative protein
  misc_feature (30)..(223): Homolog of NCBI NO: 21593076 NR Description: unknown [Arabidopsis thaliana]
  misc_feature (32)..(209): Homolog of NCBI NO: 30793446 NR Description: 27K protein [Triticum aestivum]
  misc_feature (32)..(208): Homolog of NCBI NO: 25406953 NR Description: hypothetical protein [imported] - Arabidopsis
  misc_feature (32)..(208): Homolog of NCBI NO: 18390723 NR Description: expressed protein
  misc_feature (11)..(209): Homolog of NCBI NO: 15241015 NR Description: putative protein; protein id: At5g01580.1
MASRPPLRRRRRLPLVPLLVLLCLSPACAAGRVPVSVYYEALCPFCSAFVVNDLSRVFRDGISSIAELRLVPFGNGRVSADGTVTCQHGEDECQLNAIEACVIRIWPDAEQHFPFIQCVEHLALTRKWDAWQSCFHETGLAYQPAIDCYISGYGRQLVLQYAAETNALQPPHRFVPWVVVNGKPLGDDYMNFEAYICSAYDGNLPKACKGKHLAIAQETKASRGDKVCPASKTIS

SEQ ID NO: 3951 - DNA, 2365 bp, Zea mays subsp. mays
  misc_feature (1)..(2365): Ceres Seq. ID no. 13635021
  misc_feature: MA Experiment ID: 108522 Result: Up-regulated in Transcription
  misc_feature: MA Experiment 108522 PARAMETER Experiment Name: Zm_42deg_Heat_P Parameter: Age (day) Value: 8
  misc_feature: MA Experiment 108522 PARAMETER Experiment Name: Zm_42deg_Heat_P Parameter: Organism Value: Zea mays
  misc_feature: MA Experiment 108522 PARAMETER Experiment Name: Zm_42deg_Heat_P Parameter: Plant Line Value: 35A19
  misc_feature: MA Experiment 108522 PARAMETER Experiment Name: Zm_42deg_Heat_P Parameter: Temperature (deg C) Value: 42 vs. 22
  misc_feature: MA Experiment 108522 PARAMETER Experiment Name: Zm_42deg_Heat_P Parameter: Timepoint (hr) Value: 1
  misc_feature: MA Experiment 108522 PARAMETER Experiment Name: Zm_42deg_Heat_P Parameter: Tissue Value: Aerial
  misc_feature: MA Experiment ID: 108523 Result: Up-regulated in Transcription
  misc_feature: MA Experiment 108523 PARAMETER Experiment Name: Zm_42deg_Heat_P Parameter: Age (day) Value: 8
  misc_feature: MA Experiment 108523 PARAMETER Experiment Name: Zm_42deg_Heat_P Parameter: Organism Value: Zea mays
  misc_feature: MA Experiment 108523 PARAMETER Experiment Name: Zm_42deg_Heat_P Parameter: Plant Line Value: 35A19
  misc_feature: MA Experiment 108523 PARAMETER Experiment Name: Zm_42deg_Heat_P Parameter: Temperature (deg C) Value: 42 vs. 22
  misc_feature: MA Experiment 108523 PARAMETER Experiment Name: Zm_42deg_Heat_P Parameter: Timepoint (hr) Value: 6
  misc_feature: MA Experiment 108523 PARAMETER Experiment Name: Zm_42deg_Heat_P Parameter: Tissue Value: Aerial
  misc_feature: MA Experiment ID: 108535 Result: Up-regulated in Transcription
  misc_feature: MA Experiment 108535 PARAMETER Experiment Name: Zm_Meristem_P Parameter: Age (day) Value: 8
  misc_feature: MA Experiment 108535 PARAMETER Experiment Name: Zm_Meristem_P Parameter: Organism Value: Zea mays
  misc_feature: MA Experiment 108535 PARAMETER Experiment Name: Zm_Meristem_P Parameter: Plant Line Value: 35A19
  misc_feature: MA Experiment 108535 PARAMETER Experiment Name: Zm_Meristem_P Parameter: Tissue Value: Root Meristem vs. Above Root Meristem
  misc_feature: MA Experiment ID: 108536 Result: Down-regulated in Transcription
  misc_feature: MA Experiment 108536 PARAMETER Experiment Name: Zm_Meristem_P Parameter: Age (day) Value: 8
  misc_feature: MA Experiment 108536 PARAMETER Experiment Name: Zm_Meristem_P Parameter: Organism Value: Zea mays
  misc_feature: MA Experiment 108536 PARAMETER Experiment Name: Zm_Meristem_P Parameter: Plant Line Value: 35A19
  misc_feature: MA Experiment 108536 PARAMETER Experiment Name: Zm_Meristem_P Parameter: Tissue Value: Shoot Meristem vs. Above Shoot Meristem
  misc_feature: MA Experiment ID: 108543 Result: Down-regulated in Transcription
  misc_feature: MA Experiment ID: 108544 Result: Down-regulated in Transcription
  misc_feature: MA Experiment ID: 20000108 Result: Up-regulated in Transcription
  misc_feature: MA Experiment 20000108 PARAMETER Experiment Name: Zm_Root-Tips_P Parameter: Age (day) Value: 12
  misc_feature: MA Experiment 20000108 PARAMETER Experiment Name: Zm_Root-Tips_P Parameter: Organism Value: Zea mays
  misc_feature: MA Experiment 20000108 PARAMETER Experiment Name: Zm_Root-Tips_P Parameter: Tissue Value: Root tips vs. Root mid region    35
  misc_feature: MA Experiment 20000108 PARAMETER Experiment Name: Zm_Root-Tips_P Parameter: Tissue Value: Root tips vs. Root mid region   Sequence Listing-Misc Features (4)
  misc_feature: MA Experiment ID: 20000492 Result: Up-regulated in Transcription
  misc_feature: MA Experiment 20000492 PARAMETER Experiment Name: Zm_Hybrid_Seed_Dev_P Parameter: DAP Value: 12
  misc_feature: MA Experiment 20000492 PARAMETER Experiment Name: Zm_Hybrid_Seed_Dev_P Parameter: Organism Value: Zea mays
  misc_feature: MA Experiment 20000492 PARAMETER Experiment Name: Zm_Hybrid_Seed_Dev_P Parameter: Plant Line Value: 35A19
  misc_feature: MA Experiment 20000492 PARAMETER Experiment Name: Zm_Hybrid_Seed_Dev_P Parameter: Tissue Value: Fert Kernel vs. Unfert Floret
  misc_feature: MA Experiment ID: 20000534 Result: Down-regulated in Transcription
  misc_feature: MA Experiment 20000534 PARAMETER Experiment Name: Zm_Hybrid_Pollen_P Parameter: Age (day) Value: 8
  misc_feature: MA Experiment 20000534 PARAMETER Experiment Name: Zm_Hybrid_Pollen_P Parameter: Organism Value: Zea mays
  misc_feature: MA Experiment 20000534 PARAMETER Experiment Name: Zm_Hybrid_Pollen_P Parameter: Plant Line Value: 35A19
  misc_feature: MA Experiment 20000534 PARAMETER Experiment Name: Zm_Hybrid_Pollen_P Parameter: Tissue Value: Pollen vs. Aerial
cgagcaagcagttcgaaacaaggatcgatccaggagcttccagaaggcgaggaggaagagggagaagggcgcgcgcgcgcgcagcgttcaagtggtgctggtgtcggccatggatcgggttcgtggatccgcgttcctgctcggcgtcctgctcgcaggatccctgttcgcgttttcagttgctaaggaggagaccaagaagctcggcactgtgattggtatcgatctcggaaccacctactcctgtgtgggtgtgtacaagaacggtcatgtcgagatcatcgccaatgaccagggtaaccgtatcacaccctcatgggttgccttcaccgatagcgagaggctcatcggtgaggctgccaagaaccaggcagctgtcaaccctgagaggaccatctttgacgtcaagcgtctcatcggaagaaagtttcaggataaggaagtccagagggacatgaaacttgtcccctacaagattattaacaaggatggcaagccatacattcaggtcaagatcaaggatggggagaacaaggtcttcagccccgaggagatcagtgccatgattcttggcaagatgaaggatactgctgaggcgtaccttggcaagaagatcaacgatgccgtcgtcactgtccctgcatacttcaatgatgcgcagaggcaggcaaccaaggatgctggtgtcattgccggcctcaatgttgctaggatcatcaatgagccaactgctgctgctattgcctatggtttggacaagaagggtggcgagaagaacatccttgtctttgaccttggtggtggtacttttgatgtcagtatcttgaccattgataacggtgtgtttgaggtgctggccaccaatggtgacacccatcttggaggtgaggattttgaccagaggatcatggaatacttcatcaagttgatcaagaagaagtacagcaaggacatcagcaaggacaaccgtgctcttggaaagctgaggagggaagctgagcgtgccaagagagcccttagcaaccagcaccaggtccgagttgagatcgagtccctctttgacgggaccgacttctcggagccgctgacccgtgccaggtttgaggagctgaacaacgatctgttccgcaagactatgggtcctgtcaagaaggccatggaggacgctggccttgagaagagccagatccacgagatcgtcctggttggtggaagcaccaggattcccaaggtccagcagctcctgaaggactacttcaatggcaaggagcccaacaagggtgtgaaccctgatgaggctgttgcctttggtgccgcggtgcagggaagcatcttgagcggcgagggtggtgacgagacaaaagatatcctcctccttgacgtggctcctctcaccctgggtattgagaccgtcggtggagtcatgaccaagttgatcccgaggaacactgtcatcccgaccaagaaatcgcaggtgttcaccacctaccaggaccagcagaccactgtctccatccaggtctttgagggtgagcgcagcatgaccaaggactgccgtcttctgggcaagttcgacctcaatggcattccgtcagctccgaggggcacaccccagatcgaggtgaccttcgaggtggacgccaacggtatcctgaacgtgaaggcggaggacaagggcacgggcaagtcggagaagatcacgatcacgaacgagaaggggcggctgagccaggaggagatcgaccgcatggtgcgggaggcggaggagttcgcggaggaggacaagaaggtgaaggagcggatcgacgcccgcaaccagctggagacgtacgtgtacaacatgaagaacacggtgggcgacaaggacaagctcgcggacaagctggaggcggaggagaaggagaaggtggaggaggccctcaaggaggcgctcgagtggctggacgacaaccagtccgccgagaaggaggactacgaggagaagctcaaggaggtggaggccgtgtgcaaccccatcgtgtcggccgtgtaccagcggtcgggcggcgcccccggtggcgatgccgacggcggcgtcgacgacgaccacgacgagctgtagatggtggtggggagcggtgacgtggagtgccgggaaccaagccaaattttgtaatgatgtttaggagggagggtggtggacaaaaaaactaatcttggtgctgctctgccaatagacgggctgagcatagaactttttttcccttctacttccttgtgattgttctttttatagaggattcgcattgcagtgtaatgtaaaaaaaagaagacgcgcttctgaaacttgttactacaagttaataatgaaatggtgcattgcatc

SEQ ID NO: 3952 - protein, 699 aa, Zea mays subsp. mays
  peptide (1)..(699): Ceres Seq. ID no. 13635022
EQAVRNKDRSRSFQKARRKREKGARARSVQVVLVSAMDRVRGSAFLLGVLLAGSLFAFSVAKEETKKLGTVIGIDLGTTYSCVGVYKNGHVEIIANDQGNRITPSWVAFTDSERLIGEAAKNQAAVNPERTIFDVKRLIGRKFQDKEVQRDMKLVPYKIINKDGKPYIQVKIKDGENKVFSPEEISAMILGKMKDTAEAYLGKKINDAVVTVPAYFNDAQRQATKDAGVIAGLNVARIINEPTAAAIAYGLDKKGGEKNILVFDLGGGTFDVSILTIDNGVFEVLATNGDTHLGGEDFDQRIMEYFIKLIKKKYSKDISKDNRALGKLRREAERAKRALSNQHQVRVEIESLFDGTDFSEPLTRARFEELNNDLFRKTMGPVKKAMEDAGLEKSQIHEIVLVGGSTRIPKVQQLLKDYFNGKEPNKGVNPDEAVAFGAAVQGSILSGEGGDETKDILLLDVAPLTLGIETVGGVMTKLIPRNTVIPTKKSQVFTTYQDQQTTVSIQVFEGERSMTKDCRLLGKFDLNGIPSAPRGTPQIEVTFEVDANGILNVKAEDKGTGKSEKITITNEKGRLSQEEIDRMVREAEEFAEEDKKVKERIDARNQLETYVYNMKNTVGDKDKLADKLEAEEKEKVEEALKEALEWLDDNQSAEKEDYEEKLKEVEAVCNPIVSAVYQRSGGAPGGDADGGVDDDHDEL

SEQ ID NO: 3953 - protein, 663 aa, Zea mays subsp. mays
  peptide (1)..(663): Ceres Seq. ID no. 13635023
MDRVRGSAFLLGVLLAGSLFAFSVAKEETKKLGTVIGIDLGTTYSCVGVYKNGHVEIIANDQGNRITPSWVAFTDSERLIGEAAKNQAAVNPERTIFDVKRLIGRKFQDKEVQRDMKLVPYKIINKDGKPYIQVKIKDGENKVFSPEEISAMILGKMKDTAEAYLGKKINDAVVTVPAYFNDAQRQATKDAGVIAGLNVARIINEPTAAAIAYGLDKKGGEKNILVFDLGGGTFDVSILTIDNGVFEVLATNGDTHLGGEDFDQRIMEYFIKLIKKKYSKDISKDNRALGKLRREAERAKRALSNQHQVRVEIESLFDGTDFSEPLTRARFEELNNDLFRKTMGPVKKAMEDAGLEKSQIHEIVLVGGSTRIPKVQQLLKDYFNGKEPNKGVNPDEAVAFGAAVQGSILSGEGGDETKDILLLDVAPLTLGIETVGGVMTKLIPRNTVIPTKKSQVFTTYQDQQTTVSIQVFEGERSMTKDCRLLGKFDLNGIPSAPRGTPQIEVTFEVDANGILNVKAEDKGTGKSEKITITNEKGRLSQEEIDRMVREAEEFAEEDKKVKERIDARNQLETYVYNMKNTVGDKDKLADKLEAEEKEKVEEALKEALEWLDDNQSAEKEDYEEKLKEVEAVCNPIVSAVYQRSGGAPGGDADGGVDDDHDEL

SEQ ID NO: 3954 - protein, 548 aa, Zea mays subsp. mays
  peptide (1)..(548): Ceres Seq. ID no. 13635024
MKLVPYKIINKDGKPYIQVKIKDGENKVFSPEEISAMILGKMKDTAEAYLGKKINDAVVTVPAYFNDAQRQATKDAGVIAGLNVARIINEPTAAAIAYGLDKKGGEKNILVFDLGGGTFDVSILTIDNGVFEVLATNGDTHLGGEDFDQRIMEYFIKLIKKKYSKDISKDNRALGKLRREAERAKRALSNQHQVRVEIESLFDGTDFSEPLTRARFEELNNDLFRKTMGPVKKAMEDAGLEKSQIHEIVLVGGSTRIPKVQQLLKDYFNGKEPNKGVNPDEAVAFGAAVQGSILSGEGGDETKDILLLDVAPLTLGIETVGGVMTKLIPRNTVIPTKKSQVFTTYQDQQTTVSIQVFEGERSMTKDCRLLGKFDLNGIPSAPRGTPQIEVTFEVDANGILNVKAEDKGTGKSEKITITNEKGRLSQEEIDRMVREAEEFAEEDKKVKERIDARNQLETYVYNMKNTVGDKDKLADKLEAEEKEKVEEALKEALEWLDDNQSAEKEDYEEKLKEVEAVCNPIVSAVYQRSGGAPGGDADGGVDDDHDEL

SEQ ID NO: 3955 - DNA, 2187 bp, Zea mays subsp. mays
  misc_feature (1)..(2187): Ceres Seq. ID no. 12362634
  misc_feature: MA Experiment ID: 20000487 Result: Up-regulated in Transcription
  misc_feature: MA Experiment 20000487 PARAMETER Experiment Name: Zm_50mM_NH4NO3_L_to_H_P Parameter: Organism Value: Zea mays
  misc_feature: MA Experiment 20000487 PARAMETER Experiment Name: Zm_50mM_NH4NO3_L_to_H_P Parameter: Timepoint (hr) Value: 4
  misc_feature: MA Experiment 20000487 PARAMETER Experiment Name: Zm_50mM_NH4NO3_L_to_H_P Parameter: Tissue Value: Leaves
  misc_feature: MA Experiment 20000487 PARAMETER Experiment Name: Zm_50mM_NH4NO3_L_to_H_P Parameter: Treatment Value: 50mM NH4NO3 vs. 100mM Mannitol
  misc_feature: MA Experiment ID: 20000535 Result: Up-regulated in Transcription
  misc_feature: MA Experiment 20000535 PARAMETER Experiment Name: Zm_Hybrid_Seed_Dev_P Parameter: DAP Value: 30 vs. 12
  misc_feature: MA Experiment 20000535 PARAMETER Experiment Name: Zm_Hybrid_Seed_Dev_P Parameter: Organism Value: Zea mays
  misc_feature: MA Experiment 20000535 PARAMETER Experiment Name: Zm_Hybrid_Seed_Dev_P Parameter: Plant Line Value: 35A19
  misc_feature: MA Experiment 20000535 PARAMETER Experiment Name: Zm_Hybrid_Seed_Dev_P Parameter: Tissue Value: Embryo vs. Unfert Floret
gcacgagaccattacctagaacatcctaatcgaaaactgcctctgacgaaaactctcctctgactccgctccacccccttctctcacttgtctatcggcggccgtcacctccgctgggctgctggcctcctcactttgcagttgctgcacaggcaagacacggaggcaggcaccacgagtccacgacgctcgctcgcgcgctccgtgaatcccctcgtgactcgtgagggctcgaggcccgacgggaggacgaggaggcaagaaccctagcgccggcgccggcggcccgtaaggctgctgagtgaaaatgggagtggcaggtcacaacgatccattgttaggtgaaacgacatgtgggtctttgctgcagcaacttcagctgatatgggatgaggttggcgaaagtgatgaagatcgtgacaagatgttacttcagctagagcaagagtgcttagatgtttataggagaaaggttgatcaggcttctagcctccaggtcatgtctcctccaacagctttccaactccaaatcggaactgactagactcctttctgcattaggagagtcatctatttctggtgctcctgacaagacatctggtacaatcaaggagcaactagcagctatatcaccatctttagagacactccgcaggaaaaaagagagtagggtgaaagagtttgctcatgtacaacttcagattcagatacttcgtgatgaaattgctggggatctacatattggtgaacagttggaaacaccccatgttaatgcggatgatctttcagtgaggagattaaatgaatatctttctgaactacaagccctgcaaaaggaaaagagtactaggctctcaaggattcttgaatccgtgagttcagtgcacgatctctgttctgtacttggcatggattttgtgggcactgttactaaagttcatccaagtcttgatgactctgttggtgtccaatccaagagcattagtggcgaaacaatatccaagctgtctaaaatggtgattgtacttgaagaagaaaaatcgaagaggtttgcaaagattcaagctctagcttcccagctatctgatctttggaacttaatggattctcctgtggaggaacagcaaccttttcgtcacgtaacatgcataatgtcctcagcattggatgatgtgatagttccaggagctctggctcttgatgtaattcagcaggcggaactcgaagttgaaaggcttgatcagctaaaagctagtaggatgaaggatattgcattcaagaaacagactgaacttgaagatatatatgcccgggctcatgttgcagtagattctagtgctgcaagagataggataatgtctattattgagtccagtagtttcgagccttcagaactactggctgatatggagaaccagatacttaaagcaaatgaggagtccttaagcagaaaggacatattggagagggttgataggtggatgtcagcatgtgaagaagaaagctggcttgaagactacagccgggacgataacaggtacagtgcaactcggggtgcacatctgaatctgaagcgtgcagaaaaggcccgtgttttggtcaataaaattccggctattgttgacacactgcttgcaaagacccgggcatgggaacaagagcatggcgtggccttcacctacgacggcgtccctcttcttgcgatgctggacgaatacaaaatcctgaggcaggagaaggaagacgagaagcgacgaatgagggaccagaaaaagatgaacgaacagctagccgccgaacaggagaagctgttcgggtcaaaaccgagccccgcgcggccgcagtcgtcctcgaggaaggtggctggcgcacggaccaacggcggtggcacgccagctcgcaggctgtcggccctccagagcggcggcaggaccgctagccgggatgggaggagggatgcgagcaggcccgtggcccccgtgaactacgtcgccatcgccaaggaggacgtggcctcgcaggcgtccagcaaccacactgggccgtccaccccctgaccgggccgtgccagcagtaactgaactgttgtggcggtgcttagatatatatataccagtgcagtgcagtagtcagagctgattgtagatcggataatggaaaaaaacaaacgaagctggatatggtatc

SEQ ID NO: 3956 - protein, 533 aa, Zea mays subsp. mays
  peptide (1)..(533): Ceres Seq. ID no. 12362635
  misc_feature (13)..(531): Pfam Name: Microtubule associated protein (MAP65/ASE1 family) Pfam Description: Microtubule associated protein (MAP65/ASE1
  misc_feature (13)..(531): Pfam Name: Microtubule associated protein (MAP65/ASE1 family) Pfam Description: Microtubule associated protein (MAP65/ASE1
  misc_feature (13)..(533): Homolog of NCBI NO: 11558256 NR Description: microtubule-associated protein MAP65-1c
  misc_feature (13)..(491): Homolog of NCBI NO: 15217774 NR Description: hypothetical protein; protein id: At1g27920.1
  misc_feature (12)..(533): Homolog of NCBI NO: 27357984 NR Description: Unknown protein [Oryza sativa (japonica
  misc_feature (5)..(524): Homolog of NCBI NO: 18416818 NR Description: putative protein
  misc_feature (13)..(533): Homolog of NCBI NO: 11558254 NR Description: microtubule-associated protein MAP65-1b
  misc_feature (13)..(491): Homolog of NCBI NO: 15217774 NR Description: hypothetical protein; protein id: At1g27920.1
  misc_feature (12)..(533): Homolog of NCBI NO: 27357984 NR Description: Unknown protein [Oryza sativa (japonica
  misc_feature (5)..(524): Homolog of NCBI NO: 18416818 NR Description: putative protein
  misc_feature (13)..(533): Homolog of NCBI NO: 11558252 NR Description: microtubule-associated protein MAP65-1a
  misc_feature (13)..(533): Homolog of NCBI NO: 11558256 NR Description: microtubule-associated protein MAP65-1c
  misc_feature (13)..(533): Homolog of NCBI NO: 15240485 NR Description: putative protein; protein id: At5g55230.1
  misc_feature (13)..(533): Homolog of NCBI NO: 11558254 NR Description: microtubule-associated protein MAP65-1b
  misc_feature (13)..(533): Homolog of NCBI NO: 28200790 NR Description: 65kD microtubule associated protein [Daucus
  misc_feature (5)..(385): Homolog of NCBI NO: 7485328 NR Description: hypothetical protein F10M23.100 - Arabidopsis
  misc_feature (14)..(485): Homolog of NCBI NO: 15242132 NR Description: putative protein; protein id: At5g51600.1
  misc_feature (13)..(533): Homolog of NCBI NO: 15240485 NR Description: putative protein; protein id: At5g55230.1
  misc_feature (13)..(533): Homolog of NCBI NO: 28200790 NR Description: 65kD microtubule associated protein [Daucus
  misc_feature (5)..(385): Homolog of NCBI NO: 7485328 NR Description: hypothetical protein F10M23.100 - Arabidopsis
  misc_feature (14)..(485): Homolog of NCBI NO: 15242132 NR Description: putative protein; protein id: At5g51600.1
  misc_feature (13)..(533): Homolog of NCBI NO: 11558252 NR Description: microtubule-associated protein MAP65-1a
MFIGERLIRLLASRSCLLQQLSNSKSELTRLLSALGESSISGAPDKTSGTIKEQLAAISPSLETLRRKKESRVKEFAHVQLQIQILRDEIAGDLHIGEQLETPHVNADDLSVRRLNEYLSELQALQKEKSTRLSRILESVSSVHDLCSVLGMDFVGTVTKVHPSLDDSVGVQSKSISGETISKLSKMVIVLEEEKSKRFAKIQALASQLSDLWNLMDSPVEEQQPFRHVTCIMSSALDDVIVPGALALDVIQQAELEVERLDQLKASRMKDIAFKKQTELEDIYARAHVAVDSSAARDRIMSIIESSSFEPSELLADMENQILKANEESLSRKDILERVDRWMSACEEESWLEDYSRDDNRYSATRGAHLNLKRAEKARVLVNKIPAIVDTLLAKTRAWEQEHGVAFTYDGVPLLAMLDEYKILRQEKEDEKRRMRDQKKMNEQLAAEQEKLFGSKPSPARPQSSSRKVAGARTNGGGTPARRLSALQSGGRTASRDGRRDASRPVAPVNYVAIAKEDVASQASSNHTGPSTP

SEQ ID NO: 3957 - protein, 382 aa, Zea mays subsp. mays
  peptide (1)..(382): Ceres Seq. ID no. 12362636
  misc_feature (1)..(380): Pfam Name: Microtubule associated protein (MAP65/ASE1 family) Pfam Description: Microtubule associated protein (MAP65/ASE1
  misc_feature (1)..(380): Pfam Name: Microtubule associated protein (MAP65/ASE1 family) Pfam Description: Microtubule associated protein (MAP65/ASE1
  misc_feature (1)..(340): Homolog of NCBI NO: 15217774 NR Description: hypothetical protein; protein id: At1g27920.1
  misc_feature (1)..(334): Homolog of NCBI NO: 15242132 NR Description: putative protein; protein id: At5g51600.1
  misc_feature (1)..(382): Homolog of NCBI NO: 27357984 NR Description: Unknown protein [Oryza sativa (japonica
  misc_feature (1)..(234): Homolog of NCBI NO: 7485328 NR Description: hypothetical protein F10M23.100 - Arabidopsis
  misc_feature (1)..(373): Homolog of NCBI NO: 18416818 NR Description: putative protein
  misc_feature (1)..(340): Homolog of NCBI NO: 15217774 NR Description: hypothetical protein; protein id: At1g27920.1
  misc_feature (1)..(382): Homolog of NCBI NO: 27357984 NR Description: Unknown protein [Oryza sativa (japonica
  misc_feature (1)..(373): Homolog of NCBI NO: 18416818 NR Description: putative protein
  misc_feature (1)..(382): Homolog of NCBI NO: 11558252 NR Description: microtubule-associated protein MAP65-1a
  misc_feature (1)..(382): Homolog of NCBI NO: 11558256 NR Description: microtubule-associated protein MAP65-1c
  misc_feature (1)..(382): Homolog of NCBI NO: 15240485 NR Description: putative protein; protein id: At5g55230.1
  misc_feature (1)..(382): Homolog of NCBI NO: 11558254 NR Description: microtubule-associated protein MAP65-1b
  misc_feature (1)..(382): Homolog of NCBI NO: 28200790 NR Description: 65kD microtubule associated protein [Daucus
  misc_feature (1)..(234): Homolog of NCBI NO: 7485328 NR Description: hypothetical protein F10M23.100 - Arabidopsis
  misc_feature (1)..(334): Homolog of NCBI NO: 15242132 NR Description: putative protein; protein id: At5g51600.1
  misc_feature (1)..(382): Homolog of NCBI NO: 28200790 NR Description: 65kD microtubule associated protein [Daucus
  misc_feature (1)..(382): Homolog of NCBI NO: 11558254 NR Description: microtubule-associated protein MAP65-1b
  misc_feature (1)..(382): Homolog of NCBI NO: 15240485 NR Description: putative protein; protein id: At5g55230.1
  misc_feature (1)..(382): Homolog of NCBI NO: 11558256 NR Description: microtubule-associated protein MAP65-1c
  misc_feature (1)..(382): Homolog of NCBI NO: 11558252 NR Description: microtubule-associated protein MAP65-1a
MDFVGTVTKVHPSLDDSVGVQSKSISGETISKLSKMVIVLEEEKSKRFAKIQALASQLSDLWNLMDSPVEEQQPFRHVTCIMSSALDDVIVPGALALDVIQQAELEVERLDQLKASRMKDIAFKKQTELEDIYARAHVAVDSSAARDRIMSIIESSSFEPSELLADMENQILKANEESLSRKDILERVDRWMSACEEESWLEDYSRDDNRYSATRGAHLNLKRAEKARVLVNKIPAIVDTLLAKTRAWEQEHGVAFTYDGVPLLAMLDEYKILRQEKEDEKRRMRDQKKMNEQLAAEQEKLFGSKPSPARPQSSSRKVAGARTNGGGTPARRLSALQSGGRTASRDGRRDASRPVAPVNYVAIAKEDVASQASSNHTGPSTP

SEQ ID NO: 3958 - protein, 347 aa, Zea mays subsp. mays
  peptide (1)..(347): Ceres Seq. ID no. 12362637
  misc_feature (1)..(345): Pfam Name: Microtubule associated protein (MAP65/ASE1 family) Pfam Description: Microtubule associated protein (MAP65/ASE1
  misc_feature (1)..(345): Pfam Name: Microtubule associated protein (MAP65/ASE1 family) Pfam Description: Microtubule associated protein (MAP65/ASE1
  misc_feature (1)..(305): Homolog of NCBI NO: 15217774 NR Description: hypothetical protein; protein id: At1g27920.1
  misc_feature (1)..(299): Homolog of NCBI NO: 15242132 NR Description: putative protein; protein id: At5g51600.1
  misc_feature (1)..(347): Homolog of NCBI NO: 27357984 NR Description: Unknown protein [Oryza sativa (japonica
  misc_feature (1)..(199): Homolog of NCBI NO: 7485328 NR Description: hypothetical protein F10M23.100 - Arabidopsis
  misc_feature (1)..(338): Homolog of NCBI NO: 18416818 NR Description: putative protein
  misc_feature (1)..(305): Homolog of NCBI NO: 15217774 NR Description: hypothetical protein; protein id: At1g27920.1
  misc_feature (1)..(347): Homolog of NCBI NO: 27357984 NR Description: Unknown protein [Oryza sativa (japonica
  misc_feature (1)..(338): Homolog of NCBI NO: 18416818 NR Description: putative protein
  misc_feature (1)..(347): Homolog of NCBI NO: 11558252 NR Description: microtubule-associated protein MAP65-1a
  misc_feature (1)..(347): Homolog of NCBI NO: 11558256 NR Description: microtubule-associated protein MAP65-1c
  misc_feature (1)..(347): Homolog of NCBI NO: 15240485 NR Description: putative protein; protein id: At5g55230.1
  misc_feature (1)..(347): Homolog of NCBI NO: 11558254 NR Description: microtubule-associated protein MAP65-1b
  misc_feature (1)..(347): Homolog of NCBI NO: 28200790 NR Description: 65kD microtubule associated protein [Daucus
  misc_feature (1)..(199): Homolog of NCBI NO: 7485328 NR Description: hypothetical protein F10M23.100 - Arabidopsis
  misc_feature (1)..(299): Homolog of NCBI NO: 15242132 NR Description: putative protein; protein id: At5g51600.1
  misc_feature (1)..(347): Homolog of NCBI NO: 28200790 NR Description: 65kD microtubule associated protein [Daucus
  misc_feature (1)..(347): Homolog of NCBI NO: 11558254 NR Description: microtubule-associated protein MAP65-1b
  misc_feature (1)..(347): Homolog of NCBI NO: 15240485 NR Description: putative protein; protein id: At5g55230.1
  misc_feature (1)..(347): Homolog of NCBI NO: 11558256 NR Description: microtubule-associated protein MAP65-1c
  misc_feature (1)..(347): Homolog of NCBI NO: 11558252 NR Description: microtubule-associated protein MAP65-1a
MVIVLEEEKSKRFAKIQALASQLSDLWNLMDSPVEEQQPFRHVTCIMSSALDDVIVPGALALDVIQQAELEVERLDQLKASRMKDIAFKKQTELEDIYARAHVAVDSSAARDRIMSIIESSSFEPSELLADMENQILKANEESLSRKDILERVDRWMSACEEESWLEDYSRDDNRYSATRGAHLNLKRAEKARVLVNKIPAIVDTLLAKTRAWEQEHGVAFTYDGVPLLAMLDEYKILRQEKEDEKRRMRDQKKMNEQLAAEQEKLFGSKPSPARPQSSSRKVAGARTNGGGTPARRLSALQSGGRTASRDGRRDASRPVAPVNYVAIAKEDVASQASSNHTGPSTP

SEQ ID NO: 3959 - DNA, 945 bp, Zea mays subsp. mays
  misc_feature (1)..(945): Ceres Seq. ID no. 13636168
  misc_feature: MA Experiment ID: 108529 Result: Up-regulated in Transcription
  misc_feature: MA Experiment 108529 PARAMETER Experiment Name: Zm_Imbibed_Seeds_P Parameter: Age (day) Value: 5 vs. 2
  misc_feature: MA Experiment 108529 PARAMETER Experiment Name: Zm_Imbibed_Seeds_P Parameter: Organism Value: Zea mays
  misc_feature: MA Experiment 108529 PARAMETER Experiment Name: Zm_Imbibed_Seeds_P Parameter: Plant Line Value: 35A19
  misc_feature: MA Experiment 108529 PARAMETER Experiment Name: Zm_Imbibed_Seeds_P Parameter: Tissue Value: Roots vs. Embryo
  misc_feature: MA Experiment ID: 108556 Result: Down-regulated in Transcription
  misc_feature: MA Experiment 108556 PARAMETER Experiment Name: Zm_Drought_P Parameter: Age (day) Value: 9
  misc_feature: MA Experiment 108556 PARAMETER Experiment Name: Zm_Drought_P Parameter: Organism Value: Zea mays
  misc_feature: MA Experiment 108556 PARAMETER Experiment Name: Zm_Drought_P Parameter: Plant Line Value: 35A19
  misc_feature: MA Experiment 108556 PARAMETER Experiment Name: Zm_Drought_P Parameter: Timepoint (hr) Value: 24
  misc_feature: MA Experiment 108556 PARAMETER Experiment Name: Zm_Drought_P Parameter: Tissue Value: Aerial
  misc_feature: MA Experiment 108556 PARAMETER Experiment Name: Zm_Drought_P Parameter: Treatment Value: Drought vs. No Drought
  misc_feature: MA Experiment ID: 108688 Result: Down-regulated in Transcription
  misc_feature: MA Experiment 108688 PARAMETER Experiment Name: Zm_Embryos-Flowers__P Parameter: Tissue Value: Immature Flowers vs. Aerial+
  misc_feature: MA Experiment ID: 20000108 Result: Down-regulated in Transcription
  misc_feature: MA Experiment 20000108 PARAMETER Experiment Name: Zm_Root-Tips_P Parameter: Age (day) Value: 12
  misc_feature: MA Experiment 20000108 PARAMETER Experiment Name: Zm_Root-Tips_P Parameter: Organism Value: Zea mays
  misc_feature: MA Experiment 20000108 PARAMETER Experiment Name: Zm_Root-Tips_P Parameter: Tissue Value: Root tips vs. Root mid region    35
  misc_feature: MA Experiment 20000108 PARAMETER Experiment Name: Zm_Root-Tips_P Parameter: Tissue Value: Root tips vs. Root mid region   Sequence Listing-Misc Features (4)
  misc_feature: MA Experiment ID: 20000477 Result: Up-regulated in Transcription
  misc_feature: MA Experiment 20000477 PARAMETER Experiment Name: Zm_5mM_SA_P Parameter: Age (day) Value: 10
  misc_feature: MA Experiment 20000477 PARAMETER Experiment Name: Zm_5mM_SA_P Parameter: Organism Value: Zea mays
  misc_feature: MA Experiment 20000477 PARAMETER Experiment Name: Zm_5mM_SA_P Parameter: Plant Line Value: 35A19
  misc_feature: MA Experiment 20000477 PARAMETER Experiment Name: Zm_5mM_SA_P Parameter: Timepoint (hr) Value: 48
  misc_feature: MA Experiment 20000477 PARAMETER Experiment Name: Zm_5mM_SA_P Parameter: Tissue Value: Aerial
  misc_feature: MA Experiment 20000477 PARAMETER Experiment Name: Zm_5mM_SA_P Parameter: Treatment Value: 5mM SA vs. No Treatment
atatagaacgctagctgccggccggtgcagaccacgggaggcgcgggcgcgcgctataaaagccgagccagtgggcgcggccagtgtcacaactcacaattcacatcgaggtctcagcttcaggaaagggaaggaagcatgttcgggcaccaccaccaccacggccacggcgggcaccaccaggccccgccgccgcacgagcagacgctgttcaggatcttctgccgcgccgacgaggcgtactgcctcaccgtgcgccacgacgccgtcgtcctcgcgcccaccaacccccgcgacgagtaccagcactggtacaaggacatgaggcacagcacgaaggtgagggacgcggagggcccagccggcgttcgcgctcatcaacagggccaccggcctcgccatcaagcactcgctcggccagtcccatcccgtgaagctagtgccctacaacgcggagtacctggacgagtcggtgctgtggacggagagccgcgacgtcgggcacggcttccgctgcgtgcgcatggtgaacaacatctacctcaacatggacgccttccacggcgacaaggaccacggcggcgtccacgacggcaccaccgtcgtcctctgggagtgggccaagggcgacaaccagcgctggaagatcctgccctggtgaacgtgaacagagacgagctagatgaatccaaggaaccttacctagctgctgccgccgccgcctaattcgtcctcctccgctctagctgttatctgtctgtgtcttcgcgtcctcggttcctgaatggacgaataatatatagcatgcatgtacggctagcgaccatgtctgaatgacatcttcgttgctgctgctgctgctactgctacctgtccgtttggtgttctaaaagactctgatgagtggttctgaatgtctgcatttcaagtttgctgtgtgatgtc

SEQ ID NO: 3960 - protein, 195 aa, Zea mays subsp. mays
  peptide (1)..(195): Ceres Seq. ID no. 13636169
  misc_feature (1)..(75): Homolog of NCBI NO: 34394517 NR Description: r40g2 protein [Oryza sativa (japonica
  misc_feature (1)..(75): Homolog of NCBI NO: 7489571 NR Description: r40c1 protein - rice >gi|1296955|emb|CAA64683.1|
  misc_feature (1)..(75): Homolog of NCBI NO: 7489572 NR Description: r40g2 protein - rice (fragment)
  misc_feature (1)..(75): Homolog of NCBI NO: 34902150 NR Description: Putative r40c1 protein - rice [Oryza sativa
  misc_feature (26)..(75): Homolog of NCBI NO: 34394517 NR Description: r40g2 protein [Oryza sativa (japonica
  misc_feature (26)..(75): Homolog of NCBI NO: 34394518 NR Description: putative r40c2 protein [Oryza sativa (japonica
  misc_feature (26)..(75): Homolog of NCBI NO: 7489572 NR Description: r40g2 protein - rice (fragment)
  misc_feature (7)..(75): Homolog of NCBI NO: 34894060 NR Description: putative r40c1 protein [Oryza sativa (japonica group)] >gi|10697200|dbj|BAB16331.1| putative r40c1 protein
  misc_feature (26)..(73): Homolog of NCBI NO: 18404934 NR Description: lectin repeat protein family [Arabidopsis >gi|15724197|gb|AAL06490.1|AF411801_1 At2g39050/T7F6.22 thaliana] >gi|20147403|gb|AAM10411.1| At2g39050/T7F6.22
  misc_feature (26)..(73): Homolog of NCBI NO: 25408635 NR Description: hypothetical protein At2g39050 [imported] -
MFGHHHHHGHGGHHQAPPPHEQTLFRIFCRADEAYCLTVRHDAVVLAPTNPRDEYQHWYKDMRHSTKVRDAEGPAGVRAHQQGHRPRHQALARPVPSREASALQRGVPGRVGAVDGEPRRRARLPLRAHGEQHLPQHGRLPRRQGPRRRPRRHHRRPLGVGQGRQPALEDPALVNVNRDELDESKEPYLAAAAAA

SEQ ID NO: 3961 - protein, 134 aa, Zea mays subsp. mays
  peptide (1)..(134): Ceres Seq. ID no. 13636170
  misc_feature (1)..(14): Homolog of NCBI NO: 34394518 NR Description: putative r40c2 protein [Oryza sativa (japonica
  misc_feature (1)..(14): Homolog of NCBI NO: 7489572 NR Description: r40g2 protein - rice (fragment)
  misc_feature (1)..(14): Homolog of NCBI NO: 34894060 NR Description: putative r40c1 protein [Oryza sativa (japonica group)] >gi|10697200|dbj|BAB16331.1| putative r40c1 protein
  misc_feature (1)..(12): Homolog of NCBI NO: 18404934 NR Description: lectin repeat protein family [Arabidopsis >gi|15724197|gb|AAL06490.1|AF411801_1 At2g39050/T7F6.22 thaliana] >gi|20147403|gb|AAM10411.1| At2g39050/T7F6.22
  misc_feature (1)..(12): Homolog of NCBI NO: 25408635 NR Description: hypothetical protein At2g39050 [imported] -
  misc_feature (1)..(14): Homolog of NCBI NO: 34394517 NR Description: r40g2 protein [Oryza sativa (japonica
  misc_feature (1)..(14): Homolog of NCBI NO: 7489571 NR Description: r40c1 protein - rice >gi|1296955|emb|CAA64683.1|
  misc_feature (1)..(14): Homolog of NCBI NO: 7489572 NR Description: r40g2 protein - rice (fragment)
  misc_feature (1)..(14): Homolog of NCBI NO: 34902150 NR Description: Putative r40c1 protein - rice [Oryza sativa
  misc_feature (1)..(14): Homolog of NCBI NO: 34394517 NR Description: r40g2 protein [Oryza sativa (japonica
MRHSTKVRDAEGPAGVRAHQQGHRPRHQALARPVPSREASALQRGVPGRVGAVDGEPRRRARLPLRAHGEQHLPQHGRLPRRQGPRRRPRRHHRRPLGVGQGRQPALEDPALVNVNRDELDESKEPYLAAAAAA

SEQ ID NO: 3962 - protein, 107 aa, Zea mays subsp. mays
  peptide (1)..(107): Ceres Seq. ID no. 13636171
  misc_feature (50)..(107): Pfam Name: Equine herpesvirus glycoprotein gp2 Pfam Description: Equine herpesvirus glycoprotein gp2
  misc_feature (54)..(107): Homolog of NCBI NO: 34394516 NR Description: putative r40c1 protein [Oryza sativa (japonica
  misc_feature (50)..(107): Homolog of NCBI NO: 17221108 NR Description: glycoprotein gp2 [Equine herpesvirus 1]
  misc_feature (50)..(107): Homolog of NCBI NO: 17221104 NR Description: glycoprotein gp2 [Equine herpesvirus 1]
  misc_feature (50)..(107): Homolog of NCBI NO: 17221110 NR Description: glycoprotein gp2 [Equine herpesvirus 1]
  misc_feature (50)..(107): Homolog of NCBI NO: 17221100 NR Description: glycoprotein gp2 [Equine herpesvirus 1]
  misc_feature (18)..(107): Homolog of NCBI NO: 17221108 NR Description: glycoprotein gp2 [Equine herpesvirus 1]
  misc_feature (18)..(107): Homolog of NCBI NO: 17221104 NR Description: glycoprotein gp2 [Equine herpesvirus 1]
  misc_feature (18)..(107): Homolog of NCBI NO: 17221110 NR Description: glycoprotein gp2 [Equine herpesvirus 1]
  misc_feature (18)..(107): Homolog of NCBI NO: 17221100 NR Description: glycoprotein gp2 [Equine herpesvirus 1]
  misc_feature (50)..(107): Homolog of NCBI NO: 17221114 NR Description: glycoprotein gp2 [Equine herpesvirus 1]
YRTLAAGRCRPREARARAIKAEPVGAASVTTHNSHRGLSFRKGKEACSGTTTTTATAGTTRPRRRTSRRCSGSSAAPTRRTASPCATTPSSSRPPTPATSTSTGTRT

SEQ ID NO: 3963 - DNA, 1510 bp, Zea mays subsp. mays
  misc_feature (1)..(1510): Ceres Seq. ID no. 12345944
  misc_feature: MA Experiment ID: 108504 Result: Down-regulated in Transcription
  misc_feature: MA Experiment 108504 PARAMETER Experiment Name: Zm_Drought_P Parameter: Age (day) Value: 8
  misc_feature: MA Experiment 108504 PARAMETER Experiment Name: Zm_Drought_P Parameter: Organism Value: Zea mays
  misc_feature: MA Experiment 108504 PARAMETER Experiment Name: Zm_Drought_P Parameter: Plant Line Value: 35A19
  misc_feature: MA Experiment 108504 PARAMETER Experiment Name: Zm_Drought_P Parameter: Timepoint (hr) Value: 12
  misc_feature: MA Experiment 108504 PARAMETER Experiment Name: Zm_Drought_P Parameter: Tissue Value: Aerial
  misc_feature: MA Experiment 108504 PARAMETER Experiment Name: Zm_Drought_P Parameter: Treatment Value: Drought vs. No Drought
  misc_feature: MA Experiment ID: 108523 Result: Down-regulated in Transcription
  misc_feature: MA Experiment 108523 PARAMETER Experiment Name: Zm_42deg_Heat_P Parameter: Age (day) Value: 8
  misc_feature: MA Experiment 108523 PARAMETER Experiment Name: Zm_42deg_Heat_P Parameter: Organism Value: Zea mays
  misc_feature: MA Experiment 108523 PARAMETER Experiment Name: Zm_42deg_Heat_P Parameter: Plant Line Value: 35A19
  misc_feature: MA Experiment 108523 PARAMETER Experiment Name: Zm_42deg_Heat_P Parameter: Temperature (deg C) Value: 42 vs. 22
  misc_feature: MA Experiment 108523 PARAMETER Experiment Name: Zm_42deg_Heat_P Parameter: Timepoint (hr) Value: 6
  misc_feature: MA Experiment 108523 PARAMETER Experiment Name: Zm_42deg_Heat_P Parameter: Tissue Value: Aerial
  misc_feature: MA Experiment ID: 108535 Result: Down-regulated in Transcription
  misc_feature: MA Experiment 108535 PARAMETER Experiment Name: Zm_Meristem_P Parameter: Age (day) Value: 8
  misc_feature: MA Experiment 108535 PARAMETER Experiment Name: Zm_Meristem_P Parameter: Organism Value: Zea mays
  misc_feature: MA Experiment 108535 PARAMETER Experiment Name: Zm_Meristem_P Parameter: Plant Line Value: 35A19
  misc_feature: MA Experiment 108535 PARAMETER Experiment Name: Zm_Meristem_P Parameter: Tissue Value: Root Meristem vs. Above Root Meristem
  misc_feature: MA Experiment ID: 108543 Result: Up-regulated in Transcription
  misc_feature: MA Experiment ID: 108556 Result: Down-regulated in Transcription
  misc_feature: MA Experiment 108556 PARAMETER Experiment Name: Zm_Drought_P Parameter: Age (day) Value: 9
  misc_feature: MA Experiment 108556 PARAMETER Experiment Name: Zm_Drought_P Parameter: Organism Value: Zea mays
  misc_feature: MA Experiment 108556 PARAMETER Experiment Name: Zm_Drought_P Parameter: Plant Line Value: 35A19
  misc_feature: MA Experiment 108556 PARAMETER Experiment Name: Zm_Drought_P Parameter: Timepoint (hr) Value: 24
  misc_feature: MA Experiment 108556 PARAMETER Experiment Name: Zm_Drought_P Parameter: Tissue Value: Aerial
  misc_feature: MA Experiment 108556 PARAMETER Experiment Name: Zm_Drought_P Parameter: Treatment Value: Drought vs. No Drought
  misc_feature: MA Experiment ID: 108559 Result: Down-regulated in Transcription
  misc_feature: MA Experiment 108559 PARAMETER Experiment Name: Zm_5mM_NO_P Parameter: Age (day) Value: 8
  misc_feature: MA Experiment 108559 PARAMETER Experiment Name: Zm_5mM_NO_P Parameter: Organism Value: Zea mays
  misc_feature: MA Experiment 108559 PARAMETER Experiment Name: Zm_5mM_NO_P Parameter: Plant Line Value: 35A19
  misc_feature: MA Experiment 108559 PARAMETER Experiment Name: Zm_5mM_NO_P Parameter: Timepoint (hr) Value: 12
  misc_feature: MA Experiment 108559 PARAMETER Experiment Name: Zm_5mM_NO_P Parameter: Tissue Value: Aerial
  misc_feature: MA Experiment 108559 PARAMETER Experiment Name: Zm_5mM_NO_P Parameter: Treatment Value: 5mM NO vs. No Treatment
  misc_feature: MA Experiment ID: 108597 Result: Down-regulated in Transcription
  misc_feature: MA Experiment 108597 PARAMETER Experiment Name: Zm_100uM_ABA_P Parameter: Age (day) Value: 9
  misc_feature: MA Experiment 108597 PARAMETER Experiment Name: Zm_100uM_ABA_P Parameter: Organism Value: Zea mays
  misc_feature: MA Experiment 108597 PARAMETER Experiment Name: Zm_100uM_ABA_P Parameter: Plant Line Value: 35A19
  misc_feature: MA Experiment 108597 PARAMETER Experiment Name: Zm_100uM_ABA_P Parameter: Timepoint (hr) Value: 24
  misc_feature: MA Experiment 108597 PARAMETER Experiment Name: Zm_100uM_ABA_P Parameter: Tissue Value: Aerial
  misc_feature: MA Experiment 108597 PARAMETER Experiment Name: Zm_100uM_ABA_P Parameter: Treatment Value: 100uM ABA vs. No Treatment
  misc_feature: MA Experiment ID: 108688 Result: Down-regulated in Transcription
  misc_feature: MA Experiment 108688 PARAMETER Experiment Name: Zm_Embryos-Flowers__P Parameter: Tissue Value: Immature Flowers vs. Aerial+
  misc_feature: MA Experiment ID: 20000478 Result: Down-regulated in Transcription
  misc_feature: MA Experiment 20000478 PARAMETER Experiment Name: Zm_5mM_SA_P Parameter: Age (day) Value: 11
  misc_feature: MA Experiment 20000478 PARAMETER Experiment Name: Zm_5mM_SA_P Parameter: Organism Value: Zea mays
  misc_feature: MA Experiment 20000478 PARAMETER Experiment Name: Zm_5mM_SA_P Parameter: Plant Line Value: 35A19
  misc_feature: MA Experiment 20000478 PARAMETER Experiment Name: Zm_5mM_SA_P Parameter: Timepoint (hr) Value: 72
  misc_feature: MA Experiment 20000478 PARAMETER Experiment Name: Zm_5mM_SA_P Parameter: Tissue Value: Aerial
  misc_feature: MA Experiment 20000478 PARAMETER Experiment Name: Zm_5mM_SA_P Parameter: Treatment Value: 5mM SA vs. No Treatment
  misc_feature: MA Experiment ID: 20000479 Result: Down-regulated in Transcription
  misc_feature: MA Experiment 20000479 PARAMETER Experiment Name: Zm_Drought_P Parameter: Age (day) Value: 10
  misc_feature: MA Experiment 20000479 PARAMETER Experiment Name: Zm_Drought_P Parameter: Organism Value: Zea mays
  misc_feature: MA Experiment 20000479 PARAMETER Experiment Name: Zm_Drought_P Parameter: Plant Line Value: 35A19
  misc_feature: MA Experiment 20000479 PARAMETER Experiment Name: Zm_Drought_P Parameter: Timepoint (hr) Value: 48
  misc_feature: MA Experiment 20000479 PARAMETER Experiment Name: Zm_Drought_P Parameter: Tissue Value: Aerial
  misc_feature: MA Experiment 20000479 PARAMETER Experiment Name: Zm_Drought_P Parameter: Treatment Value: Drought vs. No Drought
  misc_feature: MA Experiment ID: 20000626 Result: Down-regulated in Transcription
  misc_feature: MA Experiment 20000626 PARAMETER Experiment Name: Zm_Herbicide-Treatments_P Parameter: Timepoint (hr) Value: 12
  misc_feature: MA Experiment 20000626 PARAMETER Experiment Name: Zm_Herbicide-Treatments_P Parameter: Tissue Value: Aerial
  misc_feature: MA Experiment 20000626 PARAMETER Experiment Name: Zm_Herbicide-Treatments_P Parameter: Treatment Value: Roundup vs. No Treatment
acacgacgccgcgccccgcggaatccatcttctccatctccaactgtgctactgtaggagctgctgcaatcggggagagaaacgcgaccagtttgccggcaccaacacggcctgctgccacatctccggcatcttcttccgggttggggactgaaaactgtcgctgttagttggggttggggactctttcagtggtaagtccacatgcaggctgcagcaagcaactggacgatggtggcttccaggcagtcagagaacaatgcacaagaagaagcatcaccattgacgactcctaacgccaacatagccaggatcatcccttcgctgcccctcgagaccaggtggccaccgttccctctccgacggtacgccaatttttggctgcctgaggtaacattgaaggaaggcgtccccggcgttcattcctgcttcgagccgagacccaccgacgtgttcctcgcaagcttccccaagtctggcaccacctggctcaaggccctcgccttcgcgacgctgaagcgttccacgcatccgccgttcgacgacgaccatccgctgcgccattgcaaccctcatgactgtgtcaggttcctcgaacttgatttcaaccagcagaaggatgagctcgaggcgctcccgtccccgcgtgtgctggccacgcacctcccctactccctgctgcccggcagcatcaccggcgacggagagcgctcggggtgccggatcgtgtacgtttgccgggaacccaaggacgtgctggtctcctcctggctgttcacgagaaaggcagcgccggcttgtggggttgacgcccggtcgttcacgatccaggaggccttggagctgttctgtgatggccgctgtctcggcggcccacagtggaaccacgtcctccactactggaaggagagcgtgaggaggcctgacatggtgttgttccttcgttacgaggaggtgctgattgagcccgaggcgcacgtcagaaagctggccaatttcatgggctgtggattctccgaggaggaggaggagcgcggggtggtgagcgccatcgtggagctgtgtagcttggggaagctgaaagacatggaggtgaatagaaatgggagcactatgttggggatcaagaacgaaagcttcttcaggaagggtgttgttggggactggagcaagcatatgacgcaggagatggcgcagaggctagacaaggtcgtagaggatgcattgcaagggactggattcacctttgcgagcacagcatgatgaggcagtgcgctcatagtagttgcgaactgcagaataatgccaagatcaactcgttttatcggtgttgctggttggagatcatgccagtcatggtgagcattcttctttggtgatgaagggggaaatatggacatcatcttatcatttaacgaaaattgatttgtgtacaattcatttgtataactttgttacaaaccatatgttgtggcaccttggcacgccaaaaccatatgcattactgtgc

SEQ ID NO: 3964 - protein, 352 aa, Zea mays subsp. mays
  peptide (1)..(352): Ceres Seq. ID no. 12345945
  misc_feature (81)..(345): Pfam Name: Sulfotransferase domain Pfam Description: Sulfotransferase domain
  misc_feature (18)..(345): Homolog of NCBI NO: 15222843 NR Description: steroid sulfotransferase, putative
  misc_feature (18)..(348): Homolog of NCBI NO: 30683286 NR Description: sulfotransferase family [Arabidopsis thaliana]
  misc_feature (10)..(347): Homolog of NCBI NO: 34905060 NR Description: putative flavonol 4'-sulfotransferase
  misc_feature (38)..(332): Homolog of NCBI NO: 34393650 NR Description: putative flavonol 3-sulfotransferase
  misc_feature (26)..(348): Homolog of NCBI NO: 37531912 NR Description: putative flavonol 3-sulfotransferase
  misc_feature (38)..(351): Homolog of NCBI NO: 38344441 NR Description: OSJNBa0038O10.13 [Oryza sativa (japonica
  misc_feature (53)..(345): Homolog of NCBI NO: 35215145 NR Description: putative flavonol 3'-sulfotransferase
  misc_feature (23)..(347): Homolog of NCBI NO: 40253319 NR Description: putative flavonol 3-sulfotransferase
  misc_feature (20)..(347): Homolog of NCBI NO: 40253317 NR Description: putative flavonol 3-sulfotransferase
  misc_feature (36)..(351): Homolog of NCBI NO: 38346451 NR Description: OSJNBa0018J19.12 [Oryza sativa (japonica
MQAAASNWTMVASRQSENNAQEEASPLTTPNANIARIIPSLPLETRWPPFPLRRYANFWLPEVTLKEGVPGVHSCFEPRPTDVFLASFPKSGTTWLKALAFATLKRSTHPPFDDDHPLRHCNPHDCVRFLELDFNQQKDELEALPSPRVLATHLPYSLLPGSITGDGERSGCRIVYVCREPKDVLVSSWLFTRKAAPACGVDARSFTIQEALELFCDGRCLGGPQWNHVLHYWKESVRRPDMVLFLRYEEVLIEPEAHVRKLANFMGCGFSEEEEERGVVSAIVELCSLGKLKDMEVNRNGSTMLGIKNESFFRKGVVGDWSKHMTQEMAQRLDKVVEDALQGTGFTFASTA

SEQ ID NO: 3965 - protein, 343 aa, Zea mays subsp. mays
  peptide (1)..(343): Ceres Seq. ID no. 12345946
  misc_feature (72)..(336): Pfam Name: Sulfotransferase domain Pfam Description: Sulfotransferase domain
  misc_feature (9)..(336): Homolog of NCBI NO: 15222843 NR Description: steroid sulfotransferase, putative
  misc_feature (9)..(339): Homolog of NCBI NO: 30683286 NR Description: sulfotransferase family [Arabidopsis thaliana]
  misc_feature (1)..(338): Homolog of NCBI NO: 34905060 NR Description: putative flavonol 4'-sulfotransferase
  misc_feature (29)..(323): Homolog of NCBI NO: 34393650 NR Description: putative flavonol 3-sulfotransferase
  misc_feature (17)..(339): Homolog of NCBI NO: 37531912 NR Description: putative flavonol 3-sulfotransferase
  misc_feature (29)..(342): Homolog of NCBI NO: 38344441 NR Description: OSJNBa0038O10.13 [Oryza sativa (japonica
  misc_feature (44)..(336): Homolog of NCBI NO: 35215145 NR Description: putative flavonol 3'-sulfotransferase
  misc_feature (14)..(338): Homolog of NCBI NO: 40253319 NR Description: putative flavonol 3-sulfotransferase
  misc_feature (11)..(338): Homolog of NCBI NO: 40253317 NR Description: putative flavonol 3-sulfotransferase
  misc_feature (27)..(342): Homolog of NCBI NO: 38346451 NR Description: OSJNBa0018J19.12 [Oryza sativa (japonica
MVASRQSENNAQEEASPLTTPNANIARIIPSLPLETRWPPFPLRRYANFWLPEVTLKEGVPGVHSCFEPRPTDVFLASFPKSGTTWLKALAFATLKRSTHPPFDDDHPLRHCNPHDCVRFLELDFNQQKDELEALPSPRVLATHLPYSLLPGSITGDGERSGCRIVYVCREPKDVLVSSWLFTRKAAPACGVDARSFTIQEALELFCDGRCLGGPQWNHVLHYWKESVRRPDMVLFLRYEEVLIEPEAHVRKLANFMGCGFSEEEEERGVVSAIVELCSLGKLKDMEVNRNGSTMLGIKNESFFRKGVVGDWSKHMTQEMAQRLDKVVEDALQGTGFTFASTA

SEQ ID NO: 3966 - DNA, 1446 bp, Zea mays subsp. mays
  misc_feature (1)..(1446): Ceres Seq. ID no. 12410025
  misc_feature: MA Experiment ID: 108527 Result: Down-regulated in Transcription
  misc_feature: MA Experiment 108527 PARAMETER Experiment Name: Zm_5mM_NO_P Parameter: Age (day) Value: 8
  misc_feature: MA Experiment 108527 PARAMETER Experiment Name: Zm_5mM_NO_P Parameter: Organism Value: Zea mays
  misc_feature: MA Experiment 108527 PARAMETER Experiment Name: Zm_5mM_NO_P Parameter: Plant Line Value: 35A19
  misc_feature: MA Experiment 108527 PARAMETER Experiment Name: Zm_5mM_NO_P Parameter: Timepoint (hr) Value: 6
  misc_feature: MA Experiment 108527 PARAMETER Experiment Name: Zm_5mM_NO_P Parameter: Tissue Value: Aerial
  misc_feature: MA Experiment 108527 PARAMETER Experiment Name: Zm_5mM_NO_P Parameter: Treatment Value: 5mM NO vs. No Treatment
  misc_feature: MA Experiment ID: 108535 Result: Down-regulated in Transcription
  misc_feature: MA Experiment 108535 PARAMETER Experiment Name: Zm_Meristem_P Parameter: Age (day) Value: 8
  misc_feature: MA Experiment 108535 PARAMETER Experiment Name: Zm_Meristem_P Parameter: Organism Value: Zea mays
  misc_feature: MA Experiment 108535 PARAMETER Experiment Name: Zm_Meristem_P Parameter: Plant Line Value: 35A19
  misc_feature: MA Experiment 108535 PARAMETER Experiment Name: Zm_Meristem_P Parameter: Tissue Value: Root Meristem vs. Above Root Meristem
  misc_feature: MA Experiment ID: 20000492 Result: Down-regulated in Transcription
  misc_feature: MA Experiment 20000492 PARAMETER Experiment Name: Zm_Hybrid_Seed_Dev_P Parameter: DAP Value: 12
  misc_feature: MA Experiment 20000492 PARAMETER Experiment Name: Zm_Hybrid_Seed_Dev_P Parameter: Organism Value: Zea mays
  misc_feature: MA Experiment 20000492 PARAMETER Experiment Name: Zm_Hybrid_Seed_Dev_P Parameter: Plant Line Value: 35A19
  misc_feature: MA Experiment 20000492 PARAMETER Experiment Name: Zm_Hybrid_Seed_Dev_P Parameter: Tissue Value: Fert Kernel vs. Unfert Floret
  misc_feature: MA Experiment ID: 20000535 Result: Down-regulated in Transcription
  misc_feature: MA Experiment 20000535 PARAMETER Experiment Name: Zm_Hybrid_Seed_Dev_P Parameter: DAP Value: 30 vs. 12
  misc_feature: MA Experiment 20000535 PARAMETER Experiment Name: Zm_Hybrid_Seed_Dev_P Parameter: Organism Value: Zea mays
  misc_feature: MA Experiment 20000535 PARAMETER Experiment Name: Zm_Hybrid_Seed_Dev_P Parameter: Plant Line Value: 35A19
  misc_feature: MA Experiment 20000535 PARAMETER Experiment Name: Zm_Hybrid_Seed_Dev_P Parameter: Tissue Value: Embryo vs. Unfert Floret
ttggataaaaattctagctaaaccgaggaataaagagcgataagcccggtgtctgtcaacactccagaagagccgcagcgcaaaggagactcctttgtggcgtgcgcgaccagcatgaagccacgtccaccggcgggggcgtcgtccgcttccgccgcgccgcccaggctgcggccgcacctggcgcggctcgcctccttcctgatcgtcttcgccgtgggctactcgctgggcctcctgtcgtcgtccacccggnngccgccaccgagaccgtcccagtcccagtcccagtcccaggcgacgacgatcgcgcggccgcacgccgacgctttattcccggcgtcgnngaactcgaacgggaccgccgcgtcgagctacccgcggtcgcctccgcacgacctgttccggttcagggagcggtgcggggagccggtgccgagcgacgccgtggtgcggacgctgctcgacaggctcttcggcggcgagagcccctacgcggggttcccgcccgagcgcacggcggcgctgctgcgcccggccgcggcgcgcccgcgcgggtgggggtcgacgggggcggtgttcgcggagctcatggaggcggtgcgcccggcggtggtcgtggagctgggcgcgttcctgggcgcgtcggcgctgcacatggcggccgtggccaggaacctgtccctgtccccggccatcctctgcgtcgacgacttccgcggctggccggcgttccgggaccgcttccgccgcgacgtgccgccgccgcggcacggcgacgcgctgctgctgccgcagttcatggccaacgtcgtggcggcggagggggcgcgcgtcgtcctgccgctgcccttctccacggcgtccgcgctcgccgcgctctgcgactggggcgtctacgccgacctcatcgaggtggacgccggccacgacttccactcggcgtgggccgacatcaacctggcctgggccgtgctccgccccggcggcgtcatgttcggccacgactacttcacgtccgccnacgngcgcggcgtgcgccgngccgtcacgctcttcgccaaggtcaaggggctcaccgtccgcccgcacggccagcactgggtgctctccccgaagccgcgagggcgcgccgacgacgcccggcgacggtgagggctcgtcgctngntgctgtcgccgtcgccgcggggccgtgcactcgatcgcccggcaccgaacctgacgtgtcccgtactcccgttgcaccagcggccgtagcacgcacccacccgcctcgatcgaaagctgatcgacgaaaaaggttgcgccgcccccgccactgttctctgaagcgctcgtctcaaccaccatttgcttttgctgtaacactcttctctaactacgccgggatcatacaagaacgatacaatattgtattccaacaatacgagacgtttacgtgtag

SEQ ID NO: 3967 - protein, 346 aa, Zea mays subsp. mays
  peptide (1)..(346): Ceres Seq. ID no. 12410026
  misc_feature (95)..(332): Homolog of NCBI NO: 15223338 NR Description: hypothetical protein; protein id: At1g01180.1
  misc_feature (48)..(48): Xaa is any aa, unknown or other
  misc_feature (78)..(78): Xaa is any aa, unknown or other
  misc_feature (304)..(304): Xaa is any aa, unknown or other
  misc_feature (305)..(305): Xaa is any aa, unknown or other
  misc_feature (310)..(310): Xaa is any aa, unknown or other
MKPRPPAGASSASAAPPRLRPHLARLASFLIVFAVGYSLGLLSSSTRXPPPRPSQSQSQSQATTIARPHADALFPASXNSNGTAASSYPRSPPHDLFRFRERCGEPVPSDAVVRTLLDRLFGGESPYAGFPPERTAALLRPAAARPRGWGSTGAVFAELMEAVRPAVVVELGAFLGASALHMAAVARNLSLSPAILCVDDFRGWPAFRDRFRRDVPPPRHGDALLLPQFMANVVAAEGARVVLPLPFSTASALAALCDWGVYADLIEVDAGHDFHSAWADINLAWAVLRPGGVMFGHDYFTSAXXRGVRXAVTLFAKVKGLTVRPHGQHWVLSPKPRGRADDARRR

SEQ ID NO: 3968 - protein, 187 aa, Zea mays subsp. mays
  peptide (1)..(187): Ceres Seq. ID no. 12410027
  misc_feature (1)..(173): Homolog of NCBI NO: 15223338 NR Description: hypothetical protein; protein id: At1g01180.1
  misc_feature (145)..(145): Xaa is any aa, unknown or other
  misc_feature (146)..(146): Xaa is any aa, unknown or other
  misc_feature (151)..(151): Xaa is any aa, unknown or other
MEAVRPAVVVELGAFLGASALHMAAVARNLSLSPAILCVDDFRGWPAFRDRFRRDVPPPRHGDALLLPQFMANVVAAEGARVVLPLPFSTASALAALCDWGVYADLIEVDAGHDFHSAWADINLAWAVLRPGGVMFGHDYFTSAXXRGVRXAVTLFAKVKGLTVRPHGQHWVLSPKPRGRADDARRR

SEQ ID NO: 3969 - DNA, 1062 bp, Zea mays subsp. mays
  misc_feature (1)..(1062): Ceres Seq. ID no. 12410021
  misc_feature: MA Experiment ID: 20000492 Result: Down-regulated in Transcription
  misc_feature: MA Experiment 20000492 PARAMETER Experiment Name: Zm_Hybrid_Seed_Dev_P Parameter: DAP Value: 12
  misc_feature: MA Experiment 20000492 PARAMETER Experiment Name: Zm_Hybrid_Seed_Dev_P Parameter: Organism Value: Zea mays
  misc_feature: MA Experiment 20000492 PARAMETER Experiment Name: Zm_Hybrid_Seed_Dev_P Parameter: Plant Line Value: 35A19
  misc_feature: MA Experiment 20000492 PARAMETER Experiment Name: Zm_Hybrid_Seed_Dev_P Parameter: Tissue Value: Fert Kernel vs. Unfert Floret
aattcttctcgtctcgctcggctcctctgggcccacagcggccagcaaactgcctccgtcctcccctgcgggctgtgccgcctcttcttcgcgtcggcgccgccctccttccttctcttctgctgctgatggaactggatcctcgcctctacgagaacgtctctgtcagcgacaacgatgtccgaaacatagttctatcttatcttatgcacaactgttttaaagagacggcagaggcattcctatctagcaccgggttgaatttacctgtcgactatagtgtggatgtggataagcgtaaagcaatttttaattttgtgctagaagggaatgcccttaaagccatagagctgacagaagaaatggcacctaacttgctagagaatgatatggatctacattttgatcttcttagtctccacttcattgagctagttcgctccaaaaaattcacagaagctcttgactttggccagaaaaaattgacatcatttcagaaggttaccaagtatattgagaaactagaggactttatggccctcctggcttatgaagagcctgagaagtcacctatgtttcatctactaagcccagagcacaggcagaatgttgcagagggcttgaatcgggctgtccttgcacatgctaatcttccggcatattcatcgttggagagggtggtccagcaagcgactgtggttagacaatacctacagcaggaagttggcaaggattcttacccaccattttctttgaaggcctttctgagcaagtaaatgtgcaaatggtcactcttcttcagaacagggtaaccacctctccaggccatcatgtacatgtacccttgtggagtgcatacacgatgaagtagtttatacagttcaggtgttgttgacaccacttatacagttgcaatggtgttgtactttaaaaaggagggtgctgtatgctgtctgtttccttgatttacattctgttttacttgtctctctgccttagacatggtgatagcatgtatgtatgacctgttgagctattctgtgcgttcgtttcggtgaactc

SEQ ID NO: 3970 - protein, 257 aa, Zea mays subsp. mays
  peptide (1)..(257): Ceres Seq. ID no. 12410022
  misc_feature (52)..(247): Homolog of NCBI NO: 21594655 NR Description: chromosome 20 open reading frame 11 [Homo sapiens]
  misc_feature (52)..(245): Homolog of NCBI NO: 37748055 NR Description: Unknown (protein for MGC:73100) [Danio rerio]
  misc_feature (52)..(247): Homolog of NCBI NO: 20863687 NR Description: RIKEN cDNA 2310003C23 [Mus musculus]
  misc_feature (52)..(247): Homolog of NCBI NO: 8923557 NR Description: chromosome 20 open reading frame 11
  misc_feature (176)..(256): Homolog of NCBI NO: 34910006 NR Description: P0413G02.3 [Oryza sativa (japonica
  misc_feature (17)..(225): Homolog of NCBI NO: 34910006 NR Description: P0413G02.3 [Oryza sativa (japonica
  misc_feature (45)..(252): Homolog of NCBI NO: 18390607 NR Description: expressed protein
  misc_feature (53)..(227): Homolog of NCBI NO: 25404311 NR Description: hypothetical protein F11P17.12 [imported] -
  misc_feature (53)..(227): Homolog of NCBI NO: 15219873 NR Description: hypothetical protein; protein id: At1g61150.1
  misc_feature (59)..(212): Homolog of NCBI NO: 24643081 NR Description: CG6617-PA [Drosophila melanogaster]
FFSSRSAPLGPQRPANCLRPPLRAVPPLLRVGAALLPSLLLLMELDPRLYENVSVSDNDVRNIVLSYLMHNCFKETAEAFLSSTGLNLPVDYSVDVDKRKAIFNFVLEGNALKAIELTEEMAPNLLENDMDLHFDLLSLHFIELVRSKKFTEALDFGQKKLTSFQKVTKYIEKLEDFMALLAYEEPEKSPMFHLLSPEHRQNVAEGLNRAVLAHANLPAYSSLERVVQQATVVRQYLQQEVGKDSYPPFSLKAFLSK

SEQ ID NO: 3971 - protein, 215 aa, Zea mays subsp. mays
  peptide (1)..(215): Ceres Seq. ID no. 12410023
  misc_feature (11)..(185): Homolog of NCBI NO: 25404311 NR Description: hypothetical protein F11P17.12 [imported] -
  misc_feature (11)..(185): Homolog of NCBI NO: 15219873 NR Description: hypothetical protein; protein id: At1g61150.1
  misc_feature (17)..(170): Homolog of NCBI NO: 24643081 NR Description: CG6617-PA [Drosophila melanogaster]
  misc_feature (10)..(205): Homolog of NCBI NO: 21594655 NR Description: chromosome 20 open reading frame 11 [Homo sapiens]
  misc_feature (10)..(203): Homolog of NCBI NO: 37748055 NR Description: Unknown (protein for MGC:73100) [Danio rerio]
  misc_feature (10)..(205): Homolog of NCBI NO: 20863687 NR Description: RIKEN cDNA 2310003C23 [Mus musculus]
  misc_feature (10)..(205): Homolog of NCBI NO: 8923557 NR Description: chromosome 20 open reading frame 11
  misc_feature (134)..(214): Homolog of NCBI NO: 34910006 NR Description: P0413G02.3 [Oryza sativa (japonica
  misc_feature (1)..(183): Homolog of NCBI NO: 34910006 NR Description: P0413G02.3 [Oryza sativa (japonica
  misc_feature (3)..(210): Homolog of NCBI NO: 18390607 NR Description: expressed protein
MELDPRLYENVSVSDNDVRNIVLSYLMHNCFKETAEAFLSSTGLNLPVDYSVDVDKRKAIFNFVLEGNALKAIELTEEMAPNLLENDMDLHFDLLSLHFIELVRSKKFTEALDFGQKKLTSFQKVTKYIEKLEDFMALLAYEEPEKSPMFHLLSPEHRQNVAEGLNRAVLAHANLPAYSSLERVVQQATVVRQYLQQEVGKDSYPPFSLKAFLSK

SEQ ID NO: 3972 - protein, 189 aa, Zea mays subsp. mays
  peptide (1)..(189): Ceres Seq. ID no. 12410024
  misc_feature (1)..(159): Homolog of NCBI NO: 25404311 NR Description: hypothetical protein F11P17.12 [imported] -
  misc_feature (1)..(159): Homolog of NCBI NO: 15219873 NR Description: hypothetical protein; protein id: At1g61150.1
  misc_feature (1)..(144): Homolog of NCBI NO: 24643081 NR Description: CG6617-PA [Drosophila melanogaster]
  misc_feature (1)..(179): Homolog of NCBI NO: 21594655 NR Description: chromosome 20 open reading frame 11 [Homo sapiens]
  misc_feature (1)..(177): Homolog of NCBI NO: 37748055 NR Description: Unknown (protein for MGC:73100) [Danio rerio]
  misc_feature (1)..(179): Homolog of NCBI NO: 20863687 NR Description: RIKEN cDNA 2310003C23 [Mus musculus]
  misc_feature (1)..(179): Homolog of NCBI NO: 8923557 NR Description: chromosome 20 open reading frame 11
  misc_feature (108)..(188): Homolog of NCBI NO: 34910006 NR Description: P0413G02.3 [Oryza sativa (japonica
  misc_feature (1)..(157): Homolog of NCBI NO: 34910006 NR Description: P0413G02.3 [Oryza sativa (japonica
  misc_feature (1)..(184): Homolog of NCBI NO: 18390607 NR Description: expressed protein
MHNCFKETAEAFLSSTGLNLPVDYSVDVDKRKAIFNFVLEGNALKAIELTEEMAPNLLENDMDLHFDLLSLHFIELVRSKKFTEALDFGQKKLTSFQKVTKYIEKLEDFMALLAYEEPEKSPMFHLLSPEHRQNVAEGLNRAVLAHANLPAYSSLERVVQQATVVRQYLQQEVGKDSYPPFSLKAFLSK

SEQ ID NO: 3973 - DNA, 1631 bp, Zea mays subsp. mays
  misc_feature (1)..(1631): Ceres Seq. ID no. 12406794
  misc_feature: MA Experiment ID: 108527 Result: Down-regulated in Transcription
  misc_feature: MA Experiment 108527 PARAMETER Experiment Name: Zm_5mM_NO_P Parameter: Age (day) Value: 8
  misc_feature: MA Experiment 108527 PARAMETER Experiment Name: Zm_5mM_NO_P Parameter: Organism Value: Zea mays
  misc_feature: MA Experiment 108527 PARAMETER Experiment Name: Zm_5mM_NO_P Parameter: Plant Line Value: 35A19
  misc_feature: MA Experiment 108527 PARAMETER Experiment Name: Zm_5mM_NO_P Parameter: Timepoint (hr) Value: 6
  misc_feature: MA Experiment 108527 PARAMETER Experiment Name: Zm_5mM_NO_P Parameter: Tissue Value: Aerial
  misc_feature: MA Experiment 108527 PARAMETER Experiment Name: Zm_5mM_NO_P Parameter: Treatment Value: 5mM NO vs. No Treatment
  misc_feature: MA Experiment ID: 108528 Result: Up-regulated in Transcription
  misc_feature: MA Experiment 108528 PARAMETER Experiment Name: Zm_Imbibed_Seeds_P Parameter: Age (day) Value: 5 vs. 2
  misc_feature: MA Experiment 108528 PARAMETER Experiment Name: Zm_Imbibed_Seeds_P Parameter: Organism Value: Zea mays
  misc_feature: MA Experiment 108528 PARAMETER Experiment Name: Zm_Imbibed_Seeds_P Parameter: Plant Line Value: 35A19
  misc_feature: MA Experiment 108528 PARAMETER Experiment Name: Zm_Imbibed_Seeds_P Parameter: Tissue Value: Aerial vs. Embryo
  misc_feature: MA Experiment ID: 108529 Result: Down-regulated in Transcription
  misc_feature: MA Experiment 108529 PARAMETER Experiment Name: Zm_Imbibed_Seeds_P Parameter: Age (day) Value: 5 vs. 2
  misc_feature: MA Experiment 108529 PARAMETER Experiment Name: Zm_Imbibed_Seeds_P Parameter: Organism Value: Zea mays
  misc_feature: MA Experiment 108529 PARAMETER Experiment Name: Zm_Imbibed_Seeds_P Parameter: Plant Line Value: 35A19
  misc_feature: MA Experiment 108529 PARAMETER Experiment Name: Zm_Imbibed_Seeds_P Parameter: Tissue Value: Roots vs. Embryo
  misc_feature: MA Experiment ID: 108530 Result: Up-regulated in Transcription
  misc_feature: MA Experiment 108530 PARAMETER Experiment Name: Zm_Imbibed_Seeds_P Parameter: Age (day) Value: 6 vs. 2
  misc_feature: MA Experiment 108530 PARAMETER Experiment Name: Zm_Imbibed_Seeds_P Parameter: Organism Value: Zea mays
  misc_feature: MA Experiment 108530 PARAMETER Experiment Name: Zm_Imbibed_Seeds_P Parameter: Plant Line Value: 35A19
  misc_feature: MA Experiment 108530 PARAMETER Experiment Name: Zm_Imbibed_Seeds_P Parameter: Tissue Value: Aerial vs. Embryo
  misc_feature: MA Experiment ID: 108545 Result: Up-regulated in Transcription
  misc_feature: MA Experiment 108545 PARAMETER Experiment Name: Zm_Imbibed_Seeds_P Parameter: Age (day) Value: 3 vs. 2
  misc_feature: MA Experiment 108545 PARAMETER Experiment Name: Zm_Imbibed_Seeds_P Parameter: Organism Value: Zea mays
  misc_feature: MA Experiment 108545 PARAMETER Experiment Name: Zm_Imbibed_Seeds_P Parameter: Plant Line Value: 35A19
  misc_feature: MA Experiment 108545 PARAMETER Experiment Name: Zm_Imbibed_Seeds_P Parameter: Tissue Value: Aerial vs. Embryo
  misc_feature: MA Experiment ID: 108546 Result: Down-regulated in Transcription
  misc_feature: MA Experiment 108546 PARAMETER Experiment Name: Zm_Imbibed_Seeds_P Parameter: Age (day) Value: 3 vs. 2
  misc_feature: MA Experiment 108546 PARAMETER Experiment Name: Zm_Imbibed_Seeds_P Parameter: Organism Value: Zea mays
  misc_feature: MA Experiment 108546 PARAMETER Experiment Name: Zm_Imbibed_Seeds_P Parameter: Plant Line Value: 35A19
  misc_feature: MA Experiment 108546 PARAMETER Experiment Name: Zm_Imbibed_Seeds_P Parameter: Tissue Value: Roots vs. Embryo
  misc_feature: MA Experiment ID: 108547 Result: Up-regulated in Transcription
  misc_feature: MA Experiment 108547 PARAMETER Experiment Name: Zm_Imbibed_Seeds_P Parameter: Age (day) Value: 4 vs. 2
  misc_feature: MA Experiment 108547 PARAMETER Experiment Name: Zm_Imbibed_Seeds_P Parameter: Organism Value: Zea mays
  misc_feature: MA Experiment 108547 PARAMETER Experiment Name: Zm_Imbibed_Seeds_P Parameter: Plant Line Value: 35A19
  misc_feature: MA Experiment 108547 PARAMETER Experiment Name: Zm_Imbibed_Seeds_P Parameter: Tissue Value: Aerial vs. Embryo
  misc_feature: MA Experiment ID: 108559 Result: Down-regulated in Transcription
  misc_feature: MA Experiment 108559 PARAMETER Experiment Name: Zm_5mM_NO_P Parameter: Age (day) Value: 8
  misc_feature: MA Experiment 108559 PARAMETER Experiment Name: Zm_5mM_NO_P Parameter: Organism Value: Zea mays
  misc_feature: MA Experiment 108559 PARAMETER Experiment Name: Zm_5mM_NO_P Parameter: Plant Line Value: 35A19
  misc_feature: MA Experiment 108559 PARAMETER Experiment Name: Zm_5mM_NO_P Parameter: Timepoint (hr) Value: 12
  misc_feature: MA Experiment 108559 PARAMETER Experiment Name: Zm_5mM_NO_P Parameter: Tissue Value: Aerial
  misc_feature: MA Experiment 108559 PARAMETER Experiment Name: Zm_5mM_NO_P Parameter: Treatment Value: 5mM NO vs. No Treatment
  misc_feature: MA Experiment ID: 20000479 Result: Down-regulated in Transcription
  misc_feature: MA Experiment 20000479 PARAMETER Experiment Name: Zm_Drought_P Parameter: Age (day) Value: 10
  misc_feature: MA Experiment 20000479 PARAMETER Experiment Name: Zm_Drought_P Parameter: Organism Value: Zea mays
  misc_feature: MA Experiment 20000479 PARAMETER Experiment Name: Zm_Drought_P Parameter: Plant Line Value: 35A19
  misc_feature: MA Experiment 20000479 PARAMETER Experiment Name: Zm_Drought_P Parameter: Timepoint (hr) Value: 48
  misc_feature: MA Experiment 20000479 PARAMETER Experiment Name: Zm_Drought_P Parameter: Tissue Value: Aerial
  misc_feature: MA Experiment 20000479 PARAMETER Experiment Name: Zm_Drought_P Parameter: Treatment Value: Drought vs. No Drought
  misc_feature: MA Experiment ID: 20000480 Result: Down-regulated in Transcription
  misc_feature: MA Experiment 20000480 PARAMETER Experiment Name: Zm_Drought_P Parameter: Age (day) Value: 11
  misc_feature: MA Experiment 20000480 PARAMETER Experiment Name: Zm_Drought_P Parameter: Organism Value: Zea mays
  misc_feature: MA Experiment 20000480 PARAMETER Experiment Name: Zm_Drought_P Parameter: Plant Line Value: 35A19
  misc_feature: MA Experiment 20000480 PARAMETER Experiment Name: Zm_Drought_P Parameter: Timepoint (hr) Value: 72
  misc_feature: MA Experiment 20000480 PARAMETER Experiment Name: Zm_Drought_P Parameter: Tissue Value: Aerial
  misc_feature: MA Experiment 20000480 PARAMETER Experiment Name: Zm_Drought_P Parameter: Treatment Value: Drought vs. No Drought
acctgtagttttctccactcgtcctcgtcctttgtccctgtccttcggggacaaaaacaaccaaggcgcaagcggtaatcttccgtggtgggggcgttctctgctgcaagcagtggtgacgccgcttggagggagggcgggcgggaaaggatggaggcggtggtggacctcaagtacctgccggttttcccgaacggcggcgtggccgcggccaagaagaagacgaggctcgggaccactgcggttgccggcggccagacgggggtgtactaccgggaatgcctcaagaaccacgcggcgagcctgggtggccacgcgctggacgggtgcggcgagttcatgccgtcgccggaggccgacccggcggacccgagttcgctcaggtgcgccgcgtgcggatgccaccgcaacttccaccgccggctaccggagctgtccccgccgccgcctctcctcgctttgccgccgcctccaccgccactggcgccggcgccggctgtcgcgccgcatgccatgcgtgacagccgcacgatgcgcggcgaggaggcgccagacgaccgcctgccggccgccttcgacgacgacaccgaggagtcggacgagggctcagatttcgaagaggaccggtcccctaacgccgctgccggcgccgggcatggtgccgntgccgcccggctaccgccaggtcgcgccacacatgctcctcgcgctgagcaccagcgcgccgggcgcccaaactcccgcggcggggcccaggccgcccgcctccctggtcccgatgccggcgcccgggtgctgctgctgctgcggcggcggcggccggcggcgaggaagcggttccgcaccaagttcagcccggaacagaagcagaggatgcaggctctgtcggagcggttgggttggcggctgcagaagcgcgacgaggcccgtggtcgacgagtgctgccaggagatcggcgtcaccaagggcgtcttcaaggtttggatgcacaacaacaagcacaacttcgtcggcggccacagccgcgcgccgcagcgcctcagcgtctgctgccacggccatccaccatccgttcgacgctgcccccgtctgcgcttcctcccacgccgccccagcaccagccgccgctgtgcacctttccgcccacgccgccccagcgccagccgcctccccggccacgcctgtcctcgctgactccaacatcaacggcaacgctgccgactacttccgtgtccaaccgtcgacggcgagtggcggctcgccgcagtcgtcctagtcaagttagtgctaatcagccatggttatttgtagagcctcgtgtctaattaaccaaccctaatggagcgagcaatggtgggatgcatgggactatcgaatatgggagcgctagtgagaaggctgctgctggtctttgttaatggtggagcccaaagaaggatcgtggggttttgggatctgatgatgtaatgattcaggattagcgcttatggtactagtagactgttagaccaactccactgaactgtactttgtcttcgtctaggatatcatgttgttccatataaaaatgcgatctgtccactgttgggttggctttaatacatatcgatttttacttttactgtttttt

SEQ ID NO: 3974 - protein, 397 aa, Zea mays subsp. mays
  peptide (1)..(397): Ceres Seq. ID no. 12406795
  misc_feature (310)..(336): Homolog of NCBI NO: 15223757 NR Description: hypothetical protein
  misc_feature (189)..(343): Homolog of NCBI NO: 32480091 NR Description: OSJNBb0086G13.8 [Oryza sativa (japonica
  misc_feature (296)..(342): Homolog of NCBI NO: 15239341 NR Description: putative protein; protein id: At5g60480.1
  misc_feature (296)..(342): Homolog of NCBI NO: 9757750 NR Description: gb|AAF24606.1~gene_id:MUF9.11~similar to unknown
  misc_feature (315)..(335): Homolog of NCBI NO: 18410804 NR Description: expressed protein
  misc_feature (296)..(343): Homolog of NCBI NO: 15242243 NR Description: putative protein; protein id: At5g15210.1
  misc_feature (221)..(344): Homolog of NCBI NO: 15238445 NR Description: hypothetical protein common family; protein id:
  misc_feature (296)..(336): Homolog of NCBI NO: 21592512 NR Description: unknown [Arabidopsis thaliana]
  misc_feature (296)..(336): Homolog of NCBI NO: 18421904 NR Description: putative protein
  misc_feature (207)..(348): Homolog of NCBI NO: 13277220 NR Description: ZF-HD homeobox protein [Flaveria bidentis]
  misc_feature (222)..(222): Xaa is any aa, unknown or other
PVVFSTRPRPLSLSFGDKNNQGASGNLPWWGRSLLQAVVTPLGGRAGGKGWRRWWTSSTCRFSRTAAWPRPRRRRGSGPLRLPAARRGCTTGNASRTTRRAWVATRWTGAASSCRRRRPTRRTRVRSGAPRADATATSTAGYRSCPRRRLSSLCRRLHRHWRRRRLSRRMPCVTAARCAARRRQTTACRPPSTTTPRSRTRAQISKRTGPLTPLPAPGMVPXPPGYRQVAPHMLLALSTSAPGAQTPAAGPRPPASLVPMPAPGCCCCCGGGGRRRGSGSAPSSARNRSRGCRLCRSGWVGGCRSATRPVVDECCQEIGVTKGVFKVWMHNNKHNFVGGHSRAPQRLSVCCHGHPPSVRRCPRLRFLPRRPSTSRRCAPFRPRRPSASRLPGHACPR

SEQ ID NO: 3975 - protein, 391 aa, Zea mays subsp. mays
  peptide (1)..(391): Ceres Seq. ID no. 12406796
  misc_feature (36)..(93): Pfam Name: ZF-HD protein dimerisation region Pfam Description: ZF-HD protein dimerisation region
  misc_feature (225)..(258): Homolog of NCBI NO: 13277216 NR Description: ZF-HD homeobox protein [Flaveria trinervia]
  misc_feature (37)..(122): Homolog of NCBI NO: 13277216 NR Description: ZF-HD homeobox protein [Flaveria trinervia]
  misc_feature (34)..(115): Homolog of NCBI NO: 15238445 NR Description: hypothetical protein common family; protein id:
  misc_feature (224)..(258): Homolog of NCBI NO: 15242243 NR Description: putative protein; protein id: At5g15210.1
  misc_feature (41)..(110): Homolog of NCBI NO: 15242243 NR Description: putative protein; protein id: At5g15210.1
  misc_feature (226)..(258): Homolog of NCBI NO: 21592512 NR Description: unknown [Arabidopsis thaliana]
  misc_feature (41)..(121): Homolog of NCBI NO: 21592512 NR Description: unknown [Arabidopsis thaliana]
  misc_feature (226)..(258): Homolog of NCBI NO: 18421904 NR Description: putative protein
  misc_feature (41)..(121): Homolog of NCBI NO: 18421904 NR Description: putative protein
  misc_feature (39)..(115): Homolog of NCBI NO: 13277220 NR Description: ZF-HD homeobox protein [Flaveria bidentis]
  misc_feature (172)..(172): Xaa is any aa, unknown or other
MEAVVDLKYLPVFPNGGVAAAKKKTRLGTTAVAGGQTGVYYRECLKNHAASLGGHALDGCGEFMPSPEADPADPSSLRCAACGCHRNFHRRLPELSPPPPLLALPPPPPPLAPAPAVAPHAMRDSRTMRGEEAPDDRLPAAFDDDTEESDEGSDFEEDRSPNAAAGAGHGAXAARLPPGRATHAPRAEHQRAGRPNSRGGAQAARLPGPDAGARVLLLLRRRRPAARKRFRTKFSPEQKQRMQALSERLGWRLQKRDEARGRRVLPGDRRHQGRLQGLDAQQQAQLRRRPQPRAAAPQRLLPRPSTIRSTLPPSALPPTPPQHQPPLCTFPPTPPQRQPPPRPRLSSLTPTSTATLPTTSVSNRRRRVAARRSRPSQVSANQPWLFVEPRV

SEQ ID NO: 3976 - protein, 328 aa, Zea mays subsp. mays
  peptide (1)..(328): Ceres Seq. ID no. 12406797
  misc_feature (225)..(280): Pfam Name: Extensin-like region Pfam Description: Extensin-like region
  misc_feature (162)..(195): Homolog of NCBI NO: 13277216 NR Description: ZF-HD homeobox protein [Flaveria trinervia]
  misc_feature (1)..(59): Homolog of NCBI NO: 13277216 NR Description: ZF-HD homeobox protein [Flaveria trinervia]
  misc_feature (1)..(52): Homolog of NCBI NO: 15238445 NR Description: hypothetical protein common family; protein id:
  misc_feature (161)..(195): Homolog of NCBI NO: 15242243 NR Description: putative protein; protein id: At5g15210.1
  misc_feature (1)..(47): Homolog of NCBI NO: 15242243 NR Description: putative protein; protein id: At5g15210.1
  misc_feature (163)..(195): Homolog of NCBI NO: 21592512 NR Description: unknown [Arabidopsis thaliana]
  misc_feature (1)..(58): Homolog of NCBI NO: 21592512 NR Description: unknown [Arabidopsis thaliana]
  misc_feature (163)..(195): Homolog of NCBI NO: 18421904 NR Description: putative protein
  misc_feature (1)..(58): Homolog of NCBI NO: 18421904 NR Description: putative protein
  misc_feature (1)..(52): Homolog of NCBI NO: 13277220 NR Description: ZF-HD homeobox protein [Flaveria bidentis]
  misc_feature (109)..(109): Xaa is any aa, unknown or other
MPSPEADPADPSSLRCAACGCHRNFHRRLPELSPPPPLLALPPPPPPLAPAPAVAPHAMRDSRTMRGEEAPDDRLPAAFDDDTEESDEGSDFEEDRSPNAAAGAGHGAXAARLPPGRATHAPRAEHQRAGRPNSRGGAQAARLPGPDAGARVLLLLRRRRPAARKRFRTKFSPEQKQRMQALSERLGWRLQKRDEARGRRVLPGDRRHQGRLQGLDAQQQAQLRRRPQPRAAAPQRLLPRPSTIRSTLPPSALPPTPPQHQPPLCTFPPTPPQRQPPPRPRLSSLTPTSTATLPTTSVSNRRRRVAARRSRPSQVSANQPWLFVEPRV

SEQ ID NO: 3977 - DNA, 1670 bp, Zea mays subsp. mays
  misc_feature (1)..(1670): Ceres Seq. ID no. 12343352
  misc_feature: MA Experiment ID: 108528 Result: Up-regulated in Transcription
  misc_feature: MA Experiment 108528 PARAMETER Experiment Name: Zm_Imbibed_Seeds_P Parameter: Age (day) Value: 5 vs. 2
  misc_feature: MA Experiment 108528 PARAMETER Experiment Name: Zm_Imbibed_Seeds_P Parameter: Organism Value: Zea mays
  misc_feature: MA Experiment 108528 PARAMETER Experiment Name: Zm_Imbibed_Seeds_P Parameter: Plant Line Value: 35A19
  misc_feature: MA Experiment 108528 PARAMETER Experiment Name: Zm_Imbibed_Seeds_P Parameter: Tissue Value: Aerial vs. Embryo
  misc_feature: MA Experiment ID: 108530 Result: Up-regulated in Transcription
  misc_feature: MA Experiment 108530 PARAMETER Experiment Name: Zm_Imbibed_Seeds_P Parameter: Age (day) Value: 6 vs. 2
  misc_feature: MA Experiment 108530 PARAMETER Experiment Name: Zm_Imbibed_Seeds_P Parameter: Organism Value: Zea mays
  misc_feature: MA Experiment 108530 PARAMETER Experiment Name: Zm_Imbibed_Seeds_P Parameter: Plant Line Value: 35A19
  misc_feature: MA Experiment 108530 PARAMETER Experiment Name: Zm_Imbibed_Seeds_P Parameter: Tissue Value: Aerial vs. Embryo
  misc_feature: MA Experiment ID: 20000535 Result: Down-regulated in Transcription
  misc_feature: MA Experiment 20000535 PARAMETER Experiment Name: Zm_Hybrid_Seed_Dev_P Parameter: DAP Value: 30 vs. 12
  misc_feature: MA Experiment 20000535 PARAMETER Experiment Name: Zm_Hybrid_Seed_Dev_P Parameter: Organism Value: Zea mays
  misc_feature: MA Experiment 20000535 PARAMETER Experiment Name: Zm_Hybrid_Seed_Dev_P Parameter: Plant Line Value: 35A19
  misc_feature: MA Experiment 20000535 PARAMETER Experiment Name: Zm_Hybrid_Seed_Dev_P Parameter: Tissue Value: Embryo vs. Unfert Floret
acacgtttcaccatcaataggacaaaagcagcaccagccaccaggcagactccctcgactccgactctacgcgacacacgagcgcaggggctcaaacgcgaaaaaaaagaggccccaacgcccactccaccggccaatcacccgccggcgcgccatggcggccgccgccgggggactccgtcaagcagccgctcctccaccgcgcgtacccgtcccacgccgcgtcggcctcctcgccggccctcccgtccgttcccccggggggcgggggccgccgcttcccagggggcctcgacgtgcccaacctgaagaagcgcggcggcggcacgcgcagctggatccgcgtcgaggccgccacggcctccgtgcagacgctggagatcgacaaggccaccatgatgcggcgctgcgagctccccgcgcgcgacctccgcctgctcgacccgctcttcgtgtacccgtccacggtcctgggccgcgagcgcgcaatcgtcgtcaacctcgagcagatcaggtgcgtcatcaccgccgacgaggtgctcctgctcaactccctcgacagctacgtcctccagtatgccgccgagctccagcgccgcctgctccagcgcgcggagggcgacgagctacccttcgaattccgagcgctcgagctcgccctcgaggccgcatgctccttcctcgatgcacaggctgcggaattggagattgaagcatatccattactggatgaactgacatccaaaatcagtactctcaatttggaacgtgcccggcgattaaaaagtagactagttgcattgaccagaagagttcaaaaagtcagagatgaaatagaacaactaatggatgatgatggtgatatggctgagatgtatctcaccgaaaaaaagatgaggatggaatcatctgtctttggtgaccagtctttgttgggctacaattcagcaggcgctgttggggcttcagtttcagctcctgtatctccagtctcatcgcctacagaatcacgaaaactggagaaatctttcagtttgtgtagaagtaggcatgacagtacgaagggctcagataacacaatgacagagcatatccaggagctggagatgttactggaagcttattttgttgttatcgacagcactctgaacaagctgacatcgcttaaagagtacatcgatgacactgaagacttcatcaacattcagctggacaatgtgcggaaccagctgatccagtttgaattgctgctaacgaccgcaacatttgttgtggccattttcggagtggttgctgggatattcgggatgaactttgagacatcagttttcgaaatagagaatgcattccagtgggtccttgtaattacttcagtgaccggcgttttcatcttctgctcctttctttggttcttcaagtacaagagattgatgcctttgtagagaatgtatatgccctcctcccataggaccgatgaatcaatttcaaccctgttaagaggcacttgatcagaagcctgaacctctgccgatgtaaattaccattcttttagaggtttacggcatgagtaccgagaatccgggtgaaaattgtaaccttcttgacatgatccctgtgctgtataagagaaaatcatattacagtttatacaaataataccgaccaattct

SEQ ID NO: 3978 - protein, 348 aa, Zea mays subsp. mays
  peptide (1)..(348): Ceres Seq. ID no. 12343353
  misc_feature (1)..(79): Homolog of NCBI NO: 32488076 NR Description: OSJNBa0084A10.4 [Oryza sativa (japonica
  misc_feature (67)..(172): Homolog of NCBI NO: 30685422 NR Description: expressed protein [Arabidopsis thaliana]
  misc_feature (1)..(70): Homolog of NCBI NO: 30685422 NR Description: expressed protein [Arabidopsis thaliana]
  misc_feature (216)..(346): Homolog of NCBI NO: 30685422 NR Description: expressed protein [Arabidopsis thaliana]
  misc_feature (1)..(348): Homolog of NCBI NO: 25360882 NR Description: MRS2-5 [Arabidopsis thaliana]
  misc_feature (1)..(348): Homolog of NCBI NO: 15227679 NR Description: hypothetical protein
  misc_feature (4)..(348): Homolog of NCBI NO: 21553824 NR Description: unknown [Arabidopsis thaliana]
  misc_feature (4)..(348): Homolog of NCBI NO: 18412911 NR Description: expressed protein
  misc_feature (39)..(348): Homolog of NCBI NO: 18394312 NR Description: expressed protein
  misc_feature (1)..(348): Homolog of NCBI NO: 38345033 NR Description: OSJNBa0029H02.17 [Oryza sativa (japonica
MMRRCELPARDLRLLDPLFVYPSTVLGRERAIVVNLEQIRCVITADEVLLLNSLDSYVLQYAAELQRRLLQRAEGDELPFEFRALELALEAACSFLDAQAAELEIEAYPLLDELTSKISTLNLERARRLKSRLVALTRRVQKVRDEIEQLMDDDGDMAEMYLTEKKMRMESSVFGDQSLLGYNSAGAVGASVSAPVSPVSSPTESRKLEKSFSLCRSRHDSTKGSDNTMTEHIQELEMLLEAYFVVIDSTLNKLTSLKEYIDDTEDFINIQLDNVRNQLIQFELLLTTATFVVAIFGVVAGIFGMNFETSVFEIENAFQWVLVITSVTGVFIFCSFLWFFKYKRLMPL

SEQ ID NO: 3979 - protein, 347 aa, Zea mays subsp. mays
  peptide (1)..(347): Ceres Seq. ID no. 12343354
  misc_feature (1)..(78): Homolog of NCBI NO: 32488076 NR Description: OSJNBa0084A10.4 [Oryza sativa (japonica
  misc_feature (66)..(171): Homolog of NCBI NO: 30685422 NR Description: expressed protein [Arabidopsis thaliana]
  misc_feature (1)..(69): Homolog of NCBI NO: 30685422 NR Description: expressed protein [Arabidopsis thaliana]
  misc_feature (215)..(345): Homolog of NCBI NO: 30685422 NR Description: expressed protein [Arabidopsis thaliana]
  misc_feature (1)..(347): Homolog of NCBI NO: 25360882 NR Description: MRS2-5 [Arabidopsis thaliana]
  misc_feature (1)..(347): Homolog of NCBI NO: 15227679 NR Description: hypothetical protein
  misc_feature (3)..(347): Homolog of NCBI NO: 21553824 NR Description: unknown [Arabidopsis thaliana]
  misc_feature (3)..(347): Homolog of NCBI NO: 18412911 NR Description: expressed protein
  misc_feature (38)..(347): Homolog of NCBI NO: 18394312 NR Description: expressed protein
  misc_feature (1)..(347): Homolog of NCBI NO: 38345033 NR Description: OSJNBa0029H02.17 [Oryza sativa (japonica
MRRCELPARDLRLLDPLFVYPSTVLGRERAIVVNLEQIRCVITADEVLLLNSLDSYVLQYAAELQRRLLQRAEGDELPFEFRALELALEAACSFLDAQAAELEIEAYPLLDELTSKISTLNLERARRLKSRLVALTRRVQKVRDEIEQLMDDDGDMAEMYLTEKKMRMESSVFGDQSLLGYNSAGAVGASVSAPVSPVSSPTESRKLEKSFSLCRSRHDSTKGSDNTMTEHIQELEMLLEAYFVVIDSTLNKLTSLKEYIDDTEDFINIQLDNVRNQLIQFELLLTTATFVVAIFGVVAGIFGMNFETSVFEIENAFQWVLVITSVTGVFIFCSFLWFFKYKRLMPL

SEQ ID NO: 3980 - protein, 236 aa, Zea mays subsp. mays
  peptide (1)..(236): Ceres Seq. ID no. 12343355
  misc_feature (61)..(222): Homolog of NCBI NO: 23018788 NR Description: hypothetical protein [Thermobifida fusca]
  misc_feature (3)..(227): Homolog of NCBI NO: 39596044 NR Description: Hypothetical protein CBG15933 [Caenorhabditis
  misc_feature (13)..(228): Homolog of NCBI NO: 29247944 NR Description: GLP_26_54603_52153 [Giardia lamblia ATCC 50803]
HVSPSIGQKQHQPPGRLPRLRLYATHERRGSNAKKKRPQRPLHRPITRRRAMAAAAGGLRQAAAPPPRVPVPRRVGLLAGPPVRSPGGRGPPLPRGPRRAQPEEARRRHAQLDPRRGRHGLRADAGDRQGHHDAALRAPRARPPPARPALRVPVHGPGPRARNRRQPRADQVRHHRRRGAPAQLPRQLRPPVCRRAPAPPAPARGGRRATLRIPSARARPRGRMLLPRCTGCGIGD

SEQ ID NO: 3981 - DNA, 727 bp, Zea mays subsp. mays
  misc_feature (1)..(727): Ceres Seq. ID no. 12356137
  misc_feature: MA Experiment ID: 108528 Result: Up-regulated in Transcription
  misc_feature: MA Experiment 108528 PARAMETER Experiment Name: Zm_Imbibed_Seeds_P Parameter: Age (day) Value: 5 vs. 2
  misc_feature: MA Experiment 108528 PARAMETER Experiment Name: Zm_Imbibed_Seeds_P Parameter: Organism Value: Zea mays
  misc_feature: MA Experiment 108528 PARAMETER Experiment Name: Zm_Imbibed_Seeds_P Parameter: Plant Line Value: 35A19
  misc_feature: MA Experiment 108528 PARAMETER Experiment Name: Zm_Imbibed_Seeds_P Parameter: Tissue Value: Aerial vs. Embryo
  misc_feature: MA Experiment ID: 108530 Result: Up-regulated in Transcription
  misc_feature: MA Experiment 108530 PARAMETER Experiment Name: Zm_Imbibed_Seeds_P Parameter: Age (day) Value: 6 vs. 2
  misc_feature: MA Experiment 108530 PARAMETER Experiment Name: Zm_Imbibed_Seeds_P Parameter: Organism Value: Zea mays
  misc_feature: MA Experiment 108530 PARAMETER Experiment Name: Zm_Imbibed_Seeds_P Parameter: Plant Line Value: 35A19
  misc_feature: MA Experiment 108530 PARAMETER Experiment Name: Zm_Imbibed_Seeds_P Parameter: Tissue Value: Aerial vs. Embryo
  misc_feature: MA Experiment ID: 108536 Result: Down-regulated in Transcription
  misc_feature: MA Experiment 108536 PARAMETER Experiment Name: Zm_Meristem_P Parameter: Age (day) Value: 8
  misc_feature: MA Experiment 108536 PARAMETER Experiment Name: Zm_Meristem_P Parameter: Organism Value: Zea mays
  misc_feature: MA Experiment 108536 PARAMETER Experiment Name: Zm_Meristem_P Parameter: Plant Line Value: 35A19
  misc_feature: MA Experiment 108536 PARAMETER Experiment Name: Zm_Meristem_P Parameter: Tissue Value: Shoot Meristem vs. Above Shoot Meristem
  misc_feature: MA Experiment ID: 108545 Result: Up-regulated in Transcription
  misc_feature: MA Experiment 108545 PARAMETER Experiment Name: Zm_Imbibed_Seeds_P Parameter: Age (day) Value: 3 vs. 2
  misc_feature: MA Experiment 108545 PARAMETER Experiment Name: Zm_Imbibed_Seeds_P Parameter: Organism Value: Zea mays
  misc_feature: MA Experiment 108545 PARAMETER Experiment Name: Zm_Imbibed_Seeds_P Parameter: Plant Line Value: 35A19
  misc_feature: MA Experiment 108545 PARAMETER Experiment Name: Zm_Imbibed_Seeds_P Parameter: Tissue Value: Aerial vs. Embryo
  misc_feature: MA Experiment ID: 108547 Result: Up-regulated in Transcription
  misc_feature: MA Experiment 108547 PARAMETER Experiment Name: Zm_Imbibed_Seeds_P Parameter: Age (day) Value: 4 vs. 2
  misc_feature: MA Experiment 108547 PARAMETER Experiment Name: Zm_Imbibed_Seeds_P Parameter: Organism Value: Zea mays
  misc_feature: MA Experiment 108547 PARAMETER Experiment Name: Zm_Imbibed_Seeds_P Parameter: Plant Line Value: 35A19
  misc_feature: MA Experiment 108547 PARAMETER Experiment Name: Zm_Imbibed_Seeds_P Parameter: Tissue Value: Aerial vs. Embryo
  misc_feature: MA Experiment ID: 108687 Result: Down-regulated in Transcription
  misc_feature: MA Experiment 108687 PARAMETER Experiment Name: Zm_Embryos-Flowers__P Parameter: Tissue Value: Embryo vs. Aerial+
  misc_feature: MA Experiment ID: 108688 Result: Down-regulated in Transcription
  misc_feature: MA Experiment 108688 PARAMETER Experiment Name: Zm_Embryos-Flowers__P Parameter: Tissue Value: Immature Flowers vs. Aerial+
  misc_feature: MA Experiment ID: 20000478 Result: Down-regulated in Transcription
  misc_feature: MA Experiment 20000478 PARAMETER Experiment Name: Zm_5mM_SA_P Parameter: Age (day) Value: 11
  misc_feature: MA Experiment 20000478 PARAMETER Experiment Name: Zm_5mM_SA_P Parameter: Organism Value: Zea mays
  misc_feature: MA Experiment 20000478 PARAMETER Experiment Name: Zm_5mM_SA_P Parameter: Plant Line Value: 35A19
  misc_feature: MA Experiment 20000478 PARAMETER Experiment Name: Zm_5mM_SA_P Parameter: Timepoint (hr) Value: 72
  misc_feature: MA Experiment 20000478 PARAMETER Experiment Name: Zm_5mM_SA_P Parameter: Tissue Value: Aerial
  misc_feature: MA Experiment 20000478 PARAMETER Experiment Name: Zm_5mM_SA_P Parameter: Treatment Value: 5mM SA vs. No Treatment
  misc_feature: MA Experiment ID: 20001610 Result: Up-regulated in Transcription
  misc_feature: MA Experiment 20001610 PARAMETER Experiment Name: Zm_50ppm_KNO3_L-to-H_P Parameter: Age (day) Value: 19
  misc_feature: MA Experiment 20001610 PARAMETER Experiment Name: Zm_50ppm_KNO3_L-to-H_P Parameter: Organism Value: Zea mays
  misc_feature: MA Experiment 20001610 PARAMETER Experiment Name: Zm_50ppm_KNO3_L-to-H_P Parameter: Plant Line Value: 35A19
  misc_feature: MA Experiment 20001610 PARAMETER Experiment Name: Zm_50ppm_KNO3_L-to-H_P Parameter: Timepoint (hr) Value: 2
  misc_feature: MA Experiment 20001610 PARAMETER Experiment Name: Zm_50ppm_KNO3_L-to-H_P Parameter: Tissue Value: Roots
  misc_feature: MA Experiment 20001610 PARAMETER Experiment Name: Zm_50ppm_KNO3_L-to-H_P Parameter: Treatment Value: 50ppm KNO3 vs. 50ppm KCl
aatcgcctccccaccccattcttatctcctcgccaccgcttgctatccgtcgcctcgccgcgcgcgcgtacgttcggttctcggccactgctcagctctcgctgcagcgatggccctgcaggccccgtcactcatgcgcgcgccggcggcacagcggtccgcgccgccacggccctccttctccgccccgtggtcgctgcggctgccggcgcctgcgcggcgccgggtggccactgccgcgcggatcaccatgcgggtcgcgtccaagcaggcctacatctgccgtgactgcgggtacatctacaacgacaggacgccgttcgacaagctggctgacaactacttctgccctgtttgtggagctccgaagagaaggttcagaccctacgagccagcagtctccaagaacgcgaacgccaccgatgccagaaaggcgaggaaggaggagctgaagaaggaggagagcatggggaaagccttgcctattgccatcgtcgtcgggatcattgccttggctggcctgtacttctacctcaacaatgtctacagctaaacgacgaatagatccgtttggtgcggcgaacaggattcatgccgttttgcagtctttttccctttgttaatcgttgcaatgtgctgtcttggtgcatgtactactagggctccaagactgtatacaagttttgctgttcatcttgaaataccacacattacataaccagcagtc

SEQ ID NO: 3982 - protein, 183 aa, Zea mays subsp. mays
  peptide (1)..(183): Ceres Seq. ID no. 12356138
  misc_feature (89)..(126): Pfam Name: Rubredoxin Pfam Description: Rubredoxin
  misc_feature (37)..(180): Homolog of NCBI NO: 18423226 NR Description: expressed protein
IASPPHSYLLATACYPSPRRARVRSVLGHCSALAAAMALQAPSLMRAPAAQRSAPPRPSFSAPWSLRLPAPARRRVATAARITMRVASKQAYICRDCGYIYNDRTPFDKLADNYFCPVCGAPKRRFRPYEPAVSKNANATDARKARKEELKKEESMGKALPIAIVVGIIALAGLYFYLNNVYS

SEQ ID NO: 3983 - protein, 149 aa, Zea mays subsp. mays
  peptide (1)..(149): Ceres Seq. ID no. 12356139
SPPHPILISSPPLAIRRLAARAYVRFSATAQLSLQRWPCRPRHSCARRRHSGPRRHGPPSPPRGRCGCRRLRGAGWPLPRGSPCGSRPSRPTSAVTAGTSTTTGRRSTSWLTTTSALFVELRREGSDPTSQQSPRTRTPPMPERRGRRS

SEQ ID NO: 3984 - protein, 147 aa, Zea mays subsp. mays
  peptide (1)..(147): Ceres Seq. ID no. 12356140
  misc_feature (53)..(90): Pfam Name: Rubredoxin Pfam Description: Rubredoxin
  misc_feature (1)..(144): Homolog of NCBI NO: 18423226 NR Description: expressed protein
MALQAPSLMRAPAAQRSAPPRPSFSAPWSLRLPAPARRRVATAARITMRVASKQAYICRDCGYIYNDRTPFDKLADNYFCPVCGAPKRRFRPYEPAVSKNANATDARKARKEELKKEESMGKALPIAIVVGIIALAGLYFYLNNVYS

SEQ ID NO: 3985 - DNA, 1435 bp, Zea mays subsp. mays
  misc_feature (1)..(1435): Ceres Seq. ID no. 12373758
  misc_feature: MA Experiment ID: 108522 Result: Up-regulated in Transcription
  misc_feature: MA Experiment 108522 PARAMETER Experiment Name: Zm_42deg_Heat_P Parameter: Age (day) Value: 8
  misc_feature: MA Experiment 108522 PARAMETER Experiment Name: Zm_42deg_Heat_P Parameter: Organism Value: Zea mays
  misc_feature: MA Experiment 108522 PARAMETER Experiment Name: Zm_42deg_Heat_P Parameter: Plant Line Value: 35A19
  misc_feature: MA Experiment 108522 PARAMETER Experiment Name: Zm_42deg_Heat_P Parameter: Temperature (deg C) Value: 42 vs. 22
  misc_feature: MA Experiment 108522 PARAMETER Experiment Name: Zm_42deg_Heat_P Parameter: Timepoint (hr) Value: 1
  misc_feature: MA Experiment 108522 PARAMETER Experiment Name: Zm_42deg_Heat_P Parameter: Tissue Value: Aerial
  misc_feature: MA Experiment ID: 108523 Result: Up-regulated in Transcription
  misc_feature: MA Experiment 108523 PARAMETER Experiment Name: Zm_42deg_Heat_P Parameter: Age (day) Value: 8
  misc_feature: MA Experiment 108523 PARAMETER Experiment Name: Zm_42deg_Heat_P Parameter: Organism Value: Zea mays
  misc_feature: MA Experiment 108523 PARAMETER Experiment Name: Zm_42deg_Heat_P Parameter: Plant Line Value: 35A19
  misc_feature: MA Experiment 108523 PARAMETER Experiment Name: Zm_42deg_Heat_P Parameter: Temperature (deg C) Value: 42 vs. 22
  misc_feature: MA Experiment 108523 PARAMETER Experiment Name: Zm_42deg_Heat_P Parameter: Timepoint (hr) Value: 6
  misc_feature: MA Experiment 108523 PARAMETER Experiment Name: Zm_42deg_Heat_P Parameter: Tissue Value: Aerial
  misc_feature: MA Experiment ID: 108535 Result: Up-regulated in Transcription
  misc_feature: MA Experiment 108535 PARAMETER Experiment Name: Zm_Meristem_P Parameter: Age (day) Value: 8
  misc_feature: MA Experiment 108535 PARAMETER Experiment Name: Zm_Meristem_P Parameter: Organism Value: Zea mays
  misc_feature: MA Experiment 108535 PARAMETER Experiment Name: Zm_Meristem_P Parameter: Plant Line Value: 35A19
  misc_feature: MA Experiment 108535 PARAMETER Experiment Name: Zm_Meristem_P Parameter: Tissue Value: Root Meristem vs. Above Root Meristem
  misc_feature: MA Experiment ID: 108544 Result: Down-regulated in Transcription
  misc_feature: MA Experiment ID: 108556 Result: Up-regulated in Transcription
  misc_feature: MA Experiment 108556 PARAMETER Experiment Name: Zm_Drought_P Parameter: Age (day) Value: 9
  misc_feature: MA Experiment 108556 PARAMETER Experiment Name: Zm_Drought_P Parameter: Organism Value: Zea mays
  misc_feature: MA Experiment 108556 PARAMETER Experiment Name: Zm_Drought_P Parameter: Plant Line Value: 35A19
  misc_feature: MA Experiment 108556 PARAMETER Experiment Name: Zm_Drought_P Parameter: Timepoint (hr) Value: 24
  misc_feature: MA Experiment 108556 PARAMETER Experiment Name: Zm_Drought_P Parameter: Tissue Value: Aerial
  misc_feature: MA Experiment 108556 PARAMETER Experiment Name: Zm_Drought_P Parameter: Treatment Value: Drought vs. No Drought
  misc_feature: MA Experiment ID: 108597 Result: Up-regulated in Transcription
  misc_feature: MA Experiment 108597 PARAMETER Experiment Name: Zm_100uM_ABA_P Parameter: Age (day) Value: 9
  misc_feature: MA Experiment 108597 PARAMETER Experiment Name: Zm_100uM_ABA_P Parameter: Organism Value: Zea mays
  misc_feature: MA Experiment 108597 PARAMETER Experiment Name: Zm_100uM_ABA_P Parameter: Plant Line Value: 35A19
  misc_feature: MA Experiment 108597 PARAMETER Experiment Name: Zm_100uM_ABA_P Parameter: Timepoint (hr) Value: 24
  misc_feature: MA Experiment 108597 PARAMETER Experiment Name: Zm_100uM_ABA_P Parameter: Tissue Value: Aerial
  misc_feature: MA Experiment 108597 PARAMETER Experiment Name: Zm_100uM_ABA_P Parameter: Treatment Value: 100uM ABA vs. No Treatment
  misc_feature: MA Experiment ID: 108689 Result: Up-regulated in Transcription
  misc_feature: MA Experiment 108689 PARAMETER Experiment Name: Zm_Drought_Roots_P Parameter: Age (day) Value: 9
  misc_feature: MA Experiment 108689 PARAMETER Experiment Name: Zm_Drought_Roots_P Parameter: Organism Value: Zea mays
  misc_feature: MA Experiment 108689 PARAMETER Experiment Name: Zm_Drought_Roots_P Parameter: Plant Line Value: 35A19
  misc_feature: MA Experiment 108689 PARAMETER Experiment Name: Zm_Drought_Roots_P Parameter: Timepoint (hr) Value: 24
  misc_feature: MA Experiment 108689 PARAMETER Experiment Name: Zm_Drought_Roots_P Parameter: Tissue Value: Roots
  misc_feature: MA Experiment 108689 PARAMETER Experiment Name: Zm_Drought_Roots_P Parameter: Treatment Value: Drought vs. No Drought
  misc_feature: MA Experiment ID: 20000487 Result: Up-regulated in Transcription
  misc_feature: MA Experiment 20000487 PARAMETER Experiment Name: Zm_50mM_NH4NO3_L_to_H_P Parameter: Organism Value: Zea mays
  misc_feature: MA Experiment 20000487 PARAMETER Experiment Name: Zm_50mM_NH4NO3_L_to_H_P Parameter: Timepoint (hr) Value: 4
  misc_feature: MA Experiment 20000487 PARAMETER Experiment Name: Zm_50mM_NH4NO3_L_to_H_P Parameter: Tissue Value: Leaves
  misc_feature: MA Experiment 20000487 PARAMETER Experiment Name: Zm_50mM_NH4NO3_L_to_H_P Parameter: Treatment Value: 50mM NH4NO3 vs. 100mM Mannitol
  misc_feature: MA Experiment ID: 20000535 Result: Up-regulated in Transcription
  misc_feature: MA Experiment 20000535 PARAMETER Experiment Name: Zm_Hybrid_Seed_Dev_P Parameter: DAP Value: 30 vs. 12
  misc_feature: MA Experiment 20000535 PARAMETER Experiment Name: Zm_Hybrid_Seed_Dev_P Parameter: Organism Value: Zea mays
  misc_feature: MA Experiment 20000535 PARAMETER Experiment Name: Zm_Hybrid_Seed_Dev_P Parameter: Plant Line Value: 35A19
  misc_feature: MA Experiment 20000535 PARAMETER Experiment Name: Zm_Hybrid_Seed_Dev_P Parameter: Tissue Value: Embryo vs. Unfert Floret
aagaagactatgggcttctagcaattcacgtggttgaagacgtcttgtcccgttccagaacactcgcgctctcgcacgacggcacgagcgcgctactgccatagtgccatggcgagcggcggcggtgctgcggcgcggatggacccggaggtagcaacagagctggtgcggaagggtgccaccctcctcctcctcgatgtcccccagcgcaccctcttcggaatcgatacccagatgttctctgttggacccaagttcaaagggatgaagatggtgccaccgggagcccatttcgtctactactgctccccaaacaggcatgggaatgagtttgcacctactgtcgggttctttcttactacacaccaatctgaggtgattgttcgaaagtgggatgtgcaagaggaacgattaatcaaattatcagaagaagaggatatcagatactcagaagctgtaagacattttgaatttgatgatcaacttggaccatacaatttagattcttatggagattggaaacaactttcggactacttgtcaccgaatgtcattgagcgtcttgaaccaattggaggagaaatcacaattgcgtgggagtcatcatggatggataaagctccccaaagtgacatggagagacgtttggtggaacaactaagagaaggaaagtttgcaaagaatgctcctgtacagtctgggcggagaggatgctactacacaagtatccctgcttcagttaagcataaggacatctctgggggtgacttgacagccctaaacttggacaaaacaagtttgctggagactattttggccaaaaattatgaaggtcaagaagatctattcttgggggagcttcagtttgctttcatagcttttatgatgggtcaatcactagaggcttttatgcagtggaaagcactagtcagccttcttttgagctgcagtgatgctccccttcatacaaggactaacatgtttataaagtttataaggacattatactatcaactcaagcatggttttcaacatacccaagattccaaaagtggggatatgggcaattctctgtgtttggatgaaacatggttttcaagagacatattcctgtaccgtctttcaaaggatttctttacagttgtatttgaagccccagtcgtggatggagaccttctgtcatgggctaggaaactaaaatcgcttctggagactacgtttgggtgggatcttgaggacgacgcagtgaaccttattgatgaagatgacgagtttgctcctgtcgttgtggagatggatggatcataagctaatgaagccagattccatgcagagaagtcagcagttgttcagcgtttctaccttttggtacagtggtgcgctgacttgtatgaagttttactgcttgtgctgacattgaatatacgtgctaatt

SEQ ID NO: 3986 - protein, 399 aa, Zea mays subsp. mays
  peptide (1)..(399): Ceres Seq. ID no. 12373759
  misc_feature (11)..(376): Pfam Name: AAR2 protein Pfam Description: AAR2 protein
  misc_feature (7)..(396): Homolog of NCBI NO: 24211598 NR Description: Protein c20orf4 homolog
  misc_feature (7)..(396): Homolog of NCBI NO: 4680685 NR Description: CGI-23 protein [Homo sapiens]
  misc_feature (7)..(396): Homolog of NCBI NO: 18034690 NR Description: chromosome 20 open reading frame 4 [Homo sapiens]
  misc_feature (7)..(396): Homolog of NCBI NO: 34860266 NR Description: similar to RIKEN cDNA 0610011L14 gene [Rattus
  misc_feature (161)..(399): Homolog of NCBI NO: 6069471 NR Description: S-locus protein 3 [Brassica rapa]
  misc_feature (11)..(281): Homolog of NCBI NO: 15864559 NR Description: CePP putative protein [Brassica napus]
  misc_feature (11)..(378): Homolog of NCBI NO: 7657874 NR Description: CePP protein [Brassica napus var. napus]
  misc_feature (55)..(399): Homolog of NCBI NO: 30697362 NR Description: expressed protein [Arabidopsis thaliana]
  misc_feature (11)..(399): Homolog of NCBI NO: 18408532 NR Description: expressed protein
  misc_feature (1)..(399): Homolog of NCBI NO: 38346780 NR Description: OSJNBa0095H06.5 [Oryza sativa (japonica
MASGGGAAARMDPEVATELVRKGATLLLLDVPQRTLFGIDTQMFSVGPKFKGMKMVPPGAHFVYYCSPNRHGNEFAPTVGFFLTTHQSEVIVRKWDVQEERLIKLSEEEDIRYSEAVRHFEFDDQLGPYNLDSYGDWKQLSDYLSPNVIERLEPIGGEITIAWESSWMDKAPQSDMERRLVEQLREGKFAKNAPVQSGRRGCYYTSIPASVKHKDISGGDLTALNLDKTSLLETILAKNYEGQEDLFLGELQFAFIAFMMGQSLEAFMQWKALVSLLLSCSDAPLHTRTNMFIKFIRTLYYQLKHGFQHTQDSKSGDMGNSLCLDETWFSRDIFLYRLSKDFFTVVFEAPVVDGDLLSWARKLKSLLETTFGWDLEDDAVNLIDEDDEFAPVVVEMDGS

SEQ ID NO: 3987 - protein, 389 aa, Zea mays subsp. mays
  peptide (1)..(389): Ceres Seq. ID no. 12373760
  misc_feature (1)..(366): Pfam Name: AAR2 protein Pfam Description: AAR2 protein
  misc_feature (1)..(386): Homolog of NCBI NO: 24211598 NR Description: Protein c20orf4 homolog
  misc_feature (1)..(386): Homolog of NCBI NO: 4680685 NR Description: CGI-23 protein [Homo sapiens]
  misc_feature (1)..(386): Homolog of NCBI NO: 18034690 NR Description: chromosome 20 open reading frame 4 [Homo sapiens]
  misc_feature (1)..(386): Homolog of NCBI NO: 34860266 NR Description: similar to RIKEN cDNA 0610011L14 gene [Rattus
  misc_feature (151)..(389): Homolog of NCBI NO: 6069471 NR Description: S-locus protein 3 [Brassica rapa]
  misc_feature (1)..(271): Homolog of NCBI NO: 15864559 NR Description: CePP putative protein [Brassica napus]
  misc_feature (1)..(368): Homolog of NCBI NO: 7657874 NR Description: CePP protein [Brassica napus var. napus]
  misc_feature (45)..(389): Homolog of NCBI NO: 30697362 NR Description: expressed protein [Arabidopsis thaliana]
  misc_feature (1)..(389): Homolog of NCBI NO: 18408532 NR Description: expressed protein
  misc_feature (1)..(389): Homolog of NCBI NO: 38346780 NR Description: OSJNBa0095H06.5 [Oryza sativa (japonica
MDPEVATELVRKGATLLLLDVPQRTLFGIDTQMFSVGPKFKGMKMVPPGAHFVYYCSPNRHGNEFAPTVGFFLTTHQSEVIVRKWDVQEERLIKLSEEEDIRYSEAVRHFEFDDQLGPYNLDSYGDWKQLSDYLSPNVIERLEPIGGEITIAWESSWMDKAPQSDMERRLVEQLREGKFAKNAPVQSGRRGCYYTSIPASVKHKDISGGDLTALNLDKTSLLETILAKNYEGQEDLFLGELQFAFIAFMMGQSLEAFMQWKALVSLLLSCSDAPLHTRTNMFIKFIRTLYYQLKHGFQHTQDSKSGDMGNSLCLDETWFSRDIFLYRLSKDFFTVVFEAPVVDGDLLSWARKLKSLLETTFGWDLEDDAVNLIDEDDEFAPVVVEMDGS

SEQ ID NO: 3988 - protein, 357 aa, Zea mays subsp. mays
  peptide (1)..(357): Ceres Seq. ID no. 12373761
  misc_feature (1)..(334): Pfam Name: AAR2 protein Pfam Description: AAR2 protein
  misc_feature (1)..(354): Homolog of NCBI NO: 24211598 NR Description: Protein c20orf4 homolog
  misc_feature (1)..(354): Homolog of NCBI NO: 4680685 NR Description: CGI-23 protein [Homo sapiens]
  misc_feature (1)..(354): Homolog of NCBI NO: 18034690 NR Description: chromosome 20 open reading frame 4 [Homo sapiens]
  misc_feature (1)..(354): Homolog of NCBI NO: 34860266 NR Description: similar to RIKEN cDNA 0610011L14 gene [Rattus
  misc_feature (119)..(357): Homolog of NCBI NO: 6069471 NR Description: S-locus protein 3 [Brassica rapa]
  misc_feature (1)..(239): Homolog of NCBI NO: 15864559 NR Description: CePP putative protein [Brassica napus]
  misc_feature (1)..(336): Homolog of NCBI NO: 7657874 NR Description: CePP protein [Brassica napus var. napus]
  misc_feature (13)..(357): Homolog of NCBI NO: 30697362 NR Description: expressed protein [Arabidopsis thaliana]
  misc_feature (1)..(357): Homolog of NCBI NO: 18408532 NR Description: expressed protein
  misc_feature (1)..(357): Homolog of NCBI NO: 38346780 NR Description: OSJNBa0095H06.5 [Oryza sativa (japonica
MFSVGPKFKGMKMVPPGAHFVYYCSPNRHGNEFAPTVGFFLTTHQSEVIVRKWDVQEERLIKLSEEEDIRYSEAVRHFEFDDQLGPYNLDSYGDWKQLSDYLSPNVIERLEPIGGEITIAWESSWMDKAPQSDMERRLVEQLREGKFAKNAPVQSGRRGCYYTSIPASVKHKDISGGDLTALNLDKTSLLETILAKNYEGQEDLFLGELQFAFIAFMMGQSLEAFMQWKALVSLLLSCSDAPLHTRTNMFIKFIRTLYYQLKHGFQHTQDSKSGDMGNSLCLDETWFSRDIFLYRLSKDFFTVVFEAPVVDGDLLSWARKLKSLLETTFGWDLEDDAVNLIDEDDEFAPVVVEMDGS

SEQ ID NO: 3989 - DNA, 1377 bp, Zea mays subsp. mays
  misc_feature (1)..(1377): Ceres Seq. ID no. 12353719
  misc_feature: MA Experiment ID: 20000492 Result: Down-regulated in Transcription
  misc_feature: MA Experiment 20000492 PARAMETER Experiment Name: Zm_Hybrid_Seed_Dev_P Parameter: DAP Value: 12
  misc_feature: MA Experiment 20000492 PARAMETER Experiment Name: Zm_Hybrid_Seed_Dev_P Parameter: Organism Value: Zea mays
  misc_feature: MA Experiment 20000492 PARAMETER Experiment Name: Zm_Hybrid_Seed_Dev_P Parameter: Plant Line Value: 35A19
  misc_feature: MA Experiment 20000492 PARAMETER Experiment Name: Zm_Hybrid_Seed_Dev_P Parameter: Tissue Value: Fert Kernel vs. Unfert Floret
  misc_feature: MA Experiment ID: 20000534 Result: Down-regulated in Transcription
  misc_feature: MA Experiment 20000534 PARAMETER Experiment Name: Zm_Hybrid_Pollen_P Parameter: Age (day) Value: 8
  misc_feature: MA Experiment 20000534 PARAMETER Experiment Name: Zm_Hybrid_Pollen_P Parameter: Organism Value: Zea mays
  misc_feature: MA Experiment 20000534 PARAMETER Experiment Name: Zm_Hybrid_Pollen_P Parameter: Plant Line Value: 35A19
  misc_feature: MA Experiment 20000534 PARAMETER Experiment Name: Zm_Hybrid_Pollen_P Parameter: Tissue Value: Pollen vs. Aerial
gtgctccccccaggctcctcttcctcgctttccctccaccccgggcgcaaaccctaaccctaccgtcgctcgccccgcggcgtctgccaatggcgcgccccgtgtgagtgtgcgcgagagaggggtagaccttgaggccgctacccggggaggagagcgagagatgtataaacaggggggagcggggggaggggctgggctggaccggaagcggatcaacgacgcgctggataagcatctcgagaaggcggtcgcgtcgccgtccacgtcgagggggtcggcgggcggcgggcgcgaccaccaccgcctcgtcgtgccgtcctccgtgtcgtccatccccaagggccgctgctccgaaggggagtctgattctgatagtgaagcatcggatgttagcggctctgatggagaagacacctcatggatttcatggtattgcaacttaagagggaatgagttcttctgtgaagtcgacgatgattatattcaagacgacttcaacctttgtggtctcagcagccaagttccttattatgattatgctctcgatctcattttagatatcgagtcatctcatggtgatatgttcactgaggaacaaaatgagctcgtagaatcagctgcagagatgctttatgggctgatccatgcacgatacattctgaccagtaaagggctggctgcaatgctggagaagtataggaactatgactttgggcggtgcccgcgtgtttactgctgtggtcaaccatgcctgccagttggacaatcagacatccatcgatctagtaccgtgaagatatactgccccaagtgtgaagacatctactacccacggtccaagtaccaaggcaacatcgacggcgcatactttgggacaacgttccctcatctgttcctgatgacatacgagcacctcaagccacagaagctctcgcagcgctatgttcctcgtgtctttggcttcaagctccacaagccatgaacctcatgtatttgtcttttaaactcctcaagacgtggcactgggggcatgcgggagttttgcaatccttgaagacttgcatataagagcgccattggcaggtcagtggattggtaaaattctatcatgctgcagcgtgcttgtaccttagctggctggcacctatccaacatttgaatgtagctctaaggatatcaatgttgtaacctaactgctattgttctttgattagtaaaccaggagccccccctacaatgtagaatatggcaattatttatggctttgcagaaaataacaacccttcatctgcttggttctcgtaagatggccctttaattttgtagtttgcgaacttctattttgaaatgtgatttgcaaaggtgcgtcatctc

SEQ ID NO: 3990 - protein, 327 aa, Zea mays subsp. mays
  peptide (1)..(327): Ceres Seq. ID no. 12353720
  misc_feature (137)..(315): Pfam Name: Casein kinase II regulatory subunit Pfam Description: Casein kinase II regulatory subunit
  misc_feature (55)..(327): Homolog of NCBI NO: 15238013 NR Description: casein kinase II beta chain
  misc_feature (63)..(325): Homolog of NCBI NO: 30689795 NR Description: casein kinase II beta chain, putative
  misc_feature (55)..(327): Homolog of NCBI NO: 15236597 NR Description: casein kinase II beta chain CKB2
  misc_feature (63)..(325): Homolog of NCBI NO: 15224934 NR Description: putative casein kinase II beta subunit
  misc_feature (67)..(327): Homolog of NCBI NO: 11527002 NR Description: protein kinase CK2 regulatory subunit CK2B2 [Zea
  misc_feature (56)..(326): Homolog of NCBI NO: 37536920 NR Description: putative casein kinase II beta subunit
  misc_feature (55)..(326): Homolog of NCBI NO: 21261784 NR Description: protein kinase Ck2 regulatory subunit 2
  misc_feature (86)..(327): Homolog of NCBI NO: 29367573 NR Description: possible protein kinase CK2 regulatory subunit
  misc_feature (55)..(327): Homolog of NCBI NO: 34901776 NR Description: OJ1058_B11.17 [Oryza sativa (japonica
  misc_feature (55)..(327): Homolog of NCBI NO: 11527004 NR Description: protein kinase CK2 regulatory subunit CK2B3 [Zea
CSPQAPLPRFPSTPGANPNPTVARPAASANGAPRVSVRERGVDLEAATRGGEREMYKQGGAGGGAGLDRKRINDALDKHLEKAVASPSTSRGSAGGGRDHHRLVVPSSVSSIPKGRCSEGESDSDSEASDVSGSDGEDTSWISWYCNLRGNEFFCEVDDDYIQDDFNLCGLSSQVPYYDYALDLILDIESSHGDMFTEEQNELVESAAEMLYGLIHARYILTSKGLAAMLEKYRNYDFGRCPRVYCCGQPCLPVGQSDIHRSSTVKIYCPKCEDIYYPRSKYQGNIDGAYFGTTFPHLFLMTYEHLKPQKLSQRYVPRVFGFKLHKP

SEQ ID NO: 3991 - protein, 273 aa, Zea mays subsp. mays
  peptide (1)..(273): Ceres Seq. ID no. 12353721
  misc_feature (83)..(261): Pfam Name: Casein kinase II regulatory subunit Pfam Description: Casein kinase II regulatory subunit
  misc_feature (1)..(273): Homolog of NCBI NO: 15238013 NR Description: casein kinase II beta chain
  misc_feature (9)..(271): Homolog of NCBI NO: 30689795 NR Description: casein kinase II beta chain, putative
  misc_feature (1)..(273): Homolog of NCBI NO: 15236597 NR Description: casein kinase II beta chain CKB2
  misc_feature (9)..(271): Homolog of NCBI NO: 15224934 NR Description: putative casein kinase II beta subunit
  misc_feature (13)..(273): Homolog of NCBI NO: 11527002 NR Description: protein kinase CK2 regulatory subunit CK2B2 [Zea
  misc_feature (2)..(272): Homolog of NCBI NO: 37536920 NR Description: putative casein kinase II beta subunit
  misc_feature (1)..(272): Homolog of NCBI NO: 21261784 NR Description: protein kinase Ck2 regulatory subunit 2
  misc_feature (32)..(273): Homolog of NCBI NO: 29367573 NR Description: possible protein kinase CK2 regulatory subunit
  misc_feature (1)..(273): Homolog of NCBI NO: 34901776 NR Description: OJ1058_B11.17 [Oryza sativa (japonica
  misc_feature (1)..(273): Homolog of NCBI NO: 11527004 NR Description: protein kinase CK2 regulatory subunit CK2B3 [Zea
MYKQGGAGGGAGLDRKRINDALDKHLEKAVASPSTSRGSAGGGRDHHRLVVPSSVSSIPKGRCSEGESDSDSEASDVSGSDGEDTSWISWYCNLRGNEFFCEVDDDYIQDDFNLCGLSSQVPYYDYALDLILDIESSHGDMFTEEQNELVESAAEMLYGLIHARYILTSKGLAAMLEKYRNYDFGRCPRVYCCGQPCLPVGQSDIHRSSTVKIYCPKCEDIYYPRSKYQGNIDGAYFGTTFPHLFLMTYEHLKPQKLSQRYVPRVFGFKLHKP

SEQ ID NO: 3992 - DNA, 808 bp, Zea mays subsp. mays
  misc_feature (1)..(808): Ceres Seq. ID no. 12566346
  misc_feature: MA Experiment ID: 108515 Result: Down-regulated in Transcription
  misc_feature: MA Experiment 108515 PARAMETER Experiment Name: Zm_2mM_SA_P Parameter: Age (day) Value: 8
  misc_feature: MA Experiment 108515 PARAMETER Experiment Name: Zm_2mM_SA_P Parameter: Organism Value: Zea mays
  misc_feature: MA Experiment 108515 PARAMETER Experiment Name: Zm_2mM_SA_P Parameter: Plant Line Value: 35A19
  misc_feature: MA Experiment 108515 PARAMETER Experiment Name: Zm_2mM_SA_P Parameter: Timepoint (hr) Value: 12
  misc_feature: MA Experiment 108515 PARAMETER Experiment Name: Zm_2mM_SA_P Parameter: Tissue Value: Aerial
  misc_feature: MA Experiment 108515 PARAMETER Experiment Name: Zm_2mM_SA_P Parameter: Treatment Value: 2mM SA vs. No Treatment
  misc_feature: MA Experiment ID: 108523 Result: Down-regulated in Transcription
  misc_feature: MA Experiment 108523 PARAMETER Experiment Name: Zm_42deg_Heat_P Parameter: Age (day) Value: 8
  misc_feature: MA Experiment 108523 PARAMETER Experiment Name: Zm_42deg_Heat_P Parameter: Organism Value: Zea mays
  misc_feature: MA Experiment 108523 PARAMETER Experiment Name: Zm_42deg_Heat_P Parameter: Plant Line Value: 35A19
  misc_feature: MA Experiment 108523 PARAMETER Experiment Name: Zm_42deg_Heat_P Parameter: Temperature (deg C) Value: 42 vs. 22
  misc_feature: MA Experiment 108523 PARAMETER Experiment Name: Zm_42deg_Heat_P Parameter: Timepoint (hr) Value: 6
  misc_feature: MA Experiment 108523 PARAMETER Experiment Name: Zm_42deg_Heat_P Parameter: Tissue Value: Aerial
  misc_feature: MA Experiment ID: 108527 Result: Down-regulated in Transcription
  misc_feature: MA Experiment 108527 PARAMETER Experiment Name: Zm_5mM_NO_P Parameter: Age (day) Value: 8
  misc_feature: MA Experiment 108527 PARAMETER Experiment Name: Zm_5mM_NO_P Parameter: Organism Value: Zea mays
  misc_feature: MA Experiment 108527 PARAMETER Experiment Name: Zm_5mM_NO_P Parameter: Plant Line Value: 35A19
  misc_feature: MA Experiment 108527 PARAMETER Experiment Name: Zm_5mM_NO_P Parameter: Timepoint (hr) Value: 6
  misc_feature: MA Experiment 108527 PARAMETER Experiment Name: Zm_5mM_NO_P Parameter: Tissue Value: Aerial
  misc_feature: MA Experiment 108527 PARAMETER Experiment Name: Zm_5mM_NO_P Parameter: Treatment Value: 5mM NO vs. No Treatment
  misc_feature: MA Experiment ID: 108528 Result: Up-regulated in Transcription
  misc_feature: MA Experiment 108528 PARAMETER Experiment Name: Zm_Imbibed_Seeds_P Parameter: Age (day) Value: 5 vs. 2
  misc_feature: MA Experiment 108528 PARAMETER Experiment Name: Zm_Imbibed_Seeds_P Parameter: Organism Value: Zea mays
  misc_feature: MA Experiment 108528 PARAMETER Experiment Name: Zm_Imbibed_Seeds_P Parameter: Plant Line Value: 35A19
  misc_feature: MA Experiment 108528 PARAMETER Experiment Name: Zm_Imbibed_Seeds_P Parameter: Tissue Value: Aerial vs. Embryo
  misc_feature: MA Experiment ID: 108529 Result: Up-regulated in Transcription
  misc_feature: MA Experiment 108529 PARAMETER Experiment Name: Zm_Imbibed_Seeds_P Parameter: Age (day) Value: 5 vs. 2
  misc_feature: MA Experiment 108529 PARAMETER Experiment Name: Zm_Imbibed_Seeds_P Parameter: Organism Value: Zea mays
  misc_feature: MA Experiment 108529 PARAMETER Experiment Name: Zm_Imbibed_Seeds_P Parameter: Plant Line Value: 35A19
  misc_feature: MA Experiment 108529 PARAMETER Experiment Name: Zm_Imbibed_Seeds_P Parameter: Tissue Value: Roots vs. Embryo
  misc_feature: MA Experiment ID: 108530 Result: Up-regulated in Transcription
  misc_feature: MA Experiment 108530 PARAMETER Experiment Name: Zm_Imbibed_Seeds_P Parameter: Age (day) Value: 6 vs. 2
  misc_feature: MA Experiment 108530 PARAMETER Experiment Name: Zm_Imbibed_Seeds_P Parameter: Organism Value: Zea mays
  misc_feature: MA Experiment 108530 PARAMETER Experiment Name: Zm_Imbibed_Seeds_P Parameter: Plant Line Value: 35A19
  misc_feature: MA Experiment 108530 PARAMETER Experiment Name: Zm_Imbibed_Seeds_P Parameter: Tissue Value: Aerial vs. Embryo
  misc_feature: MA Experiment ID: 108535 Result: Down-regulated in Transcription
  misc_feature: MA Experiment 108535 PARAMETER Experiment Name: Zm_Meristem_P Parameter: Age (day) Value: 8
  misc_feature: MA Experiment 108535 PARAMETER Experiment Name: Zm_Meristem_P Parameter: Organism Value: Zea mays
  misc_feature: MA Experiment 108535 PARAMETER Experiment Name: Zm_Meristem_P Parameter: Plant Line Value: 35A19
  misc_feature: MA Experiment 108535 PARAMETER Experiment Name: Zm_Meristem_P Parameter: Tissue Value: Root Meristem vs. Above Root Meristem
  misc_feature: MA Experiment ID: 108542 Result: Down-regulated in Transcription
  misc_feature: MA Experiment 108542 PARAMETER Experiment Name: Zm_150mM_NaCl_P Parameter: Age (day) Value: 8
  misc_feature: MA Experiment 108542 PARAMETER Experiment Name: Zm_150mM_NaCl_P Parameter: Organism Value: Zea mays
  misc_feature: MA Experiment 108542 PARAMETER Experiment Name: Zm_150mM_NaCl_P Parameter: Plant Line Value: 35A19
  misc_feature: MA Experiment 108542 PARAMETER Experiment Name: Zm_150mM_NaCl_P Parameter: Timepoint (hr) Value: 6
  misc_feature: MA Experiment 108542 PARAMETER Experiment Name: Zm_150mM_NaCl_P Parameter: Tissue Value: Aerial
  misc_feature: MA Experiment 108542 PARAMETER Experiment Name: Zm_150mM_NaCl_P Parameter: Treatment Value: 150mM NaCl vs. No Treatment
  misc_feature: MA Experiment ID: 108544 Result: Up-regulated in Transcription
  misc_feature: MA Experiment ID: 108556 Result: Down-regulated in Transcription
  misc_feature: MA Experiment 108556 PARAMETER Experiment Name: Zm_Drought_P Parameter: Age (day) Value: 9
  misc_feature: MA Experiment 108556 PARAMETER Experiment Name: Zm_Drought_P Parameter: Organism Value: Zea mays
  misc_feature: MA Experiment 108556 PARAMETER Experiment Name: Zm_Drought_P Parameter: Plant Line Value: 35A19
  misc_feature: MA Experiment 108556 PARAMETER Experiment Name: Zm_Drought_P Parameter: Timepoint (hr) Value: 24
  misc_feature: MA Experiment 108556 PARAMETER Experiment Name: Zm_Drought_P Parameter: Tissue Value: Aerial
  misc_feature: MA Experiment 108556 PARAMETER Experiment Name: Zm_Drought_P Parameter: Treatment Value: Drought vs. No Drought
  misc_feature: MA Experiment ID: 108559 Result: Down-regulated in Transcription
  misc_feature: MA Experiment 108559 PARAMETER Experiment Name: Zm_5mM_NO_P Parameter: Age (day) Value: 8
  misc_feature: MA Experiment 108559 PARAMETER Experiment Name: Zm_5mM_NO_P Parameter: Organism Value: Zea mays
  misc_feature: MA Experiment 108559 PARAMETER Experiment Name: Zm_5mM_NO_P Parameter: Plant Line Value: 35A19
  misc_feature: MA Experiment 108559 PARAMETER Experiment Name: Zm_5mM_NO_P Parameter: Timepoint (hr) Value: 12
  misc_feature: MA Experiment 108559 PARAMETER Experiment Name: Zm_5mM_NO_P Parameter: Tissue Value: Aerial
  misc_feature: MA Experiment 108559 PARAMETER Experiment Name: Zm_5mM_NO_P Parameter: Treatment Value: 5mM NO vs. No Treatment
  misc_feature: MA Experiment ID: 108597 Result: Down-regulated in Transcription
  misc_feature: MA Experiment 108597 PARAMETER Experiment Name: Zm_100uM_ABA_P Parameter: Age (day) Value: 9
  misc_feature: MA Experiment 108597 PARAMETER Experiment Name: Zm_100uM_ABA_P Parameter: Organism Value: Zea mays
  misc_feature: MA Experiment 108597 PARAMETER Experiment Name: Zm_100uM_ABA_P Parameter: Plant Line Value: 35A19
  misc_feature: MA Experiment 108597 PARAMETER Experiment Name: Zm_100uM_ABA_P Parameter: Timepoint (hr) Value: 24
  misc_feature: MA Experiment 108597 PARAMETER Experiment Name: Zm_100uM_ABA_P Parameter: Tissue Value: Aerial
  misc_feature: MA Experiment 108597 PARAMETER Experiment Name: Zm_100uM_ABA_P Parameter: Treatment Value: 100uM ABA vs. No Treatment
  misc_feature: MA Experiment ID: 108687 Result: Down-regulated in Transcription
  misc_feature: MA Experiment 108687 PARAMETER Experiment Name: Zm_Embryos-Flowers__P Parameter: Tissue Value: Embryo vs. Aerial+
  misc_feature: MA Experiment ID: 108688 Result: Down-regulated in Transcription
  misc_feature: MA Experiment 108688 PARAMETER Experiment Name: Zm_Embryos-Flowers__P Parameter: Tissue Value: Immature Flowers vs. Aerial+
  misc_feature: MA Experiment ID: 108689 Result: Up-regulated in Transcription
  misc_feature: MA Experiment 108689 PARAMETER Experiment Name: Zm_Drought_Roots_P Parameter: Age (day) Value: 9
  misc_feature: MA Experiment 108689 PARAMETER Experiment Name: Zm_Drought_Roots_P Parameter: Organism Value: Zea mays
  misc_feature: MA Experiment 108689 PARAMETER Experiment Name: Zm_Drought_Roots_P Parameter: Plant Line Value: 35A19
  misc_feature: MA Experiment 108689 PARAMETER Experiment Name: Zm_Drought_Roots_P Parameter: Timepoint (hr) Value: 24
  misc_feature: MA Experiment 108689 PARAMETER Experiment Name: Zm_Drought_Roots_P Parameter: Tissue Value: Roots
  misc_feature: MA Experiment 108689 PARAMETER Experiment Name: Zm_Drought_Roots_P Parameter: Treatment Value: Drought vs. No Drought
  misc_feature: MA Experiment ID: 20000488 Result: Down-regulated in Transcription
  misc_feature: MA Experiment 20000488 PARAMETER Experiment Name: Zm_50mM_NH4NO3_L_to_H_P Parameter: Organism Value: Zea mays
  misc_feature: MA Experiment 20000488 PARAMETER Experiment Name: Zm_50mM_NH4NO3_L_to_H_P Parameter: Timepoint (hr) Value: 8
  misc_feature: MA Experiment 20000488 PARAMETER Experiment Name: Zm_50mM_NH4NO3_L_to_H_P Parameter: Tissue Value: Leaves
  misc_feature: MA Experiment 20000488 PARAMETER Experiment Name: Zm_50mM_NH4NO3_L_to_H_P Parameter: Treatment Value: 50mM NH4NO3 vs. 100mM Mannitol
  misc_feature: MA Experiment ID: 20000626 Result: Down-regulated in Transcription
  misc_feature: MA Experiment 20000626 PARAMETER Experiment Name: Zm_Herbicide-Treatments_P Parameter: Timepoint (hr) Value: 12
  misc_feature: MA Experiment 20000626 PARAMETER Experiment Name: Zm_Herbicide-Treatments_P Parameter: Tissue Value: Aerial
  misc_feature: MA Experiment 20000626 PARAMETER Experiment Name: Zm_Herbicide-Treatments_P Parameter: Treatment Value: Roundup vs. No Treatment
  misc_feature: MA Experiment ID: 20001606 Result: Down-regulated in Transcription
  misc_feature: MA Experiment 20001606 PARAMETER Experiment Name: Zm_50ppm_KNO3_L-to-H_P Parameter: Age (day) Value: 19
  misc_feature: MA Experiment 20001606 PARAMETER Experiment Name: Zm_50ppm_KNO3_L-to-H_P Parameter: Organism Value: Zea mays
  misc_feature: MA Experiment 20001606 PARAMETER Experiment Name: Zm_50ppm_KNO3_L-to-H_P Parameter: Plant Line Value: 35A19
  misc_feature: MA Experiment 20001606 PARAMETER Experiment Name: Zm_50ppm_KNO3_L-to-H_P Parameter: Timepoint (hr) Value: 8
  misc_feature: MA Experiment 20001606 PARAMETER Experiment Name: Zm_50ppm_KNO3_L-to-H_P Parameter: Tissue Value: Shoots
  misc_feature: MA Experiment 20001606 PARAMETER Experiment Name: Zm_50ppm_KNO3_L-to-H_P Parameter: Treatment Value: 50ppm KNO3 vs. 50ppm KCl
aattaatccaacgtagccatgcacaacacgtcaacacacacgcacgcaggctgctgctgggcgttctcggcggtggcggcggtggaagggctgaacaagatccggacggggcggctggtgtcgctgtcggagcaggagctggtggactgcgacgtcagcggcgtggaccagggctgcgacggcggcctcatggacaacgccttccagttcgtcgcgcgccgcggcgggctggcctcggagtcgggctacccgtaccagggccgggacgggccctgccgctcgtcggccgccgccgccgccgcgtccatccggggccacgaggacgtgccgcgcaacaacgaggccgcgctcgcggccgccgtggcccaccagcccgtgtccgtggccatcaacggcgaggacatggcgttccgcttctacgacagcggcgtgctgggcggggcctgcggcacggacctcaaccacgccatcacggccgtcgggtacggcacggcggccgacggcacaaggtactggctgatgaagaactcctggggcgcgtcgtggggcgagggcggatacgtccggatccgccgcggcgtccgcggggagggcgtctgcggtctcgccaagttgccgtcttaccccgtctagagccaggcttattcccgtcggttttaggccgacgagaattaagtgttttcctgtagtaataactatgtccaaaaatatgttaaacaaacaataattgcaactgctgtctggtgtaattgcaacttctgatctggtgtgattgcaacttctatataactatgtccaaaaatctgtt

SEQ ID NO: 3993 - protein, 228 aa, Zea mays subsp. mays
  peptide (1)..(228): Ceres Seq. ID no. 12566347
LIQRSHAQHVNTHARRLLLGVLGGGGGGRAEQDPDGAAGVAVGAGAGGLRRQRRGPGLRRRPHGQRLPVRRAPRRAGLGVGLPVPGPGRALPLVGRRRRRVHPGPRGRAAQQRGRARGRRGPPARVRGHQRRGHGVPLLRQRRAGRGLRHGPQPRHHGRRVRHGGRRHKVLADEELLGRVVGRGRIRPDPPRRPRGGRLRSRQVAVLPRLEPGLFPSVLGRRELSVFL

SEQ ID NO: 3994 - protein, 204 aa, Zea mays subsp. mays
  peptide (1)..(204): Ceres Seq. ID no. 12566348
  misc_feature (11)..(204): Pfam Name: Papain family cysteine protease Pfam Description: Papain family cysteine protease
  misc_feature (11)..(204): Homolog of NCBI NO: 10336513 NR Description: cysteine proteinase [Astragalus sinicus]
  misc_feature (11)..(203): Homolog of NCBI NO: 24285904 NR Description: cysteine proteinase precursor [Ipomoea batatas]
  misc_feature (11)..(203): Homolog of NCBI NO: 535454 NR Description: cysteine proteinase
  misc_feature (11)..(203): Homolog of NCBI NO: 38346003 NR Description: OSJNBa0035O13.5 [Oryza sativa (japonica
  misc_feature (11)..(203): Homolog of NCBI NO: 37780051 NR Description: cysteine protease 12 [Trifolium repens]
  misc_feature (11)..(203): Homolog of NCBI NO: 37780045 NR Description: cysteine protease 5 [Trifolium repens]
  misc_feature (11)..(203): Homolog of NCBI NO: 38345008 NR Description: OSJNBa0052O21.11 [Oryza sativa (japonica
  misc_feature (11)..(203): Homolog of NCBI NO: 38346007 NR Description: OSJNBa0035O13.9 [Oryza sativa (japonica
  misc_feature (11)..(204): Homolog of NCBI NO: 21070926 NR Description: putative cysteine proteinase
  misc_feature (11)..(204): Homolog of NCBI NO: 7435799 NR Description: cysteine proteinase (EC 3.4.22.-) - barley
MHNTSTHTHAGCCWAFSAVAAVEGLNKIRTGRLVSLSEQELVDCDVSGVDQGCDGGLMDNAFQFVARRGGLASESGYPYQGRDGPCRSSAAAAAASIRGHEDVPRNNEAALAAAVAHQPVSVAINGEDMAFRFYDSGVLGGACGTDLNHAITAVGYGTAADGTRYWLMKNSWGASWGEGGYVRIRRGVRGEGVCGLAKLPSYPV

SEQ ID NO: 3995 - protein, 147 aa, Zea mays subsp. mays
  peptide (1)..(147): Ceres Seq. ID no. 12566349
  misc_feature (1)..(147): Pfam Name: Papain family cysteine protease Pfam Description: Papain family cysteine protease
  misc_feature (1)..(147): Homolog of NCBI NO: 10336513 NR Description: cysteine proteinase [Astragalus sinicus]
  misc_feature (1)..(146): Homolog of NCBI NO: 24285904 NR Description: cysteine proteinase precursor [Ipomoea batatas]
  misc_feature (1)..(146): Homolog of NCBI NO: 535454 NR Description: cysteine proteinase
  misc_feature (1)..(146): Homolog of NCBI NO: 38346003 NR Description: OSJNBa0035O13.5 [Oryza sativa (japonica
  misc_feature (1)..(146): Homolog of NCBI NO: 37780051 NR Description: cysteine protease 12 [Trifolium repens]
  misc_feature (1)..(146): Homolog of NCBI NO: 37780045 NR Description: cysteine protease 5 [Trifolium repens]
  misc_feature (1)..(146): Homolog of NCBI NO: 38345008 NR Description: OSJNBa0052O21.11 [Oryza sativa (japonica
  misc_feature (1)..(146): Homolog of NCBI NO: 38346007 NR Description: OSJNBa0035O13.9 [Oryza sativa (japonica
  misc_feature (1)..(147): Homolog of NCBI NO: 21070926 NR Description: putative cysteine proteinase
  misc_feature (1)..(147): Homolog of NCBI NO: 7435799 NR Description: cysteine proteinase (EC 3.4.22.-) - barley
MDNAFQFVARRGGLASESGYPYQGRDGPCRSSAAAAAASIRGHEDVPRNNEAALAAAVAHQPVSVAINGEDMAFRFYDSGVLGGACGTDLNHAITAVGYGTAADGTRYWLMKNSWGASWGEGGYVRIRRGVRGEGVCGLAKLPSYPV

SEQ ID NO: 3996 - DNA, 1262 bp, Zea mays subsp. mays
  misc_feature (1)..(1262): Ceres Seq. ID no. 12353722
  misc_feature: MA Experiment ID: 108522 Result: Up-regulated in Transcription
  misc_feature: MA Experiment 108522 PARAMETER Experiment Name: Zm_42deg_Heat_P Parameter: Age (day) Value: 8
  misc_feature: MA Experiment 108522 PARAMETER Experiment Name: Zm_42deg_Heat_P Parameter: Organism Value: Zea mays
  misc_feature: MA Experiment 108522 PARAMETER Experiment Name: Zm_42deg_Heat_P Parameter: Plant Line Value: 35A19
  misc_feature: MA Experiment 108522 PARAMETER Experiment Name: Zm_42deg_Heat_P Parameter: Temperature (deg C) Value: 42 vs. 22
  misc_feature: MA Experiment 108522 PARAMETER Experiment Name: Zm_42deg_Heat_P Parameter: Timepoint (hr) Value: 1
  misc_feature: MA Experiment 108522 PARAMETER Experiment Name: Zm_42deg_Heat_P Parameter: Tissue Value: Aerial
  misc_feature: MA Experiment ID: 108526 Result: Down-regulated in Transcription
  misc_feature: MA Experiment 108526 PARAMETER Experiment Name: Zm_5mM_NO_P Parameter: Age (day) Value: 8
  misc_feature: MA Experiment 108526 PARAMETER Experiment Name: Zm_5mM_NO_P Parameter: Organism Value: Zea mays
  misc_feature: MA Experiment 108526 PARAMETER Experiment Name: Zm_5mM_NO_P Parameter: Plant Line Value: 35A19
  misc_feature: MA Experiment 108526 PARAMETER Experiment Name: Zm_5mM_NO_P Parameter: Timepoint (hr) Value: 1
  misc_feature: MA Experiment 108526 PARAMETER Experiment Name: Zm_5mM_NO_P Parameter: Tissue Value: Aerial
  misc_feature: MA Experiment 108526 PARAMETER Experiment Name: Zm_5mM_NO_P Parameter: Treatment Value: 5mM NO vs. No Treatment
  misc_feature: MA Experiment ID: 108528 Result: Down-regulated in Transcription
  misc_feature: MA Experiment 108528 PARAMETER Experiment Name: Zm_Imbibed_Seeds_P Parameter: Age (day) Value: 5 vs. 2
  misc_feature: MA Experiment 108528 PARAMETER Experiment Name: Zm_Imbibed_Seeds_P Parameter: Organism Value: Zea mays
  misc_feature: MA Experiment 108528 PARAMETER Experiment Name: Zm_Imbibed_Seeds_P Parameter: Plant Line Value: 35A19
  misc_feature: MA Experiment 108528 PARAMETER Experiment Name: Zm_Imbibed_Seeds_P Parameter: Tissue Value: Aerial vs. Embryo
  misc_feature: MA Experiment ID: 108529 Result: Down-regulated in Transcription
  misc_feature: MA Experiment 108529 PARAMETER Experiment Name: Zm_Imbibed_Seeds_P Parameter: Age (day) Value: 5 vs. 2
  misc_feature: MA Experiment 108529 PARAMETER Experiment Name: Zm_Imbibed_Seeds_P Parameter: Organism Value: Zea mays
  misc_feature: MA Experiment 108529 PARAMETER Experiment Name: Zm_Imbibed_Seeds_P Parameter: Plant Line Value: 35A19
  misc_feature: MA Experiment 108529 PARAMETER Experiment Name: Zm_Imbibed_Seeds_P Parameter: Tissue Value: Roots vs. Embryo
  misc_feature: MA Experiment ID: 108530 Result: Down-regulated in Transcription
  misc_feature: MA Experiment 108530 PARAMETER Experiment Name: Zm_Imbibed_Seeds_P Parameter: Age (day) Value: 6 vs. 2
  misc_feature: MA Experiment 108530 PARAMETER Experiment Name: Zm_Imbibed_Seeds_P Parameter: Organism Value: Zea mays
  misc_feature: MA Experiment 108530 PARAMETER Experiment Name: Zm_Imbibed_Seeds_P Parameter: Plant Line Value: 35A19
  misc_feature: MA Experiment 108530 PARAMETER Experiment Name: Zm_Imbibed_Seeds_P Parameter: Tissue Value: Aerial vs. Embryo
  misc_feature: MA Experiment ID: 108534 Result: Up-regulated in Transcription
  misc_feature: MA Experiment 108534 PARAMETER Experiment Name: Zm_4deg_Cold_P Parameter: Age (hr) Value: 8
  misc_feature: MA Experiment 108534 PARAMETER Experiment Name: Zm_4deg_Cold_P Parameter: Organism Value: Zea mays
  misc_feature: MA Experiment 108534 PARAMETER Experiment Name: Zm_4deg_Cold_P Parameter: Plant Line Value: 35A19
  misc_feature: MA Experiment 108534 PARAMETER Experiment Name: Zm_4deg_Cold_P Parameter: Temperature (deg C) Value: 4 vs. 22
  misc_feature: MA Experiment 108534 PARAMETER Experiment Name: Zm_4deg_Cold_P Parameter: Timepoint (hr) Value: 6
  misc_feature: MA Experiment 108534 PARAMETER Experiment Name: Zm_4deg_Cold_P Parameter: Tissue Value: Aerial
  misc_feature: MA Experiment ID: 108540 Result: Up-regulated in Transcription
  misc_feature: MA Experiment 108540 PARAMETER Experiment Name: Zm_20percent_PEG_P Parameter: Age (day) Value: 8
  misc_feature: MA Experiment 108540 PARAMETER Experiment Name: Zm_20percent_PEG_P Parameter: Organism Value: Zea mays
  misc_feature: MA Experiment 108540 PARAMETER Experiment Name: Zm_20percent_PEG_P Parameter: Plant Line Value: 35A19
  misc_feature: MA Experiment 108540 PARAMETER Experiment Name: Zm_20percent_PEG_P Parameter: Timepoint (hr) Value: 6
  misc_feature: MA Experiment 108540 PARAMETER Experiment Name: Zm_20percent_PEG_P Parameter: Tissue Value: Aerial
  misc_feature: MA Experiment 108540 PARAMETER Experiment Name: Zm_20percent_PEG_P Parameter: Treatment Value: 20percent PEG vs. No Treatment
  misc_feature: MA Experiment ID: 108545 Result: Down-regulated in Transcription
  misc_feature: MA Experiment 108545 PARAMETER Experiment Name: Zm_Imbibed_Seeds_P Parameter: Age (day) Value: 3 vs. 2
  misc_feature: MA Experiment 108545 PARAMETER Experiment Name: Zm_Imbibed_Seeds_P Parameter: Organism Value: Zea mays
  misc_feature: MA Experiment 108545 PARAMETER Experiment Name: Zm_Imbibed_Seeds_P Parameter: Plant Line Value: 35A19
  misc_feature: MA Experiment 108545 PARAMETER Experiment Name: Zm_Imbibed_Seeds_P Parameter: Tissue Value: Aerial vs. Embryo
  misc_feature: MA Experiment ID: 108546 Result: Down-regulated in Transcription
  misc_feature: MA Experiment 108546 PARAMETER Experiment Name: Zm_Imbibed_Seeds_P Parameter: Age (day) Value: 3 vs. 2
  misc_feature: MA Experiment 108546 PARAMETER Experiment Name: Zm_Imbibed_Seeds_P Parameter: Organism Value: Zea mays
  misc_feature: MA Experiment 108546 PARAMETER Experiment Name: Zm_Imbibed_Seeds_P Parameter: Plant Line Value: 35A19
  misc_feature: MA Experiment 108546 PARAMETER Experiment Name: Zm_Imbibed_Seeds_P Parameter: Tissue Value: Roots vs. Embryo
  misc_feature: MA Experiment ID: 108547 Result: Down-regulated in Transcription
  misc_feature: MA Experiment 108547 PARAMETER Experiment Name: Zm_Imbibed_Seeds_P Parameter: Age (day) Value: 4 vs. 2
  misc_feature: MA Experiment 108547 PARAMETER Experiment Name: Zm_Imbibed_Seeds_P Parameter: Organism Value: Zea mays
  misc_feature: MA Experiment 108547 PARAMETER Experiment Name: Zm_Imbibed_Seeds_P Parameter: Plant Line Value: 35A19
  misc_feature: MA Experiment 108547 PARAMETER Experiment Name: Zm_Imbibed_Seeds_P Parameter: Tissue Value: Aerial vs. Embryo
  misc_feature: MA Experiment ID: 108688 Result: Down-regulated in Transcription
  misc_feature: MA Experiment 108688 PARAMETER Experiment Name: Zm_Embryos-Flowers__P Parameter: Tissue Value: Immature Flowers vs. Aerial+
  misc_feature: MA Experiment ID: 20000477 Result: Down-regulated in Transcription
  misc_feature: MA Experiment 20000477 PARAMETER Experiment Name: Zm_5mM_SA_P Parameter: Age (day) Value: 10
  misc_feature: MA Experiment 20000477 PARAMETER Experiment Name: Zm_5mM_SA_P Parameter: Organism Value: Zea mays
  misc_feature: MA Experiment 20000477 PARAMETER Experiment Name: Zm_5mM_SA_P Parameter: Plant Line Value: 35A19
  misc_feature: MA Experiment 20000477 PARAMETER Experiment Name: Zm_5mM_SA_P Parameter: Timepoint (hr) Value: 48
  misc_feature: MA Experiment 20000477 PARAMETER Experiment Name: Zm_5mM_SA_P Parameter: Tissue Value: Aerial
  misc_feature: MA Experiment 20000477 PARAMETER Experiment Name: Zm_5mM_SA_P Parameter: Treatment Value: 5mM SA vs. No Treatment
  misc_feature: MA Experiment ID: 20000478 Result: Down-regulated in Transcription
  misc_feature: MA Experiment 20000478 PARAMETER Experiment Name: Zm_5mM_SA_P Parameter: Age (day) Value: 11
  misc_feature: MA Experiment 20000478 PARAMETER Experiment Name: Zm_5mM_SA_P Parameter: Organism Value: Zea mays
  misc_feature: MA Experiment 20000478 PARAMETER Experiment Name: Zm_5mM_SA_P Parameter: Plant Line Value: 35A19
  misc_feature: MA Experiment 20000478 PARAMETER Experiment Name: Zm_5mM_SA_P Parameter: Timepoint (hr) Value: 72
  misc_feature: MA Experiment 20000478 PARAMETER Experiment Name: Zm_5mM_SA_P Parameter: Tissue Value: Aerial
  misc_feature: MA Experiment 20000478 PARAMETER Experiment Name: Zm_5mM_SA_P Parameter: Treatment Value: 5mM SA vs. No Treatment
  misc_feature: MA Experiment ID: 20000533 Result: Up-regulated in Transcription
  misc_feature: MA Experiment 20000533 PARAMETER Experiment Name: Zm_0.001percent_MeJA_P Parameter: Age (day) Value: 11
  misc_feature: MA Experiment 20000533 PARAMETER Experiment Name: Zm_0.001percent_MeJA_P Parameter: Organism Value: Zea mays
  misc_feature: MA Experiment 20000533 PARAMETER Experiment Name: Zm_0.001percent_MeJA_P Parameter: Plant Line Value: 35A19
  misc_feature: MA Experiment 20000533 PARAMETER Experiment Name: Zm_0.001percent_MeJA_P Parameter: Timepoint (hr) Value: 72
  misc_feature: MA Experiment 20000533 PARAMETER Experiment Name: Zm_0.001percent_MeJA_P Parameter: Tissue Value: Aerial
  misc_feature: MA Experiment 20000533 PARAMETER Experiment Name: Zm_0.001percent_MeJA_P Parameter: Treatment Value: 0.001percent MeJA vs. No Treatment
  misc_feature: MA Experiment ID: 20000535 Result: Up-regulated in Transcription
  misc_feature: MA Experiment 20000535 PARAMETER Experiment Name: Zm_Hybrid_Seed_Dev_P Parameter: DAP Value: 30 vs. 12
  misc_feature: MA Experiment 20000535 PARAMETER Experiment Name: Zm_Hybrid_Seed_Dev_P Parameter: Organism Value: Zea mays
  misc_feature: MA Experiment 20000535 PARAMETER Experiment Name: Zm_Hybrid_Seed_Dev_P Parameter: Plant Line Value: 35A19
  misc_feature: MA Experiment 20000535 PARAMETER Experiment Name: Zm_Hybrid_Seed_Dev_P Parameter: Tissue Value: Embryo vs. Unfert Floret
  misc_feature: MA Experiment ID: 20001608 Result: Up-regulated in Transcription
  misc_feature: MA Experiment 20001608 PARAMETER Experiment Name: Zm_50ppm_KNO3_L-to-H_P Parameter: Age (day) Value: 21
  misc_feature: MA Experiment 20001608 PARAMETER Experiment Name: Zm_50ppm_KNO3_L-to-H_P Parameter: Organism Value: Zea mays
  misc_feature: MA Experiment 20001608 PARAMETER Experiment Name: Zm_50ppm_KNO3_L-to-H_P Parameter: Plant Line Value: 35A19
  misc_feature: MA Experiment 20001608 PARAMETER Experiment Name: Zm_50ppm_KNO3_L-to-H_P Parameter: Timepoint (hr) Value: 48
  misc_feature: MA Experiment 20001608 PARAMETER Experiment Name: Zm_50ppm_KNO3_L-to-H_P Parameter: Tissue Value: Shoots
  misc_feature: MA Experiment 20001608 PARAMETER Experiment Name: Zm_50ppm_KNO3_L-to-H_P Parameter: Treatment Value: 50ppm KNO3 vs. 50ppm KCl
agcaacgcaagcaagcaattgtcaaccgactctatcttagctctctttgcaagccagtaggtcaccactcaaaagcttgtgaagcaggtgagatgggcaaggaggtggatgtgtccactctagaggccggcggcgtccgtgaccgtgactacgcggaccctccgccggcaccgctgatcgacatcgacgagctcggcaagtggtccctgtaccgcgccgtgatcgccgagttcgtggccacgctgctgttcctgtacatcacggttgccacggtgatcgggtacaagcaccagacggacgcgtcggcgtcggggcccgacgcggcgtgcagcggcgtgggcatcctgggcatcgcgtgggcgttcggcggcatgatcttcatcctcgtctactgcaccgccggcatctcgggcggccacatcaacccggccgtcacgttcggcctcttcctggcgcgcaaggtctccctggtgcgcgctctgctgtacatggccgcgcagagcctcggtgctatctgcggcgtcgcgctcgtcaagggcttccagagcgggttctacgcgcgctacggcggcggcgccaatgaggtcagcgccgggtactccaccggcacggggctcgccgccgagatcatcggtaccttcgtgctcgtctacaccgtcttctccgccaccgaccccaagcgcaacgctcgcgactcccacgttccggtgctggcgccgcttccgatcgggttcgctgtgttcatggtgcacctggcgacgatcccgatcactggcaccggtatcaacccggcgaggagcctcggcgccgccgtcgtgtacaacaacagcaaagcctggagcgaccagtggatcttctgggtgggcccgttcatcggagcggcgatcgcagcgctataccaccagatcgtcctccgcgccagcgccagggggtacggctccttccggagcaacgcctaggaccatctcgtcggcgggctattcagctcttcctcctccgcagtttaaggtgaacggagaaggagagcgcaagggggtacggagcaacgtctaggctcacctcgcctttgcccccgcccatccacagcagcagtagctttcattcaggtcaagtgttgcagctgccggcaacggtagctagcgcaggcgtttgtgagtttgtgtgcggtgtggaaagcaagtgtgacttggtcagcgtctgtgtgtcctgttgggttgcagtcaatctaacttaataaagatggacgaatgcaagtgattatt

SEQ ID NO: 3997 - protein, 318 aa, Zea mays subsp. mays
  peptide (1)..(318): Ceres Seq. ID no. 12353723
  misc_feature (63)..(300): Pfam Name: Major intrinsic protein Pfam Description: Major intrinsic protein
  misc_feature (31)..(318): Homolog of NCBI NO: 13447801 NR Description: plasma membrane integral protein ZmPIP2-1 [Zea
  misc_feature (31)..(317): Homolog of NCBI NO: 7441245 NR Description: plasma membrane intrinsic protein BPW1 - barley
  misc_feature (31)..(318): Homolog of NCBI NO: 34901270 NR Description: putative plasma membrane intrinsic protein
  misc_feature (31)..(316): Homolog of NCBI NO: 4741931 NR Description: plasma membrane intrinsic protein [Zea mays]
  misc_feature (33)..(318): Homolog of NCBI NO: 13447805 NR Description: plasma membrane integral protein ZmPIP2-3 [Zea
  misc_feature (31)..(318): Homolog of NCBI NO: 13447807 NR Description: plasma membrane integral protein ZmPIP2-4 [Zea
  misc_feature (31)..(318): Homolog of NCBI NO: 34901250 NR Description: putative plasma membrane intrinsic protein
  misc_feature (31)..(318): Homolog of NCBI NO: 34901254 NR Description: putative plasma membrane intrinsic protein
  misc_feature (31)..(318): Homolog of NCBI NO: 34901248 NR Description: putative plasma membrane intrinsic protein
  misc_feature (31)..(318): Homolog of NCBI NO: 13447809 NR Description: plasma membrane integral protein ZmPIP2-6 [Zea
QRKQAIVNRLYLSSLCKPVGHHSKACEAGEMGKEVDVSTLEAGGVRDRDYADPPPAPLIDIDELGKWSLYRAVIAEFVATLLFLYITVATVIGYKHQTDASASGPDAACSGVGILGIAWAFGGMIFILVYCTAGISGGHINPAVTFGLFLARKVSLVRALLYMAAQSLGAICGVALVKGFQSGFYARYGGGANEVSAGYSTGTGLAAEIIGTFVLVYTVFSATDPKRNARDSHVPVLAPLPIGFAVFMVHLATIPITGTGINPARSLGAAVVYNNSKAWSDQWIFWVGPFIGAAIAALYHQIVLRASARGYGSFRSNA

SEQ ID NO: 3998 - protein, 288 aa, Zea mays subsp. mays
  peptide (1)..(288): Ceres Seq. ID no. 12353724
  misc_feature (33)..(270): Pfam Name: Major intrinsic protein Pfam Description: Major intrinsic protein
  misc_feature (1)..(288): Homolog of NCBI NO: 13447801 NR Description: plasma membrane integral protein ZmPIP2-1 [Zea
  misc_feature (1)..(287): Homolog of NCBI NO: 7441245 NR Description: plasma membrane intrinsic protein BPW1 - barley
  misc_feature (1)..(288): Homolog of NCBI NO: 34901270 NR Description: putative plasma membrane intrinsic protein
  misc_feature (1)..(286): Homolog of NCBI NO: 4741931 NR Description: plasma membrane intrinsic protein [Zea mays]
  misc_feature (3)..(288): Homolog of NCBI NO: 13447805 NR Description: plasma membrane integral protein ZmPIP2-3 [Zea
  misc_feature (1)..(288): Homolog of NCBI NO: 13447807 NR Description: plasma membrane integral protein ZmPIP2-4 [Zea
  misc_feature (1)..(288): Homolog of NCBI NO: 34901250 NR Description: putative plasma membrane intrinsic protein
  misc_feature (1)..(288): Homolog of NCBI NO: 34901254 NR Description: putative plasma membrane intrinsic protein
  misc_feature (1)..(288): Homolog of NCBI NO: 34901248 NR Description: putative plasma membrane intrinsic protein
  misc_feature (1)..(288): Homolog of NCBI NO: 13447809 NR Description: plasma membrane integral protein ZmPIP2-6 [Zea
MGKEVDVSTLEAGGVRDRDYADPPPAPLIDIDELGKWSLYRAVIAEFVATLLFLYITVATVIGYKHQTDASASGPDAACSGVGILGIAWAFGGMIFILVYCTAGISGGHINPAVTFGLFLARKVSLVRALLYMAAQSLGAICGVALVKGFQSGFYARYGGGANEVSAGYSTGTGLAAEIIGTFVLVYTVFSATDPKRNARDSHVPVLAPLPIGFAVFMVHLATIPITGTGINPARSLGAAVVYNNSKAWSDQWIFWVGPFIGAAIAALYHQIVLRASARGYGSFRSNA

SEQ ID NO: 3999 - protein, 195 aa, Zea mays subsp. mays
  peptide (1)..(195): Ceres Seq. ID no. 12353725
  misc_feature (1)..(177): Pfam Name: Major intrinsic protein Pfam Description: Major intrinsic protein
  misc_feature (1)..(195): Homolog of NCBI NO: 34901270 NR Description: putative plasma membrane intrinsic protein
  misc_feature (1)..(193): Homolog of NCBI NO: 4741931 NR Description: plasma membrane intrinsic protein [Zea mays]
  misc_feature (1)..(195): Homolog of NCBI NO: 13447805 NR Description: plasma membrane integral protein ZmPIP2-3 [Zea
  misc_feature (1)..(195): Homolog of NCBI NO: 13447807 NR Description: plasma membrane integral protein ZmPIP2-4 [Zea
  misc_feature (1)..(195): Homolog of NCBI NO: 13447801 NR Description: plasma membrane integral protein ZmPIP2-1 [Zea
  misc_feature (1)..(194): Homolog of NCBI NO: 7441245 NR Description: plasma membrane intrinsic protein BPW1 - barley
  misc_feature (1)..(195): Homolog of NCBI NO: 34901250 NR Description: putative plasma membrane intrinsic protein
  misc_feature (1)..(195): Homolog of NCBI NO: 34901254 NR Description: putative plasma membrane intrinsic protein
  misc_feature (1)..(195): Homolog of NCBI NO: 34901248 NR Description: putative plasma membrane intrinsic protein
  misc_feature (1)..(195): Homolog of NCBI NO: 13447809 NR Description: plasma membrane integral protein ZmPIP2-6 [Zea
MIFILVYCTAGISGGHINPAVTFGLFLARKVSLVRALLYMAAQSLGAICGVALVKGFQSGFYARYGGGANEVSAGYSTGTGLAAEIIGTFVLVYTVFSATDPKRNARDSHVPVLAPLPIGFAVFMVHLATIPITGTGINPARSLGAAVVYNNSKAWSDQWIFWVGPFIGAAIAALYHQIVLRASARGYGSFRSNA

SEQ ID NO: 4000 - DNA, 972 bp, Zea mays subsp. mays
  misc_feature (1)..(972): Ceres Seq. ID no. 12365343
  misc_feature: MA Experiment ID: 108530 Result: Down-regulated in Transcription
  misc_feature: MA Experiment 108530 PARAMETER Experiment Name: Zm_Imbibed_Seeds_P Parameter: Age (day) Value: 6 vs. 2
  misc_feature: MA Experiment 108530 PARAMETER Experiment Name: Zm_Imbibed_Seeds_P Parameter: Organism Value: Zea mays
  misc_feature: MA Experiment 108530 PARAMETER Experiment Name: Zm_Imbibed_Seeds_P Parameter: Plant Line Value: 35A19
  misc_feature: MA Experiment 108530 PARAMETER Experiment Name: Zm_Imbibed_Seeds_P Parameter: Tissue Value: Aerial vs. Embryo
  misc_feature: MA Experiment ID: 108535 Result: Down-regulated in Transcription
  misc_feature: MA Experiment 108535 PARAMETER Experiment Name: Zm_Meristem_P Parameter: Age (day) Value: 8
  misc_feature: MA Experiment 108535 PARAMETER Experiment Name: Zm_Meristem_P Parameter: Organism Value: Zea mays
  misc_feature: MA Experiment 108535 PARAMETER Experiment Name: Zm_Meristem_P Parameter: Plant Line Value: 35A19
  misc_feature: MA Experiment 108535 PARAMETER Experiment Name: Zm_Meristem_P Parameter: Tissue Value: Root Meristem vs. Above Root Meristem
  misc_feature: MA Experiment ID: 108543 Result: Up-regulated in Transcription
  misc_feature: MA Experiment ID: 108546 Result: Up-regulated in Transcription
  misc_feature: MA Experiment 108546 PARAMETER Experiment Name: Zm_Imbibed_Seeds_P Parameter: Age (day) Value: 3 vs. 2
  misc_feature: MA Experiment 108546 PARAMETER Experiment Name: Zm_Imbibed_Seeds_P Parameter: Organism Value: Zea mays
  misc_feature: MA Experiment 108546 PARAMETER Experiment Name: Zm_Imbibed_Seeds_P Parameter: Plant Line Value: 35A19
  misc_feature: MA Experiment 108546 PARAMETER Experiment Name: Zm_Imbibed_Seeds_P Parameter: Tissue Value: Roots vs. Embryo
  misc_feature: MA Experiment ID: 108547 Result: Down-regulated in Transcription
  misc_feature: MA Experiment 108547 PARAMETER Experiment Name: Zm_Imbibed_Seeds_P Parameter: Age (day) Value: 4 vs. 2
  misc_feature: MA Experiment 108547 PARAMETER Experiment Name: Zm_Imbibed_Seeds_P Parameter: Organism Value: Zea mays
  misc_feature: MA Experiment 108547 PARAMETER Experiment Name: Zm_Imbibed_Seeds_P Parameter: Plant Line Value: 35A19
  misc_feature: MA Experiment 108547 PARAMETER Experiment Name: Zm_Imbibed_Seeds_P Parameter: Tissue Value: Aerial vs. Embryo
aatacatgcgttataacagcagagcagaggtcaacaagacgagacaagagaatgcctgtgagcaggatcgccgtgggtgctccgggcgagctgtcccaccccgacaccgccaaggccgccgtcgccgagttcatctccacgctcatcttcgtcttcgccggctcaggatcggggatggccttcagtaagctcacggacggtggcgccgccactcctgccggcctcatcgccgcgtctctggcgcacgccctcgccctcttcgtggccgtctccgtgggtgccaacatctccggcggccacgtgaaccctgccgtgaccttcggcgcctttgtgggcggcaacatcagcctcctcaaggccctggtctactgggtggcccagctcctgggctccgtcgtcgcctgcctcctcctcaagatcgccacgggcggcgcggcccttggcgccttctcgctgtcggcgggcgtcggcgccatgaacgccgtggtgctggagatggtcatgaccttcggcctcgtgtacacggtgtacgccacggccgtggaccccaagaagggcgacctcggcgtcatcgcgcccatcgccatcggcttcatcgtcggcgccaacatcctggcggggggcgccttcgacggcgcctccatgaaccccgccgtctccttcggcccggccgtcgtcaccggcgtctgggagaaccactgggtgtactgggtcggcccactcgcgggcgcggccatcgcggcgctcgtctacgacatcatcttcatcgggcagcgcccacaccagcagctgccaaccacggcagcagactactgatgaccatcatcatcatgcactgaataattaagaccagaccactcaatatatatacatatgaagaataacatgccaaatctcatctcctagagctagcaacttgattctccatatatttcttaaatacaaactaaactcgattgagtatagcttggt

SEQ ID NO: 4001 - protein, 271 aa, Zea mays subsp. mays
  peptide (1)..(271): Ceres Seq. ID no. 12365344
  misc_feature (30)..(251): Pfam Name: Major intrinsic protein Pfam Description: Major intrinsic protein
  misc_feature (18)..(271): Homolog of NCBI NO: 1514977 NR Description: VM23 [Raphanus sativus]
  misc_feature (18)..(271): Homolog of NCBI NO: 15228041 NR Description: putative aquaporin (tonoplast intrinsic protein
  misc_feature (18)..(271): Homolog of NCBI NO: 21593151 NR Description: putative aquaporin (tonoplast intrinsic protein
  misc_feature (18)..(271): Homolog of NCBI NO: 475048 NR Description: tonoplast intrinsic protein gamma (gamma-TIP)
  misc_feature (18)..(271): Homolog of NCBI NO: 21284370 NR Description: tonoplast intrinsic protein bobTIP26-1
  misc_feature (18)..(266): Homolog of NCBI NO: 15234189 NR Description: putative water channel protein; protein id:
  misc_feature (18)..(267): Homolog of NCBI NO: 541951 NR Description: SPCP2 protein - soybean
  misc_feature (18)..(271): Homolog of NCBI NO: 8699604 NR Description: putative aquaporin TIP3 [Vitis berlandieri x
  misc_feature (18)..(271): Homolog of NCBI NO: 34906078 NR Description: putative tonoplast membrane integral protein
  misc_feature (18)..(271): Homolog of NCBI NO: 13447819 NR Description: tonoplast membrane integral protein ZmTIP1-2 [Zea
NTCVITAEQRSTRRDKRMPVSRIAVGAPGELSHPDTAKAAVAEFISTLIFVFAGSGSGMAFSKLTDGGAATPAGLIAASLAHALALFVAVSVGANISGGHVNPAVTFGAFVGGNISLLKALVYWVAQLLGSVVACLLLKIATGGAALGAFSLSAGVGAMNAVVLEMVMTFGLVYTVYATAVDPKKGDLGVIAPIAIGFIVGANILAGGAFDGASMNPAVSFGPAVVTGVWENHWVYWVGPLAGAAIAALVYDIIFIGQRPHQQLPTTAADY

SEQ ID NO: 4002 - protein, 254 aa, Zea mays subsp. mays; identical to SEQ ID NO: 3680
  peptide (1)..(254): Ceres Seq. ID no. 12365345
  misc_feature (13)..(234): Pfam Name: Major intrinsic protein Pfam Description: Major intrinsic protein
  misc_feature (1)..(254): Homolog of NCBI NO: 1514977 NR Description: VM23 [Raphanus sativus]
  misc_feature (1)..(254): Homolog of NCBI NO: 15228041 NR Description: putative aquaporin (tonoplast intrinsic protein
  misc_feature (1)..(254): Homolog of NCBI NO: 21593151 NR Description: putative aquaporin (tonoplast intrinsic protein
  misc_feature (1)..(254): Homolog of NCBI NO: 475048 NR Description: tonoplast intrinsic protein gamma (gamma-TIP)
  misc_feature (1)..(254): Homolog of NCBI NO: 21284370 NR Description: tonoplast intrinsic protein bobTIP26-1
  misc_feature (1)..(249): Homolog of NCBI NO: 15234189 NR Description: putative water channel protein; protein id:
  misc_feature (1)..(250): Homolog of NCBI NO: 541951 NR Description: SPCP2 protein - soybean
  misc_feature (1)..(254): Homolog of NCBI NO: 8699604 NR Description: putative aquaporin TIP3 [Vitis berlandieri x
  misc_feature (1)..(254): Homolog of NCBI NO: 34906078 NR Description: putative tonoplast membrane integral protein
  misc_feature (1)..(254): Homolog of NCBI NO: 13447819 NR Description: tonoplast membrane integral protein ZmTIP1-2 [Zea

SEQ ID NO: 4003 - protein, 213 aa, Zea mays subsp. mays; identical to SEQ ID NO: 3681
  peptide (1)..(213): Ceres Seq. ID no. 12365346
  misc_feature (1)..(193): Pfam Name: Major intrinsic protein Pfam Description: Major intrinsic protein
  misc_feature (1)..(213): Homolog of NCBI NO: 1514977 NR Description: VM23 [Raphanus sativus]
  misc_feature (1)..(213): Homolog of NCBI NO: 15228041 NR Description: putative aquaporin (tonoplast intrinsic protein
  misc_feature (1)..(213): Homolog of NCBI NO: 21593151 NR Description: putative aquaporin (tonoplast intrinsic protein
  misc_feature (1)..(213): Homolog of NCBI NO: 475048 NR Description: tonoplast intrinsic protein gamma (gamma-TIP)
  misc_feature (1)..(213): Homolog of NCBI NO: 21284370 NR Description: tonoplast intrinsic protein bobTIP26-1
  misc_feature (1)..(208): Homolog of NCBI NO: 15234189 NR Description: putative water channel protein; protein id:
  misc_feature (1)..(209): Homolog of NCBI NO: 541951 NR Description: SPCP2 protein - soybean
  misc_feature (1)..(213): Homolog of NCBI NO: 8699604 NR Description: putative aquaporin TIP3 [Vitis berlandieri x
  misc_feature (1)..(213): Homolog of NCBI NO: 34906078 NR Description: putative tonoplast membrane integral protein
  misc_feature (1)..(213): Homolog of NCBI NO: 13447819 NR Description: tonoplast membrane integral protein ZmTIP1-2 [Zea

SEQ ID NO: 4004 - DNA, 1203 bp, Zea mays subsp. mays
  misc_feature (1)..(1203): Ceres Seq. ID no. 12566771
  misc_feature: MA Experiment ID: 20000535 Result: Down-regulated in Transcription
  misc_feature: MA Experiment 20000535 PARAMETER Experiment Name: Zm_Hybrid_Seed_Dev_P Parameter: DAP Value: 30 vs. 12
  misc_feature: MA Experiment 20000535 PARAMETER Experiment Name: Zm_Hybrid_Seed_Dev_P Parameter: Organism Value: Zea mays
  misc_feature: MA Experiment 20000535 PARAMETER Experiment Name: Zm_Hybrid_Seed_Dev_P Parameter: Plant Line Value: 35A19
  misc_feature: MA Experiment 20000535 PARAMETER Experiment Name: Zm_Hybrid_Seed_Dev_P Parameter: Tissue Value: Embryo vs. Unfert Floret
aggattcacaagtgctcgtagcaaatctacaaaatccccaaccgcctctcaacaaagtctccccacgggaggtacacagctacgcgcaaacccgcgtctcgcgcgaagaatccgcatttccccttccccgcaccgcaccgcacccaacccccgtcggagagagagatggcatcggtggcggagatgcagcccctcgcgccggcggggtaccgccgcgcgccggagatgaaggagaaggtggaggcgtcggtggtggacctggaggccgggaccggggagacgctgtacccggggatctcgcgcggggagagcgccctccgatggggcttcgtccgcaaggtctacggcatcctccgctgcgcagctgctcctcaccaccgccgtctccgccctcaccgttctccaccccaccctcaacgccacgctctccgactccccgggcctcgcgctcgtgctcgccgtcctgcccttcatcctgatgatcccattgtatcattatcagcacaagcacccacacaattccgttttcctgggtctgttcacgttgtgcttgagcttcagcatcggcgtggcttgtgctaacacccaagggaaaatcgttctggaggctttagtgctgacggctggcgtggtggtttcgctgactgcgtatgctttctgggcgtcaaagaagggcaaggaattcgggtacctggggcctatcctgtcttccgcgcttactatcctcgtcctaactagctttcttcaggttttcttcccactgggacccgtgtcggtgggcttgttcggtgggctaggggctctggtcttctcaggcttcatcctgtacgacaccgagaacctgattaggcgccacacctacgacgagtacatctgggcgtcggttgggctgtacctcgacatcctgaacctgttcctctccatcctgaacatgctcaggagcatgcaatccgacaactagccggtcaaagcaccgcaccgcggcctcttgatatcgaacacggtatacccccgcggtcctgtgctctggttgttaagaagacgggatcgaagtgcgacatatgtattgtctattgtatgagcccactcgtgtcaacactgcaaacaattgtggtcatgtcaccttgtatgttcttcgtcactttgcaaacaactgtaagtacctgatatcgttttgcgctcgtgctattcgcgctaaaaatc

SEQ ID NO: 4005 - protein, 160 aa, Zea mays subsp. mays
  peptide (1)..(160): Ceres Seq. ID no. 12566772
  misc_feature (1)..(154): Pfam Name: Uncharacterised protein family UPF0005 Pfam Description: Uncharacterised protein family UPF0005
  misc_feature (1)..(160): Homolog of NCBI NO: 18414455 NR Description: Expressed protein; protein id: At4g15470.1, by cDNA: gi_15215826, supported by cDNA: gi_15810200, supported cDNA: gi_20453266 [Arabidopsis thaliana]
  misc_feature (1)..(118): Homolog of NCBI NO: 15810201 NR Description: AT4g15470/dl3775w [Arabidopsis thaliana]
  misc_feature (1)..(158): Homolog of NCBI NO: 14626300 NR Description: putative receptor-associated protein [Oryza
  misc_feature (1)..(155): Homolog of NCBI NO: 34393841 NR Description: putative z-protein [Oryza sativa (japonica
  misc_feature (1)..(158): Homolog of NCBI NO: 15229411 NR Description: putative protein; protein id: At3g63310.1
  misc_feature (1)..(157): Homolog of NCBI NO: 15235466 NR Description: putative glutamate-/aspartate-binding peptide; id: At4g02690.1 [Arabidopsis thaliana] >gi|7486855|pir||T01080
  misc_feature (1)..(157): Homolog of NCBI NO: 15218701 NR Description: putative glutamate/aspartate-binding peptide;
  misc_feature (38)..(109): Homolog of NCBI NO: 7485070 NR Description: hypothetical protein - Arabidopsis thaliana hypothetical protein [Arabidopsis thaliana]
  misc_feature (1)..(38): Homolog of NCBI NO: 7485070 NR Description: hypothetical protein - Arabidopsis thaliana hypothetical protein [Arabidopsis thaliana]
  misc_feature (1)..(158): Homolog of NCBI NO: 34393840 NR Description: putative z-protein [Oryza sativa (japonica
MIPLYHYQHKHPHNSVFLGLFTLCLSFSIGVACANTQGKIVLEALVLTAGVVVSLTAYAFWASKKGKEFGYLGPILSSALTILVLTSFLQVFFPLGPVSVGLFGGLGALVFSGFILYDTENLIRRHTYDEYIWASVGLYLDILNLFLSILNMLRSMQSDN

SEQ ID NO: 4006 - protein, 158 aa, Zea mays subsp. mays
  peptide (1)..(158): Ceres Seq. ID no. 12566773
DSQVLVANLQNPQPPLNKVSPREVHSYAQTRVSREESAFPLPRTAPHPTPVGERDGIGGGDAAPRAGGVPPRAGDEGEGGGVGGGPGGRDRGDAVPGDLARGERPPMGLRPQGLRHPPLRSCSSPPPSPPSPFSTPPSTPRSPTPRASRSCSPSCPSS

SEQ ID NO: 4007 - protein, 138 aa, Zea mays subsp. mays
  peptide (1)..(138): Ceres Seq. ID no. 12566774
  misc_feature (30)..(63): Homolog of NCBI NO: 18414455 NR Description: Expressed protein; protein id: At4g15470.1, by cDNA: gi_15215826, supported by cDNA: gi_15810200, supported cDNA: gi_20453266 [Arabidopsis thaliana]
  misc_feature (30)..(63): Homolog of NCBI NO: 15810201 NR Description: AT4g15470/dl3775w [Arabidopsis thaliana]
  misc_feature (30)..(63): Homolog of NCBI NO: 7485070 NR Description: hypothetical protein - Arabidopsis thaliana hypothetical protein [Arabidopsis thaliana]
MASVAEMQPLAPAGYRRAPEMKEKVEASVVDLEAGTGETLYPGISRGESALRWGFVRKVYGILRCAAAPHHRRLRPHRSPPHPQRHALRLPGPRARARRPALHPDDPIVSLSAQAPTQFRFPGSVHVVLELQHRRGLC

SEQ ID NO: 4008 - DNA, 832 bp, Zea mays subsp. mays
  misc_feature (1)..(832): Ceres Seq. ID no. 12366950
  misc_feature: MA Experiment ID: 108528 Result: Down-regulated in Transcription
  misc_feature: MA Experiment 108528 PARAMETER Experiment Name: Zm_Imbibed_Seeds_P Parameter: Age (day) Value: 5 vs. 2
  misc_feature: MA Experiment 108528 PARAMETER Experiment Name: Zm_Imbibed_Seeds_P Parameter: Organism Value: Zea mays
  misc_feature: MA Experiment 108528 PARAMETER Experiment Name: Zm_Imbibed_Seeds_P Parameter: Plant Line Value: 35A19
  misc_feature: MA Experiment 108528 PARAMETER Experiment Name: Zm_Imbibed_Seeds_P Parameter: Tissue Value: Aerial vs. Embryo
  misc_feature: MA Experiment ID: 108530 Result: Down-regulated in Transcription
  misc_feature: MA Experiment 108530 PARAMETER Experiment Name: Zm_Imbibed_Seeds_P Parameter: Age (day) Value: 6 vs. 2
  misc_feature: MA Experiment 108530 PARAMETER Experiment Name: Zm_Imbibed_Seeds_P Parameter: Organism Value: Zea mays
  misc_feature: MA Experiment 108530 PARAMETER Experiment Name: Zm_Imbibed_Seeds_P Parameter: Plant Line Value: 35A19
  misc_feature: MA Experiment 108530 PARAMETER Experiment Name: Zm_Imbibed_Seeds_P Parameter: Tissue Value: Aerial vs. Embryo
  misc_feature: MA Experiment ID: 108535 Result: Up-regulated in Transcription
  misc_feature: MA Experiment 108535 PARAMETER Experiment Name: Zm_Meristem_P Parameter: Age (day) Value: 8
  misc_feature: MA Experiment 108535 PARAMETER Experiment Name: Zm_Meristem_P Parameter: Organism Value: Zea mays
  misc_feature: MA Experiment 108535 PARAMETER Experiment Name: Zm_Meristem_P Parameter: Plant Line Value: 35A19
  misc_feature: MA Experiment 108535 PARAMETER Experiment Name: Zm_Meristem_P Parameter: Tissue Value: Root Meristem vs. Above Root Meristem
  misc_feature: MA Experiment ID: 20000488 Result: Up-regulated in Transcription
  misc_feature: MA Experiment 20000488 PARAMETER Experiment Name: Zm_50mM_NH4NO3_L_to_H_P Parameter: Organism Value: Zea mays
  misc_feature: MA Experiment 20000488 PARAMETER Experiment Name: Zm_50mM_NH4NO3_L_to_H_P Parameter: Timepoint (hr) Value: 8
  misc_feature: MA Experiment 20000488 PARAMETER Experiment Name: Zm_50mM_NH4NO3_L_to_H_P Parameter: Tissue Value: Leaves
  misc_feature: MA Experiment 20000488 PARAMETER Experiment Name: Zm_50mM_NH4NO3_L_to_H_P Parameter: Treatment Value: 50mM NH4NO3 vs. 100mM Mannitol
  misc_feature: MA Experiment ID: 20001606 Result: Up-regulated in Transcription
  misc_feature: MA Experiment 20001606 PARAMETER Experiment Name: Zm_50ppm_KNO3_L-to-H_P Parameter: Age (day) Value: 19
  misc_feature: MA Experiment 20001606 PARAMETER Experiment Name: Zm_50ppm_KNO3_L-to-H_P Parameter: Organism Value: Zea mays
  misc_feature: MA Experiment 20001606 PARAMETER Experiment Name: Zm_50ppm_KNO3_L-to-H_P Parameter: Plant Line Value: 35A19
  misc_feature: MA Experiment 20001606 PARAMETER Experiment Name: Zm_50ppm_KNO3_L-to-H_P Parameter: Timepoint (hr) Value: 8
  misc_feature: MA Experiment 20001606 PARAMETER Experiment Name: Zm_50ppm_KNO3_L-to-H_P Parameter: Tissue Value: Shoots
  misc_feature: MA Experiment 20001606 PARAMETER Experiment Name: Zm_50ppm_KNO3_L-to-H_P Parameter: Treatment Value: 50ppm KNO3 vs. 50ppm KCl
  misc_feature: MA Experiment ID: 20001612 Result: Up-regulated in Transcription
  misc_feature: MA Experiment 20001612 PARAMETER Experiment Name: Zm_50ppm_KNO3_L-to-H_P Parameter: Age (day) Value: 19
  misc_feature: MA Experiment 20001612 PARAMETER Experiment Name: Zm_50ppm_KNO3_L-to-H_P Parameter: Organism Value: Zea mays
  misc_feature: MA Experiment 20001612 PARAMETER Experiment Name: Zm_50ppm_KNO3_L-to-H_P Parameter: Plant Line Value: 35A19
  misc_feature: MA Experiment 20001612 PARAMETER Experiment Name: Zm_50ppm_KNO3_L-to-H_P Parameter: Timepoint (hr) Value: 8
  misc_feature: MA Experiment 20001612 PARAMETER Experiment Name: Zm_50ppm_KNO3_L-to-H_P Parameter: Tissue Value: Roots
  misc_feature: MA Experiment 20001612 PARAMETER Experiment Name: Zm_50ppm_KNO3_L-to-H_P Parameter: Treatment Value: 50ppm KNO3 vs. 50ppm KCl
gatataagaaaccctagcggagccactaacacagtcgcctccttcctgcgccgccgccgccgccgccgctaccaccgcctcgcggccgcctgcggctccgcgtttccgcacggaagttggtgaaggtttcttgaggctgagaacatggtgctgaagacggaactttgccgcttcagcggccagaagatttatcctgggaaaggcattagatttatccgtgctgattctcaggtcttcctttttgccaactcgaaatgcaagcgctacttccacaaccgcctgaagcctgcaaagcttacctggacagcaatgtacaggaagcagcacaagaaggatatccatgctgaagcggtaaagaagaggcgccgcgccaccaagaagccatactccaggtcaattgtgggtgcttccttggaagtaatccagaagaagagagctgagaagccagaggtccgcgatgctgctagagaagctgctcttcgtgagatcaaggagcgcatcaagaagaccaaggatgagaagaaagcgaagaaggcggaggtgagcaagtcccagaagacgcagacaaagggtgcggtccagaagggttccaagggccccaagttgggcggcggtggtgggaagcgctgaaagaacttagtgtcgtttctcgacattgcagtcgttccttagccaaagccactttcgtagaacctgtgttgaatttgcaagacttattcaagcgttgcttgtgcgtgctaaataccatggcaagagaacggatttatatttatgcctgaaaaaaaatgaccgttcatattcttaactcatcttggataagggcttgttttgc

SEQ ID NO: 4009 - protein, 161 aa, Zea mays subsp. mays; identical to SEQ ID NO: 1700
  peptide (1)..(161): Ceres Seq. ID no. 12366951
  misc_feature (3)..(73): Pfam Name: Ribosomal protein L24e Pfam Description: Ribosomal protein L24e
  misc_feature (3)..(73): Pfam Name: Ribosomal protein L24e Pfam Description: Ribosomal protein L24e
  misc_feature (1)..(161): Homolog of NCBI NO: 1710521 NR Description: 60S RIBOSOMAL PROTEIN L24 >gi|7440778|pir||T06178
  misc_feature (4)..(161): Homolog of NCBI NO: 34900364 NR Description: putative 60S ribosomal protein L24 [Oryza sativa
  misc_feature (1)..(160): Homolog of NCBI NO: 6094040 NR Description: 60S ribosomal protein L24
  misc_feature (1)..(156): Homolog of NCBI NO: 10180025 NR Description: 60S ribosomal protein L24 [Prunus avium]
  misc_feature (1)..(161): Homolog of NCBI NO: 18404176 NR Description: 60S ribosomal protein L24; protein id: supported by cDNA: 14564., supported by cDNA: gi_16604375, by cDNA: gi_18252830 [Arabidopsis thaliana]
  misc_feature (4)..(161): Homolog of NCBI NO: 34900364 NR Description: putative 60S ribosomal protein L24 [Oryza sativa
  misc_feature (1)..(156): Homolog of NCBI NO: 10180025 NR Description: 60S ribosomal protein L24 [Prunus avium]
  misc_feature (10)..(154): Homolog of NCBI NO: 40741063 NR Description: conserved hypothetical protein [Aspergillus
  misc_feature (3)..(150): Homolog of NCBI NO: 19115030 NR Description: 60S ribosomal protein L24 [Schizosaccharomyces
  misc_feature (3)..(150): Homolog of NCBI NO: 19075214 NR Description: 60s ribosomal protein L24 [Schizosaccharomyces
  misc_feature (5)..(161): Homolog of NCBI NO: 25295112 NR Description: 60S ribosomal protein L24 [imported] -
  misc_feature (1)..(161): Homolog of NCBI NO: 15231730 NR Description: 60S ribosomal protein - like; protein id: supported by cDNA: gi_16648705, supported by cDNA: gi_20260561 thaliana] >gi|26454659|sp|P38666|RL24_ARATH 60S ribosomal protein
  misc_feature (1)..(161): Homolog of NCBI NO: 18404176 NR Description: 60S ribosomal protein L24; protein id: supported by cDNA: 14564., supported by cDNA: gi_16604375, by cDNA: gi_18252830 [Arabidopsis thaliana]
  misc_feature (1)..(160): Homolog of NCBI NO: 6094040 NR Description: 60S ribosomal protein L24
  misc_feature (1)..(161): Homolog of NCBI NO: 1710521 NR Description: 60S RIBOSOMAL PROTEIN L24 >gi|7440778|pir||T06178
  misc_feature (1)..(161): Homolog of NCBI NO: 15231730 NR Description: 60S ribosomal protein - like; protein id: supported by cDNA: gi_16648705, supported by cDNA: gi_20260561 thaliana] >gi|26454659|sp|P38666|RL24_ARATH 60S ribosomal protein
  misc_feature (5)..(161): Homolog of NCBI NO: 25295112 NR Description: 60S ribosomal protein L24 [imported] -
  misc_feature (3)..(150): Homolog of NCBI NO: 19075214 NR Description: 60s ribosomal protein L24 [Schizosaccharomyces
  misc_feature (3)..(150): Homolog of NCBI NO: 19115030 NR Description: 60S ribosomal protein L24 [Schizosaccharomyces
  misc_feature (10)..(154): Homolog of NCBI NO: 40741063 NR Description: conserved hypothetical protein [Aspergillus

SEQ ID NO: 4010 - protein, 106 aa, Zea mays subsp. mays; identical to SEQ ID NO: 1701
  peptide (1)..(106): Ceres Seq. ID no. 12366952
  misc_feature (1)..(106): Homolog of NCBI NO: 1710521 NR Description: 60S RIBOSOMAL PROTEIN L24 >gi|7440778|pir||T06178
  misc_feature (1)..(106): Homolog of NCBI NO: 34900364 NR Description: putative 60S ribosomal protein L24 [Oryza sativa
  misc_feature (1)..(105): Homolog of NCBI NO: 6094040 NR Description: 60S ribosomal protein L24
  misc_feature (1)..(101): Homolog of NCBI NO: 10180025 NR Description: 60S ribosomal protein L24 [Prunus avium]
  misc_feature (1)..(106): Homolog of NCBI NO: 18404176 NR Description: 60S ribosomal protein L24; protein id: supported by cDNA: 14564., supported by cDNA: gi_16604375, by cDNA: gi_18252830 [Arabidopsis thaliana]
  misc_feature (1)..(106): Homolog of NCBI NO: 15231730 NR Description: 60S ribosomal protein - like; protein id: supported by cDNA: gi_16648705, supported by cDNA: gi_20260561 thaliana] >gi|26454659|sp|P38666|RL24_ARATH 60S ribosomal protein
  misc_feature (1)..(106): Homolog of NCBI NO: 25295112 NR Description: 60S ribosomal protein L24 [imported] -
  misc_feature (1)..(95): Homolog of NCBI NO: 19075214 NR Description: 60s ribosomal protein L24 [Schizosaccharomyces
  misc_feature (1)..(95): Homolog of NCBI NO: 19115030 NR Description: 60S ribosomal protein L24 [Schizosaccharomyces
  misc_feature (1)..(99): Homolog of NCBI NO: 40741063 NR Description: conserved hypothetical protein [Aspergillus
  misc_feature (1)..(106): Homolog of NCBI NO: 1710521 NR Description: 60S RIBOSOMAL PROTEIN L24 >gi|7440778|pir||T06178
  misc_feature (1)..(106): Homolog of NCBI NO: 34900364 NR Description: putative 60S ribosomal protein L24 [Oryza sativa
  misc_feature (1)..(105): Homolog of NCBI NO: 6094040 NR Description: 60S ribosomal protein L24
  misc_feature (1)..(101): Homolog of NCBI NO: 10180025 NR Description: 60S ribosomal protein L24 [Prunus avium]
  misc_feature (1)..(106): Homolog of NCBI NO: 18404176 NR Description: 60S ribosomal protein L24; protein id: supported by cDNA: 14564., supported by cDNA: gi_16604375, by cDNA: gi_18252830 [Arabidopsis thaliana]
  misc_feature (1)..(106): Homolog of NCBI NO: 15231730 NR Description: 60S ribosomal protein - like; protein id: supported by cDNA: gi_16648705, supported by cDNA: gi_20260561 thaliana] >gi|26454659|sp|P38666|RL24_ARATH 60S ribosomal protein
  misc_feature (1)..(106): Homolog of NCBI NO: 25295112 NR Description: 60S ribosomal protein L24 [imported] -
  misc_feature (1)..(95): Homolog of NCBI NO: 19075214 NR Description: 60s ribosomal protein L24 [Schizosaccharomyces
  misc_feature (1)..(95): Homolog of NCBI NO: 19115030 NR Description: 60S ribosomal protein L24 [Schizosaccharomyces
  misc_feature (1)..(99): Homolog of NCBI NO: 40741063 NR Description: conserved hypothetical protein [Aspergillus

SEQ ID NO: 4011 - DNA, 745 bp, Zea mays subsp. mays
  misc_feature (1)..(745): Ceres Seq. ID no. 13492365
  misc_feature: MA Experiment ID: 108534 Result: Up-regulated in Transcription
  misc_feature: MA Experiment 108534 PARAMETER Experiment Name: Zm_4deg_Cold_P Parameter: Age (hr) Value: 8
  misc_feature: MA Experiment 108534 PARAMETER Experiment Name: Zm_4deg_Cold_P Parameter: Organism Value: Zea mays
  misc_feature: MA Experiment 108534 PARAMETER Experiment Name: Zm_4deg_Cold_P Parameter: Plant Line Value: 35A19
  misc_feature: MA Experiment 108534 PARAMETER Experiment Name: Zm_4deg_Cold_P Parameter: Temperature (deg C) Value: 4 vs. 22
  misc_feature: MA Experiment 108534 PARAMETER Experiment Name: Zm_4deg_Cold_P Parameter: Timepoint (hr) Value: 6
  misc_feature: MA Experiment 108534 PARAMETER Experiment Name: Zm_4deg_Cold_P Parameter: Tissue Value: Aerial
tcgggaagaggagcaaaacaaaccctatctaaaccgcggcggactcttcgtccagcaaggtttcccatccaaatccggccacgccacttgttctttttttccgcaacaccgatggtgtacgtggattcttgggaggagttcgtggagcgttccgtgcagctcttccgcggcgaccccaacgccacccgctacgtgatgaagtaccggcactgcgaggggaagctcgtgctcaaggtcaccgacgaccgcgagtgcttgaagttcaagacagatcaagctcaagacgcaaagaagatggagaagctcaacaacatcttttttgctctcatgacacgtgggcctgatgttgatatcagtgaagtttcagggaaggaacaggcagagcaacagcaagcgaagaaaggtcggggaaggaggcaataatgcggtctgatccttatttgttacagaaaattcacaactggaatgatggattaacatttcatggactttattgtaattctgaagaaagtttttccagtacagaaccgagaacaaactaaatgcactctatcatgaatgaatgcatgattgagaaacgcccaaggcttcaaccctgcttcgtttttctgcacgggaagcgttttcatccatgttttctggtagaggaatgtagcttgatactctgcctgatcttatattgcgcactgcctgttggggttgggccatacgattttaggctattctcaatgggaatgaatttcct

SEQ ID NO: 4012 - protein, 140 aa, Zea mays subsp. mays
  peptide (1)..(140): Ceres Seq. ID no. 13492366
  misc_feature (39)..(115): Pfam Name: Signal recognition particle 9 kDa protein (SRP9) Pfam Description: Signal recognition particle 9 kDa protein (SRP9)
  misc_feature (38)..(104): Homolog of NCBI NO: 39585011 NR Description: Hypothetical protein CBG06800 [Caenorhabditis
  misc_feature (38)..(104): Homolog of NCBI NO: 17556953 NR Description: Signal recognition particle (8.8 kD)
  misc_feature (38)..(110): Homolog of NCBI NO: 6755662 NR Description: signal recognition particle 9
  misc_feature (43)..(110): Homolog of NCBI NO: 11513832 NR Description: Chain A, Core Of The Alu Domain Of The Mammalian
  misc_feature (38)..(110): Homolog of NCBI NO: 4507217 NR Description: signal recognition particle 9kDa; signal
  misc_feature (38)..(110): Homolog of NCBI NO: 134890 NR Description: SIGNAL RECOGNITION PARTICLE 9 KD PROTEIN (SRP9)
  misc_feature (34)..(110): Homolog of NCBI NO: 5107800 NR Description: Signal Recognition Particle Alu Rna Binding
  misc_feature (38)..(110): Homolog of NCBI NO: 29436534 NR Description: Similar to signal recognition particle 9kDa
  misc_feature (38)..(140): Homolog of NCBI NO: 15229083 NR Description: signal recognition particle subunit 9 - like
  misc_feature (38)..(140): Homolog of NCBI NO: 12230624 NR Description: Signal recognition particle 9 kDa protein (SRP9)
SGRGAKQTLSKPRRTLRPARFPIQIRPRHLFFFSATPMVYVDSWEEFVERSVQLFRGDPNATRYVMKYRHCEGKLVLKVTDDRECLKFKTDQAQDAKKMEKLNNIFFALMTRGPDVDISEVSGKEQAEQQQAKKGRGRRQ

SEQ ID NO: 4013 - protein, 103 aa, Zea mays subsp. mays
  peptide (1)..(103): Ceres Seq. ID no. 13492367
  misc_feature (2)..(78): Pfam Name: Signal recognition particle 9 kDa protein (SRP9) Pfam Description: Signal recognition particle 9 kDa protein (SRP9)
  misc_feature (1)..(73): Homolog of NCBI NO: 5107800 NR Description: Signal Recognition Particle Alu Rna Binding
  misc_feature (1)..(73): Homolog of NCBI NO: 29436534 NR Description: Similar to signal recognition particle 9kDa
  misc_feature (1)..(67): Homolog of NCBI NO: 39585011 NR Description: Hypothetical protein CBG06800 [Caenorhabditis
  misc_feature (1)..(73): Homolog of NCBI NO: 6755662 NR Description: signal recognition particle 9
  misc_feature (1)..(73): Homolog of NCBI NO: 4507217 NR Description: signal recognition particle 9kDa; signal
  misc_feature (1)..(73): Homolog of NCBI NO: 134890 NR Description: SIGNAL RECOGNITION PARTICLE 9 KD PROTEIN (SRP9)
  misc_feature (6)..(73): Homolog of NCBI NO: 11513832 NR Description: Chain A, Core Of The Alu Domain Of The Mammalian
  misc_feature (1)..(67): Homolog of NCBI NO: 17556953 NR Description: Signal recognition particle (8.8 kD)
  misc_feature (1)..(103): Homolog of NCBI NO: 15229083 NR Description: signal recognition particle subunit 9 - like
  misc_feature (1)..(103): Homolog of NCBI NO: 12230624 NR Description: Signal recognition particle 9 kDa protein (SRP9)
MVYVDSWEEFVERSVQLFRGDPNATRYVMKYRHCEGKLVLKVTDDRECLKFKTDQAQDAKKMEKLNNIFFALMTRGPDVDISEVSGKEQAEQQQAKKGRGRRQ

SEQ ID NO: 4014 - protein, 75 aa, Zea mays subsp. mays
  peptide (1)..(75): Ceres Seq. ID no. 13492368
  misc_feature (1)..(39): Homolog of NCBI NO: 39585011 NR Description: Hypothetical protein CBG06800 [Caenorhabditis
  misc_feature (1)..(39): Homolog of NCBI NO: 17556953 NR Description: Signal recognition particle (8.8 kD)
  misc_feature (1)..(45): Homolog of NCBI NO: 6755662 NR Description: signal recognition particle 9
  misc_feature (1)..(45): Homolog of NCBI NO: 11513832 NR Description: Chain A, Core Of The Alu Domain Of The Mammalian
  misc_feature (1)..(45): Homolog of NCBI NO: 4507217 NR Description: signal recognition particle 9kDa; signal
  misc_feature (1)..(45): Homolog of NCBI NO: 134890 NR Description: SIGNAL RECOGNITION PARTICLE 9 KD PROTEIN (SRP9)
  misc_feature (1)..(45): Homolog of NCBI NO: 5107800 NR Description: Signal Recognition Particle Alu Rna Binding
  misc_feature (1)..(45): Homolog of NCBI NO: 29436534 NR Description: Similar to signal recognition particle 9kDa
  misc_feature (1)..(75): Homolog of NCBI NO: 15229083 NR Description: signal recognition particle subunit 9 - like
  misc_feature (1)..(75): Homolog of NCBI NO: 12230624 NR Description: Signal recognition particle 9 kDa protein (SRP9)
MKYRHCEGKLVLKVTDDRECLKFKTDQAQDAKKMEKLNNIFFALMTRGPDVDISEVSGKEQAEQQQAKKGRGRRQ

SEQ ID NO: 4015 - DNA, 718 bp, Zea mays subsp. mays
  misc_feature (1)..(718): Ceres Seq. ID no. 12403024
  misc_feature: MA Experiment ID: 108528 Result: Down-regulated in Transcription
  misc_feature: MA Experiment 108528 PARAMETER Experiment Name: Zm_Imbibed_Seeds_P Parameter: Age (day) Value: 5 vs. 2
  misc_feature: MA Experiment 108528 PARAMETER Experiment Name: Zm_Imbibed_Seeds_P Parameter: Organism Value: Zea mays
  misc_feature: MA Experiment 108528 PARAMETER Experiment Name: Zm_Imbibed_Seeds_P Parameter: Plant Line Value: 35A19
  misc_feature: MA Experiment 108528 PARAMETER Experiment Name: Zm_Imbibed_Seeds_P Parameter: Tissue Value: Aerial vs. Embryo
  misc_feature: MA Experiment ID: 108530 Result: Down-regulated in Transcription
  misc_feature: MA Experiment 108530 PARAMETER Experiment Name: Zm_Imbibed_Seeds_P Parameter: Age (day) Value: 6 vs. 2
  misc_feature: MA Experiment 108530 PARAMETER Experiment Name: Zm_Imbibed_Seeds_P Parameter: Organism Value: Zea mays
  misc_feature: MA Experiment 108530 PARAMETER Experiment Name: Zm_Imbibed_Seeds_P Parameter: Plant Line Value: 35A19
  misc_feature: MA Experiment 108530 PARAMETER Experiment Name: Zm_Imbibed_Seeds_P Parameter: Tissue Value: Aerial vs. Embryo
  misc_feature: MA Experiment ID: 108545 Result: Down-regulated in Transcription
  misc_feature: MA Experiment 108545 PARAMETER Experiment Name: Zm_Imbibed_Seeds_P Parameter: Age (day) Value: 3 vs. 2
  misc_feature: MA Experiment 108545 PARAMETER Experiment Name: Zm_Imbibed_Seeds_P Parameter: Organism Value: Zea mays
  misc_feature: MA Experiment 108545 PARAMETER Experiment Name: Zm_Imbibed_Seeds_P Parameter: Plant Line Value: 35A19
  misc_feature: MA Experiment 108545 PARAMETER Experiment Name: Zm_Imbibed_Seeds_P Parameter: Tissue Value: Aerial vs. Embryo
  misc_feature: MA Experiment ID: 108547 Result: Down-regulated in Transcription
  misc_feature: MA Experiment 108547 PARAMETER Experiment Name: Zm_Imbibed_Seeds_P Parameter: Age (day) Value: 4 vs. 2
  misc_feature: MA Experiment 108547 PARAMETER Experiment Name: Zm_Imbibed_Seeds_P Parameter: Organism Value: Zea mays
  misc_feature: MA Experiment 108547 PARAMETER Experiment Name: Zm_Imbibed_Seeds_P Parameter: Plant Line Value: 35A19
  misc_feature: MA Experiment 108547 PARAMETER Experiment Name: Zm_Imbibed_Seeds_P Parameter: Tissue Value: Aerial vs. Embryo
  misc_feature: MA Experiment ID: 108559 Result: Down-regulated in Transcription
  misc_feature: MA Experiment 108559 PARAMETER Experiment Name: Zm_5mM_NO_P Parameter: Age (day) Value: 8
  misc_feature: MA Experiment 108559 PARAMETER Experiment Name: Zm_5mM_NO_P Parameter: Organism Value: Zea mays
  misc_feature: MA Experiment 108559 PARAMETER Experiment Name: Zm_5mM_NO_P Parameter: Plant Line Value: 35A19
  misc_feature: MA Experiment 108559 PARAMETER Experiment Name: Zm_5mM_NO_P Parameter: Timepoint (hr) Value: 12
  misc_feature: MA Experiment 108559 PARAMETER Experiment Name: Zm_5mM_NO_P Parameter: Tissue Value: Aerial
  misc_feature: MA Experiment 108559 PARAMETER Experiment Name: Zm_5mM_NO_P Parameter: Treatment Value: 5mM NO vs. No Treatment
  misc_feature: MA Experiment ID: 20000478 Result: Down-regulated in Transcription
  misc_feature: MA Experiment 20000478 PARAMETER Experiment Name: Zm_5mM_SA_P Parameter: Age (day) Value: 11
  misc_feature: MA Experiment 20000478 PARAMETER Experiment Name: Zm_5mM_SA_P Parameter: Organism Value: Zea mays
  misc_feature: MA Experiment 20000478 PARAMETER Experiment Name: Zm_5mM_SA_P Parameter: Plant Line Value: 35A19
  misc_feature: MA Experiment 20000478 PARAMETER Experiment Name: Zm_5mM_SA_P Parameter: Timepoint (hr) Value: 72
  misc_feature: MA Experiment 20000478 PARAMETER Experiment Name: Zm_5mM_SA_P Parameter: Tissue Value: Aerial
  misc_feature: MA Experiment 20000478 PARAMETER Experiment Name: Zm_5mM_SA_P Parameter: Treatment Value: 5mM SA vs. No Treatment
  misc_feature: MA Experiment ID: 20000479 Result: Down-regulated in Transcription
  misc_feature: MA Experiment 20000479 PARAMETER Experiment Name: Zm_Drought_P Parameter: Age (day) Value: 10
  misc_feature: MA Experiment 20000479 PARAMETER Experiment Name: Zm_Drought_P Parameter: Organism Value: Zea mays
  misc_feature: MA Experiment 20000479 PARAMETER Experiment Name: Zm_Drought_P Parameter: Plant Line Value: 35A19
  misc_feature: MA Experiment 20000479 PARAMETER Experiment Name: Zm_Drought_P Parameter: Timepoint (hr) Value: 48
  misc_feature: MA Experiment 20000479 PARAMETER Experiment Name: Zm_Drought_P Parameter: Tissue Value: Aerial
  misc_feature: MA Experiment 20000479 PARAMETER Experiment Name: Zm_Drought_P Parameter: Treatment Value: Drought vs. No Drought
  misc_feature: MA Experiment ID: 20000480 Result: Down-regulated in Transcription
  misc_feature: MA Experiment 20000480 PARAMETER Experiment Name: Zm_Drought_P Parameter: Age (day) Value: 11
  misc_feature: MA Experiment 20000480 PARAMETER Experiment Name: Zm_Drought_P Parameter: Organism Value: Zea mays
  misc_feature: MA Experiment 20000480 PARAMETER Experiment Name: Zm_Drought_P Parameter: Plant Line Value: 35A19
  misc_feature: MA Experiment 20000480 PARAMETER Experiment Name: Zm_Drought_P Parameter: Timepoint (hr) Value: 72
  misc_feature: MA Experiment 20000480 PARAMETER Experiment Name: Zm_Drought_P Parameter: Tissue Value: Aerial
  misc_feature: MA Experiment 20000480 PARAMETER Experiment Name: Zm_Drought_P Parameter: Treatment Value: Drought vs. No Drought
  misc_feature: MA Experiment ID: 20000535 Result: Down-regulated in Transcription
  misc_feature: MA Experiment 20000535 PARAMETER Experiment Name: Zm_Hybrid_Seed_Dev_P Parameter: DAP Value: 30 vs. 12
  misc_feature: MA Experiment 20000535 PARAMETER Experiment Name: Zm_Hybrid_Seed_Dev_P Parameter: Organism Value: Zea mays
  misc_feature: MA Experiment 20000535 PARAMETER Experiment Name: Zm_Hybrid_Seed_Dev_P Parameter: Plant Line Value: 35A19
  misc_feature: MA Experiment 20000535 PARAMETER Experiment Name: Zm_Hybrid_Seed_Dev_P Parameter: Tissue Value: Embryo vs. Unfert Floret
accttcgctaccattgcttcaccatcaccaccaccccgcggctgcagctcagcagctccagacctcaccagaggcacctaccacaccgcccgccgccgatcccgtcacccgtctcctccccgctgcggagcgtctccagccctgcccggtgcccgcccagatggcaaacgcggcgtcagggatggccgtggacgacgactgcaagcgccggttcctggagctcaaggccaagaggacgcaccgcttcatcatctacaggatcgacgagaagaagaagatggtggtggtggagcaggtgggcaagcccgtgctcggctacgacgacttcgccgccagcctccccgccaacgagtgcaggtacgccatcttcgactacgacttcgtcaccgaggagaactgccagaagagcaagatcttcttcatcgcctggtctcctgacacggcgcgcgtgaggagcaagatgatctacgccagctccaaggagaggttcaagcgggagctggacggcattcaggtggatctccaggccaccgactccgccgaggttggccttgacgtcatccagggccgtgcaagctgaggatgcccagcgatgaactgcccatgccagaggatgtatgagcatcatcagttcagatgagaacttgactgggcgggctatgtaaaaactgcatccaccgcagtgataaatcaatctaatcaatctaccaccccctcc

SEQ ID NO: 4016 - protein, 192 aa, Zea mays subsp. mays
  peptide (1)..(192): Ceres Seq. ID no. 12403025
  misc_feature (65)..(192): Pfam Name: Cofilin/tropomyosin-type actin-binding protein Pfam Description: Cofilin/tropomyosin-type actin-binding protein
  misc_feature (54)..(190): Homolog of NCBI NO: 18411410 NR Description: putative actin-depolymerizing factor
  misc_feature (54)..(191): Homolog of NCBI NO: 231509 NR Description: Actin-depolymerizing factor (ADF)
  misc_feature (54)..(192): Homolog of NCBI NO: 18408116 NR Description: actin depolymerizing factor 2 (ADF2)
  misc_feature (61)..(192): Homolog of NCBI NO: 30697303 NR Description: actin depolymerizing factor 4 - like protein
  misc_feature (54)..(191): Homolog of NCBI NO: 17366765 NR Description: Actin-depolymerizing factor 2 (ADF 2)
  misc_feature (54)..(192): Homolog of NCBI NO: 38564721 NR Description: putative actin-depolymerizing factor 2
  misc_feature (54)..(192): Homolog of NCBI NO: 15231309 NR Description: actin depolymerizing factor 1 (ADF1)
  misc_feature (54)..(192): Homolog of NCBI NO: 4185511 NR Description: actin depolymerizing factor 4 [Arabidopsis
  misc_feature (54)..(192): Homolog of NCBI NO: 30697300 NR Description: actin depolymerizing factor 4 - like protein
  misc_feature (54)..(192): Homolog of NCBI NO: 17366768 NR Description: Actin-depolymerizing factor 1 (ADF 1)
PSLPLLHHHHHPAAAAQQLQTSPEAPTTPPAADPVTRLLPAAERLQPCPVPAQMANAASGMAVDDDCKRRFLELKAKRTHRFIIYRIDEKKKMVVVEQVGKPVLGYDDFAASLPANECRYAIFDYDFVTEENCQKSKIFFIAWSPDTARVRSKMIYASSKERFKRELDGIQVDLQATDSAEVGLDVIQGRAS

SEQ ID NO: 4017 - protein, 149 aa, Zea mays subsp. mays
  peptide (1)..(149): Ceres Seq. ID no. 12403026
LRYHCFTITTTPRLQLSSSRPHQRHLPHRPPPIPSPVSSPLRSVSSPARCPPRWQTRRQGWPWTTTASAGSWSSRPRGRTASSSTGSTRRRRWWWWSRWASPCSATTTSPPASPPTSAGTPSSTTTSSPRRTARRARSSSSPGLLTRRA

SEQ ID NO: 4018 - protein, 145 aa, Zea mays subsp. mays
  peptide (1)..(145): Ceres Seq. ID no. 12403027
TFATIASPSPPPRGCSSAAPDLTRGTYHTARRRSRHPSPPRCGASPALPGARPDGKRGVRDGRGRRLQAPVPGAQGQEDAPLHHLQDRREEEDGGGGAGGQARARLRRLRRQPPRQRVQVRHLRLRLRHRGELPEEQDLLHRLVS

SEQ ID NO: 4019 - protein, 139 aa, Zea mays subsp. mays
  peptide (1)..(139): Ceres Seq. ID no. 12403028
  misc_feature (12)..(139): Pfam Name: Cofilin/tropomyosin-type actin-binding protein Pfam Description: Cofilin/tropomyosin-type actin-binding protein
  misc_feature (1)..(137): Homolog of NCBI NO: 18411410 NR Description: putative actin-depolymerizing factor
  misc_feature (1)..(138): Homolog of NCBI NO: 231509 NR Description: Actin-depolymerizing factor (ADF)
  misc_feature (1)..(139): Homolog of NCBI NO: 18408116 NR Description: actin depolymerizing factor 2 (ADF2)
  misc_feature (8)..(139): Homolog of NCBI NO: 30697303 NR Description: actin depolymerizing factor 4 - like protein
  misc_feature (1)..(138): Homolog of NCBI NO: 17366765 NR Description: Actin-depolymerizing factor 2 (ADF 2)
  misc_feature (1)..(139): Homolog of NCBI NO: 38564721 NR Description: putative actin-depolymerizing factor 2
  misc_feature (1)..(139): Homolog of NCBI NO: 15231309 NR Description: actin depolymerizing factor 1 (ADF1)
  misc_feature (1)..(139): Homolog of NCBI NO: 4185511 NR Description: actin depolymerizing factor 4 [Arabidopsis
  misc_feature (1)..(139): Homolog of NCBI NO: 30697300 NR Description: actin depolymerizing factor 4 - like protein
  misc_feature (1)..(139): Homolog of NCBI NO: 17366768 NR Description: Actin-depolymerizing factor 1 (ADF 1)
MANAASGMAVDDDCKRRFLELKAKRTHRFIIYRIDEKKKMVVVEQVGKPVLGYDDFAASLPANECRYAIFDYDFVTEENCQKSKIFFIAWSPDTARVRSKMIYASSKERFKRELDGIQVDLQATDSAEVGLDVIQGRAS

SEQ ID NO: 4020 - DNA, 942 bp, Zea mays subsp. mays
  misc_feature (1)..(942): Ceres Seq. ID no. 12343221
  misc_feature: MA Experiment ID: 108535 Result: Up-regulated in Transcription
  misc_feature: MA Experiment 108535 PARAMETER Experiment Name: Zm_Meristem_P Parameter: Age (day) Value: 8
  misc_feature: MA Experiment 108535 PARAMETER Experiment Name: Zm_Meristem_P Parameter: Organism Value: Zea mays
  misc_feature: MA Experiment 108535 PARAMETER Experiment Name: Zm_Meristem_P Parameter: Plant Line Value: 35A19
  misc_feature: MA Experiment 108535 PARAMETER Experiment Name: Zm_Meristem_P Parameter: Tissue Value: Root Meristem vs. Above Root Meristem
attacctggcgcggagaggagagggagtgagtcgagatccattcccaactgcacctgcgcgcctcgactggtagcccgaaccctagctagcaggtcggaggcgagagagcagccatggcgcggtgcctcgcgctcgtctccctccttctcctcggcctcgcctccgccgcctccgctgccgatgcgccctttgtcgtcgcgcacaagaaggtttcgctctcccgccccaagccgggcgtcgagcgcgtcgccgtctccctcgacctctacaaccagggatccgcgactgcctatgatgtgtcacttaatgacgactcttggccaacacaagcatttgagcttgtcactggagagaaatcgaagacattggaaaggcttgaccctggtgccactgctacacacacatatgtcctggagaccaaaacacagggcaggttccagggttcaccagctattattacgtaccgtgttcccacaaagactgctcttcaggaggcctactcaactcccatcttcccactggatattctcgctgagagacttcctgagaagaagtttgaatgggctaagaggcttgtggcgaaatatgggtcacttgtgtctgttgtctcatttgttggattgtttatctacctcgttgcgagcccgtcgaagagcagctcaaaaggaagcaagaagagacgttgatctacttatagttcggcgcagttgaagttgtagctggtggtttttgcctggaggaactcttggtagtttgagctgagcgaaagctttaaattttacatttactcaccacaccatgaactgcaacgaagtgagcatctgttagaaaagtggaccagtaattttggttggttatttatttcctgtttctctgtcagactcttaactcggaggacctgtaactaggaaagttacttttgcttgaaagaacattttggc

SEQ ID NO: 4021 - protein, 236 aa, Zea mays subsp. mays
  peptide (1)..(236): Ceres Seq. ID no. 12343222
LPGAERRGSESRSIPNCTCAPRLVARTLASRSEAREQPWRGASRSSPSFSSASPPPPPLPMRPLSSRTRRFRSPAPSRASSASPSPSTSTTRDPRLPMMCHLMTTLGQHKHLSLSLERNRRHWKGLTLVPLLHTHMSWRPKHRAGSRVHQLLLRTVFPQRLLFRRPTQLPSSHWIFSLRDFLRRSLNGLRGLWRNMGHLCLLSHLLDCLSTSLRARRRAAQKEARRDVDLLIVRRS

SEQ ID NO: 4022 - protein, 190 aa, Zea mays subsp. mays
  peptide (1)..(190): Ceres Seq. ID no. 12343223
  misc_feature (10)..(186): Pfam Name: Translocon-associated protein beta (TRAPB) Pfam Description: Translocon-associated protein beta (TRAPB)
  misc_feature (5)..(117): Homolog of NCBI NO: 13384850 NR Description: RIKEN cDNA 1500032E05 [Mus musculus]
  misc_feature (5)..(117): Homolog of NCBI NO: 12653147 NR Description: signal sequence receptor, beta
  misc_feature (5)..(117): Homolog of NCBI NO: 4507239 NR Description: signal sequence receptor, beta precursor
  misc_feature (1)..(117): Homolog of NCBI NO: 34366445 NR Description: hypothetical protein [Homo sapiens]
  misc_feature (5)..(148): Homolog of NCBI NO: 12860639 NR Description: unnamed protein product [Mus musculus]
  misc_feature (5)..(188): Homolog of NCBI NO: 134931 NR Description: TRANSLOCON-ASSOCIATED PROTEIN, BETA SUBUNIT (TRAP-BETA) (SIGNAL SEQUENCE RECEPTOR BETA SUBUNIT) (SSR-BETA)
  misc_feature (1)..(190): Homolog of NCBI NO: 9757784 NR Description: gene_id:MUA22.2~similar to unknown
  misc_feature (1)..(190): Homolog of NCBI NO: 18417271 NR Description: expressed protein
  misc_feature (3)..(190): Homolog of NCBI NO: 9945068 NR Description: rice EST BE041002 corresponds to a region of the
  misc_feature (1)..(190): Homolog of NCBI NO: 34894034 NR Description: P0672D08.29 [Oryza sativa (japonica
MARCLALVSLLLLGLASAASAADAPFVVAHKKVSLSRPKPGVERVAVSLDLYNQGSATAYDVSLNDDSWPTQAFELVTGEKSKTLERLDPGATATHTYVLETKTQGRFQGSPAIITYRVPTKTALQEAYSTPIFPLDILAERLPEKKFEWAKRLVAKYGSLVSVVSFVGLFIYLVASPSKSSSKGSKKRR

SEQ ID NO: 4023 - protein, 176 aa, Zea mays subsp. mays
  peptide (1)..(176): Ceres Seq. ID no. 12343224
MRPLSSRTRRFRSPAPSRASSASPSPSTSTTRDPRLPMMCHLMTTLGQHKHLSLSLERNRRHWKGLTLVPLLHTHMSWRPKHRAGSRVHQLLLRTVFPQRLLFRRPTQLPSSHWIFSLRDFLRRSLNGLRGLWRNMGHLCLLSHLLDCLSTSLRARRRAAQKEARRDVDLLIVRRS

SEQ ID NO: 4024 - DNA, 1063 bp, Zea mays subsp. mays
  misc_feature (1)..(1063): Ceres Seq. ID no. 12343133
  misc_feature: MA Experiment ID: 108535 Result: Down-regulated in Transcription
  misc_feature: MA Experiment 108535 PARAMETER Experiment Name: Zm_Meristem_P Parameter: Age (day) Value: 8
  misc_feature: MA Experiment 108535 PARAMETER Experiment Name: Zm_Meristem_P Parameter: Organism Value: Zea mays
  misc_feature: MA Experiment 108535 PARAMETER Experiment Name: Zm_Meristem_P Parameter: Plant Line Value: 35A19
  misc_feature: MA Experiment 108535 PARAMETER Experiment Name: Zm_Meristem_P Parameter: Tissue Value: Root Meristem vs. Above Root Meristem
  misc_feature: MA Experiment ID: 108543 Result: Up-regulated in Transcription
  misc_feature: MA Experiment ID: 108556 Result: Up-regulated in Transcription
  misc_feature: MA Experiment 108556 PARAMETER Experiment Name: Zm_Drought_P Parameter: Age (day) Value: 9
  misc_feature: MA Experiment 108556 PARAMETER Experiment Name: Zm_Drought_P Parameter: Organism Value: Zea mays
  misc_feature: MA Experiment 108556 PARAMETER Experiment Name: Zm_Drought_P Parameter: Plant Line Value: 35A19
  misc_feature: MA Experiment 108556 PARAMETER Experiment Name: Zm_Drought_P Parameter: Timepoint (hr) Value: 24
  misc_feature: MA Experiment 108556 PARAMETER Experiment Name: Zm_Drought_P Parameter: Tissue Value: Aerial
  misc_feature: MA Experiment 108556 PARAMETER Experiment Name: Zm_Drought_P Parameter: Treatment Value: Drought vs. No Drought
  misc_feature: MA Experiment ID: 108689 Result: Up-regulated in Transcription
  misc_feature: MA Experiment 108689 PARAMETER Experiment Name: Zm_Drought_Roots_P Parameter: Age (day) Value: 9
  misc_feature: MA Experiment 108689 PARAMETER Experiment Name: Zm_Drought_Roots_P Parameter: Organism Value: Zea mays
  misc_feature: MA Experiment 108689 PARAMETER Experiment Name: Zm_Drought_Roots_P Parameter: Plant Line Value: 35A19
  misc_feature: MA Experiment 108689 PARAMETER Experiment Name: Zm_Drought_Roots_P Parameter: Timepoint (hr) Value: 24
  misc_feature: MA Experiment 108689 PARAMETER Experiment Name: Zm_Drought_Roots_P Parameter: Tissue Value: Roots
  misc_feature: MA Experiment 108689 PARAMETER Experiment Name: Zm_Drought_Roots_P Parameter: Treatment Value: Drought vs. No Drought
acgtctgtctccctctccctgcgctcgctctctccctccctcggtcaaagccagcacgacaacacagcagtctcggtagctgtccccctcgccctcatccctcctcggcgccgctgccggcccgcgcccgccccgcccgcctcccccctcgtgccgctctgccgcggcgcattccgcgcccgcctcgccaccgaatcgggcggaatctcagcgggaccaaaatggggtcgccgggtgcggggagcagcggcggccacgagtgctccttcaagatcctgctcatcggggactcgggcgtcggcaagagcagcctcctcgtcagcttcgtcgccgcctcccacctcgacggcgacatcgcccccaccatcggtgtggattttaaaatcaagttccttacagttggtggaaagaaactaaagttgacaatatgggatactgctggccaggagaggtttaggacaataactagttcttactacagaggtgctcagggaattattttagtatatgatgtcacaaagagagagagtttctcaaatttggctgatgtttggactaaggaaatagaagcaaactcaacaaacaaagactgcataaaaatgcttgttggaaacaaagttgacaaggatgatgaaagaatggtcacagaagaagaaggtcttgcttttgctgaagaatctggttgtctgtttcttgagagcagtgcaaaaacacgagaaaatgttgagaaatgttttgaagaacttgcattgaagatccttgaggtccctagtctcctggaggaagggtcttcttcggttgtcaagaggaaaatcctgaaacagaagcaggaaagtcatgcaaagaacggcagtggatgctgtcaatagatgtgctgatccacgcgacaaggttggctgttttcgtgtgagctgccctgacgttctgctgtacatgagttgtatctacatggtcttgtgagtaaaacagggttaaagaatcagcttgtttggcggggagggggagtgagcataattgatttgtacaaaggacatggcagtttggtgtcattgattttctctct

SEQ ID NO: 4025 - protein, 288 aa, Zea mays subsp. mays
  peptide (1)..(288): Ceres Seq. ID no. 12343134
  misc_feature (90)..(254): Pfam Name: Ras family Pfam Description: Ras family
  misc_feature (88)..(285): Homolog of NCBI NO: 40807131 NR Description: Unknown (protein for MGC:77145) [Danio rerio]
  misc_feature (80)..(145): Homolog of NCBI NO: 25294118 NR Description: protein F9C16.3 [imported] - Arabidopsis thaliana
  misc_feature (146)..(287): Homolog of NCBI NO: 25294118 NR Description: protein F9C16.3 [imported] - Arabidopsis thaliana
  misc_feature (89)..(287): Homolog of NCBI NO: 1370174 NR Description: RAB1Y [Lotus japonicus]
  misc_feature (80)..(287): Homolog of NCBI NO: 15218575 NR Description: GTP-binding protein(RAB1Y), putative
  misc_feature (74)..(287): Homolog of NCBI NO: 15232785 NR Description: GTP-binding protein, putative; protein id:
  misc_feature (74)..(287): Homolog of NCBI NO: 18414255 NR Description: putative protein
  misc_feature (79)..(287): Homolog of NCBI NO: 1370172 NR Description: RAB1X [Lotus japonicus]
  misc_feature (82)..(288): Homolog of NCBI NO: 15451614 NR Description: Putative GTP-binding protein [Oryza sativa]
  misc_feature (74)..(288): Homolog of NCBI NO: 37534998 NR Description: putative GTP-binding protein
VCLPLPALALSLPRSKPARQHSSLGSCPPRPHPSSAPLPARARPARLPPRAALPRRIPRPPRHRIGRNLSGTKMGSPGAGSSGGHECSFKILLIGDSGVGKSSLLVSFVAASHLDGDIAPTIGVDFKIKFLTVGGKKLKLTIWDTAGQERFRTITSSYYRGAQGIILVYDVTKRESFSNLADVWTKEIEANSTNKDCIKMLVGNKVDKDDERMVTEEEGLAFAEESGCLFLESSAKTRENVEKCFEELALKILEVPSLLEEGSSSVVKRKILKQKQESHAKNGSGCCQ

SEQ ID NO: 4026 - protein, 215 aa, Zea mays subsp. mays
  peptide (1)..(215): Ceres Seq. ID no. 12343135
  misc_feature (17)..(181): Pfam Name: Ras family Pfam Description: Ras family
  misc_feature (15)..(212): Homolog of NCBI NO: 40807131 NR Description: Unknown (protein for MGC:77145) [Danio rerio]
  misc_feature (7)..(72): Homolog of NCBI NO: 25294118 NR Description: protein F9C16.3 [imported] - Arabidopsis thaliana
  misc_feature (73)..(214): Homolog of NCBI NO: 25294118 NR Description: protein F9C16.3 [imported] - Arabidopsis thaliana
  misc_feature (16)..(214): Homolog of NCBI NO: 1370174 NR Description: RAB1Y [Lotus japonicus]
  misc_feature (7)..(214): Homolog of NCBI NO: 15218575 NR Description: GTP-binding protein(RAB1Y), putative
  misc_feature (1)..(214): Homolog of NCBI NO: 15232785 NR Description: GTP-binding protein, putative; protein id:
  misc_feature (1)..(214): Homolog of NCBI NO: 18414255 NR Description: putative protein
  misc_feature (6)..(214): Homolog of NCBI NO: 1370172 NR Description: RAB1X [Lotus japonicus]
  misc_feature (9)..(215): Homolog of NCBI NO: 15451614 NR Description: Putative GTP-binding protein [Oryza sativa]
  misc_feature (1)..(215): Homolog of NCBI NO: 37534998 NR Description: putative GTP-binding protein
MGSPGAGSSGGHECSFKILLIGDSGVGKSSLLVSFVAASHLDGDIAPTIGVDFKIKFLTVGGKKLKLTIWDTAGQERFRTITSSYYRGAQGIILVYDVTKRESFSNLADVWTKEIEANSTNKDCIKMLVGNKVDKDDERMVTEEEGLAFAEESGCLFLESSAKTRENVEKCFEELALKILEVPSLLEEGSSSVVKRKILKQKQESHAKNGSGCCQ

SEQ ID NO: 4027 - DNA, 1452 bp, Zea mays subsp. mays
  misc_feature (1)..(1452): Ceres Seq. ID no. 12404819
  misc_feature: MA Experiment ID: 108528 Result: Up-regulated in Transcription
  misc_feature: MA Experiment 108528 PARAMETER Experiment Name: Zm_Imbibed_Seeds_P Parameter: Age (day) Value: 5 vs. 2
  misc_feature: MA Experiment 108528 PARAMETER Experiment Name: Zm_Imbibed_Seeds_P Parameter: Organism Value: Zea mays
  misc_feature: MA Experiment 108528 PARAMETER Experiment Name: Zm_Imbibed_Seeds_P Parameter: Plant Line Value: 35A19
  misc_feature: MA Experiment 108528 PARAMETER Experiment Name: Zm_Imbibed_Seeds_P Parameter: Tissue Value: Aerial vs. Embryo
  misc_feature: MA Experiment ID: 108543 Result: Down-regulated in Transcription
  misc_feature: MA Experiment ID: 108689 Result: Up-regulated in Transcription
  misc_feature: MA Experiment 108689 PARAMETER Experiment Name: Zm_Drought_Roots_P Parameter: Age (day) Value: 9
  misc_feature: MA Experiment 108689 PARAMETER Experiment Name: Zm_Drought_Roots_P Parameter: Organism Value: Zea mays
  misc_feature: MA Experiment 108689 PARAMETER Experiment Name: Zm_Drought_Roots_P Parameter: Plant Line Value: 35A19
  misc_feature: MA Experiment 108689 PARAMETER Experiment Name: Zm_Drought_Roots_P Parameter: Timepoint (hr) Value: 24
  misc_feature: MA Experiment 108689 PARAMETER Experiment Name: Zm_Drought_Roots_P Parameter: Tissue Value: Roots
  misc_feature: MA Experiment 108689 PARAMETER Experiment Name: Zm_Drought_Roots_P Parameter: Treatment Value: Drought vs. No Drought
  misc_feature: MA Experiment ID: 20000477 Result: Down-regulated in Transcription
  misc_feature: MA Experiment 20000477 PARAMETER Experiment Name: Zm_5mM_SA_P Parameter: Age (day) Value: 10
  misc_feature: MA Experiment 20000477 PARAMETER Experiment Name: Zm_5mM_SA_P Parameter: Organism Value: Zea mays
  misc_feature: MA Experiment 20000477 PARAMETER Experiment Name: Zm_5mM_SA_P Parameter: Plant Line Value: 35A19
  misc_feature: MA Experiment 20000477 PARAMETER Experiment Name: Zm_5mM_SA_P Parameter: Timepoint (hr) Value: 48
  misc_feature: MA Experiment 20000477 PARAMETER Experiment Name: Zm_5mM_SA_P Parameter: Tissue Value: Aerial
  misc_feature: MA Experiment 20000477 PARAMETER Experiment Name: Zm_5mM_SA_P Parameter: Treatment Value: 5mM SA vs. No Treatment
  misc_feature: MA Experiment ID: 20000478 Result: Down-regulated in Transcription
  misc_feature: MA Experiment 20000478 PARAMETER Experiment Name: Zm_5mM_SA_P Parameter: Age (day) Value: 11
  misc_feature: MA Experiment 20000478 PARAMETER Experiment Name: Zm_5mM_SA_P Parameter: Organism Value: Zea mays
  misc_feature: MA Experiment 20000478 PARAMETER Experiment Name: Zm_5mM_SA_P Parameter: Plant Line Value: 35A19
  misc_feature: MA Experiment 20000478 PARAMETER Experiment Name: Zm_5mM_SA_P Parameter: Timepoint (hr) Value: 72
  misc_feature: MA Experiment 20000478 PARAMETER Experiment Name: Zm_5mM_SA_P Parameter: Tissue Value: Aerial
  misc_feature: MA Experiment 20000478 PARAMETER Experiment Name: Zm_5mM_SA_P Parameter: Treatment Value: 5mM SA vs. No Treatment
  misc_feature: MA Experiment ID: 20000479 Result: Down-regulated in Transcription
  misc_feature: MA Experiment 20000479 PARAMETER Experiment Name: Zm_Drought_P Parameter: Age (day) Value: 10
  misc_feature: MA Experiment 20000479 PARAMETER Experiment Name: Zm_Drought_P Parameter: Organism Value: Zea mays
  misc_feature: MA Experiment 20000479 PARAMETER Experiment Name: Zm_Drought_P Parameter: Plant Line Value: 35A19
  misc_feature: MA Experiment 20000479 PARAMETER Experiment Name: Zm_Drought_P Parameter: Timepoint (hr) Value: 48
  misc_feature: MA Experiment 20000479 PARAMETER Experiment Name: Zm_Drought_P Parameter: Tissue Value: Aerial
  misc_feature: MA Experiment 20000479 PARAMETER Experiment Name: Zm_Drought_P Parameter: Treatment Value: Drought vs. No Drought
  misc_feature: MA Experiment ID: 20000480 Result: Down-regulated in Transcription
  misc_feature: MA Experiment 20000480 PARAMETER Experiment Name: Zm_Drought_P Parameter: Age (day) Value: 11
  misc_feature: MA Experiment 20000480 PARAMETER Experiment Name: Zm_Drought_P Parameter: Organism Value: Zea mays
  misc_feature: MA Experiment 20000480 PARAMETER Experiment Name: Zm_Drought_P Parameter: Plant Line Value: 35A19
  misc_feature: MA Experiment 20000480 PARAMETER Experiment Name: Zm_Drought_P Parameter: Timepoint (hr) Value: 72
  misc_feature: MA Experiment 20000480 PARAMETER Experiment Name: Zm_Drought_P Parameter: Tissue Value: Aerial
  misc_feature: MA Experiment 20000480 PARAMETER Experiment Name: Zm_Drought_P Parameter: Treatment Value: Drought vs. No Drought
  misc_feature: MA Experiment ID: 20000535 Result: Up-regulated in Transcription
  misc_feature: MA Experiment 20000535 PARAMETER Experiment Name: Zm_Hybrid_Seed_Dev_P Parameter: DAP Value: 30 vs. 12
  misc_feature: MA Experiment 20000535 PARAMETER Experiment Name: Zm_Hybrid_Seed_Dev_P Parameter: Organism Value: Zea mays
  misc_feature: MA Experiment 20000535 PARAMETER Experiment Name: Zm_Hybrid_Seed_Dev_P Parameter: Plant Line Value: 35A19
  misc_feature: MA Experiment 20000535 PARAMETER Experiment Name: Zm_Hybrid_Seed_Dev_P Parameter: Tissue Value: Embryo vs. Unfert Floret
  misc_feature: MA Experiment ID: 20000626 Result: Down-regulated in Transcription
  misc_feature: MA Experiment 20000626 PARAMETER Experiment Name: Zm_Herbicide-Treatments_P Parameter: Timepoint (hr) Value: 12
  misc_feature: MA Experiment 20000626 PARAMETER Experiment Name: Zm_Herbicide-Treatments_P Parameter: Tissue Value: Aerial
  misc_feature: MA Experiment 20000626 PARAMETER Experiment Name: Zm_Herbicide-Treatments_P Parameter: Treatment Value: Roundup vs. No Treatment
ataacctcgcgcacacagcccagcacaagcacgcagcagccctccagctccagccaagcaaagcacaggggtccattgcactgcattgtattgcagcatttctctgcttcgcttcgcttgcttcaggaaagcttgagctagctcgaagtagaaggacaagacagcaaagtcacgcaccatgagaaccatcggggcgaggaacacgcacgactcgctctccttctccaggcgccacttcaagtngcccgtcctcggcaagagcaagagccacggcgccgcgacgttcggggacgaggagtacatgaagagctcggaggcggaggacgacgacgagacgaccatggccttctcctccgcctgcccgtccttccactccgatggcttcgtgtcccctccgctgaagccggcgccgtcggnccagcagcagcaggtggcggcggcggcggcggggcagaggaggaggatgaaggtccggactgccgtgtcgcgcctgcgctcggcgctggccaacgccgtggccgggcggcaccgacaggtgggcatgggcgcgcggctcaccggcacgctctacggccaccggcgcggccacgtgcacctggcgttccaggtggacccgcgcgcgtgcccggcgctgctgctggagctggcggcgcccacggcggcgctggtgcgggagatggcctcgggcctggtgcgcatcgcgctggagtgcgaccgcgccagggccagggggtcgcccgccgccgcgctgccgtccccgtccccgggcgccggcaagaggctggtggaggagacggtgtggcgcgcctactgcaacggcaagagctgcgggtacgcggtgcggcgcgagtgcggcgccgcggactggcgcgtgctccgcgcgctcgagcccgtgtccatgggcgccggagtcatccccgccgccagctgcggcggcggcgagggcgacgtcatgtacatgcgcgcgcggttcgagcgcgtcgtggggtctcgcgactcggaggccttctacatgatgaatccggacgncancgncgncgnagncggtcatgtcgggcccgagctcagcgtctacctcctcagagtctgatcggctcggccgccatggcagtggcagtgacatctgcacctcggccctgatcgtttttttctgtgcatgccaagctgtgaaaatggattagtaggcncctaggtgtagctgttagcacttctagggggtgtttgataaagtggctaagtccctaggttcacatcgaatgtttgatgctagattaaagtattaaatatattttaagtataaaaaataattaaatagataagaactgaacggcaacacaaacctattagcctaattagttcgtgatctgcctatacgatggtncaataaacatctgctaatcacgaattaattaggtttaataaattatgtcgctgtttagtcatcatctttgt

SEQ ID NO: 4028 - protein, 303 aa, Zea mays subsp. mays
  peptide (1)..(303): Ceres Seq. ID no. 12404820
  misc_feature (125)..(303): Pfam Name: Protein of unknown function, DUF617 Pfam Description: Protein of unknown function, DUF617
  misc_feature (103)..(303): Homolog of NCBI NO: 21593037 NR Description: unknown [Arabidopsis thaliana]
  misc_feature (103)..(303): Homolog of NCBI NO: 18405770 NR Description: expressed protein
  misc_feature (121)..(303): Homolog of NCBI NO: 15230862 NR Description: hypothetical protein; protein id: At3g25640.1
  misc_feature (124)..(303): Homolog of NCBI NO: 15235158 NR Description: putative protein
  misc_feature (53)..(303): Homolog of NCBI NO: 15240220 NR Description: putative protein; protein id: At5g06990.1
  misc_feature (125)..(302): Homolog of NCBI NO: 34903148 NR Description: unnamed protein product [Oryza sativa (japonica
  misc_feature (77)..(303): Homolog of NCBI NO: 34909066 NR Description: P0702B09.30 [Oryza sativa (japonica
  misc_feature (121)..(303): Homolog of NCBI NO: 11994755 NR Description: gb|AAB84348.1~gene_id:T5M7.9~similar to unknown
  misc_feature (78)..(303): Homolog of NCBI NO: 15237221 NR Description: putative protein; protein id: At5g23100.1
  misc_feature (1)..(303): Homolog of NCBI NO: 34911646 NR Description: P0039G05.26 [Oryza sativa (japonica
  misc_feature (22)..(22): Xaa is any aa, unknown or other
  misc_feature (80)..(80): Xaa is any aa, unknown or other
  misc_feature (284)..(284): Xaa is any aa, unknown or other
  misc_feature (285)..(285): Xaa is any aa, unknown or other
  misc_feature (286)..(286): Xaa is any aa, unknown or other
  misc_feature (287)..(287): Xaa is any aa, unknown or other
  misc_feature (288)..(288): Xaa is any aa, unknown or other
  misc_feature (289)..(289): Xaa is any aa, unknown or other
MRTIGARNTHDSLSFSRRHFKXPVLGKSKSHGAATFGDEEYMKSSEAEDDDETTMAFSSACPSFHSDGFVSPPLKPAPSXQQQQVAAAAAGQRRRMKVRTAVSRLRSALANAVAGRHRQVGMGARLTGTLYGHRRGHVHLAFQVDPRACPALLLELAAPTAALVREMASGLVRIALECDRARARGSPAAALPSPSPGAGKRLVEETVWRAYCNGKSCGYAVRRECGAADWRVLRALEPVSMGAGVIPAASCGGGEGDVMYMRARFERVVGSRDSEAFYMMNPDXXXXXXGHVGPELSVYLLRV

SEQ ID NO: 4029 - protein, 262 aa, Zea mays subsp. mays
  peptide (1)..(262): Ceres Seq. ID no. 12404821
  misc_feature (84)..(262): Pfam Name: Protein of unknown function, DUF617 Pfam Description: Protein of unknown function, DUF617
  misc_feature (83)..(262): Homolog of NCBI NO: 15235158 NR Description: putative protein
  misc_feature (36)..(262): Homolog of NCBI NO: 34909066 NR Description: P0702B09.30 [Oryza sativa (japonica
  misc_feature (12)..(262): Homolog of NCBI NO: 15240220 NR Description: putative protein; protein id: At5g06990.1
  misc_feature (84)..(261): Homolog of NCBI NO: 34903148 NR Description: unnamed protein product [Oryza sativa (japonica
  misc_feature (62)..(262): Homolog of NCBI NO: 21593037 NR Description: unknown [Arabidopsis thaliana]
  misc_feature (62)..(262): Homolog of NCBI NO: 18405770 NR Description: expressed protein
  misc_feature (80)..(262): Homolog of NCBI NO: 15230862 NR Description: hypothetical protein; protein id: At3g25640.1
  misc_feature (80)..(262): Homolog of NCBI NO: 11994755 NR Description: gb|AAB84348.1~gene_id:T5M7.9~similar to unknown
  misc_feature (37)..(262): Homolog of NCBI NO: 15237221 NR Description: putative protein; protein id: At5g23100.1
  misc_feature (1)..(262): Homolog of NCBI NO: 34911646 NR Description: P0039G05.26 [Oryza sativa (japonica
  misc_feature (39)..(39): Xaa is any aa, unknown or other
  misc_feature (243)..(243): Xaa is any aa, unknown or other
  misc_feature (244)..(244): Xaa is any aa, unknown or other
  misc_feature (245)..(245): Xaa is any aa, unknown or other
  misc_feature (246)..(246): Xaa is any aa, unknown or other
  misc_feature (247)..(247): Xaa is any aa, unknown or other
  misc_feature (248)..(248): Xaa is any aa, unknown or other
MKSSEAEDDDETTMAFSSACPSFHSDGFVSPPLKPAPSXQQQQVAAAAAGQRRRMKVRTAVSRLRSALANAVAGRHRQVGMGARLTGTLYGHRRGHVHLAFQVDPRACPALLLELAAPTAALVREMASGLVRIALECDRARARGSPAAALPSPSPGAGKRLVEETVWRAYCNGKSCGYAVRRECGAADWRVLRALEPVSMGAGVIPAASCGGGEGDVMYMRARFERVVGSRDSEAFYMMNPDXXXXXXGHVGPELSVYLLRV

SEQ ID NO: 4030 - protein, 249 aa, Zea mays subsp. mays
  peptide (1)..(249): Ceres Seq. ID no. 12404822
  misc_feature (71)..(249): Pfam Name: Protein of unknown function, DUF617 Pfam Description: Protein of unknown function, DUF617
  misc_feature (70)..(249): Homolog of NCBI NO: 15235158 NR Description: putative protein
  misc_feature (23)..(249): Homolog of NCBI NO: 34909066 NR Description: P0702B09.30 [Oryza sativa (japonica
  misc_feature (1)..(249): Homolog of NCBI NO: 15240220 NR Description: putative protein; protein id: At5g06990.1
  misc_feature (71)..(248): Homolog of NCBI NO: 34903148 NR Description: unnamed protein product [Oryza sativa (japonica
  misc_feature (49)..(249): Homolog of NCBI NO: 21593037 NR Description: unknown [Arabidopsis thaliana]
  misc_feature (49)..(249): Homolog of NCBI NO: 18405770 NR Description: expressed protein
  misc_feature (67)..(249): Homolog of NCBI NO: 15230862 NR Description: hypothetical protein; protein id: At3g25640.1
  misc_feature (67)..(249): Homolog of NCBI NO: 11994755 NR Description: gb|AAB84348.1~gene_id:T5M7.9~similar to unknown
  misc_feature (24)..(249): Homolog of NCBI NO: 15237221 NR Description: putative protein; protein id: At5g23100.1
  misc_feature (1)..(249): Homolog of NCBI NO: 34911646 NR Description: P0039G05.26 [Oryza sativa (japonica
  misc_feature (26)..(26): Xaa is any aa, unknown or other
  misc_feature (230)..(230): Xaa is any aa, unknown or other
  misc_feature (231)..(231): Xaa is any aa, unknown or other
  misc_feature (232)..(232): Xaa is any aa, unknown or other
  misc_feature (233)..(233): Xaa is any aa, unknown or other
  misc_feature (234)..(234): Xaa is any aa, unknown or other
  misc_feature (235)..(235): Xaa is any aa, unknown or other
MAFSSACPSFHSDGFVSPPLKPAPSXQQQQVAAAAAGQRRRMKVRTAVSRLRSALANAVAGRHRQVGMGARLTGTLYGHRRGHVHLAFQVDPRACPALLLELAAPTAALVREMASGLVRIALECDRARARGSPAAALPSPSPGAGKRLVEETVWRAYCNGKSCGYAVRRECGAADWRVLRALEPVSMGAGVIPAASCGGGEGDVMYMRARFERVVGSRDSEAFYMMNPDXXXXXXGHVGPELSVYLLRV

SEQ ID NO: 4031 - DNA, 1133 bp, Zea mays subsp. mays
  misc_feature (1)..(1133): Ceres Seq. ID no. 12409997
  misc_feature: MA Experiment ID: 20000535 Result: Up-regulated in Transcription
  misc_feature: MA Experiment 20000535 PARAMETER Experiment Name: Zm_Hybrid_Seed_Dev_P Parameter: DAP Value: 30 vs. 12
  misc_feature: MA Experiment 20000535 PARAMETER Experiment Name: Zm_Hybrid_Seed_Dev_P Parameter: Organism Value: Zea mays
  misc_feature: MA Experiment 20000535 PARAMETER Experiment Name: Zm_Hybrid_Seed_Dev_P Parameter: Plant Line Value: 35A19
  misc_feature: MA Experiment 20000535 PARAMETER Experiment Name: Zm_Hybrid_Seed_Dev_P Parameter: Tissue Value: Embryo vs. Unfert Floret
acacggcgtctttgggtgagcacaccgcgcagcaacgagaggggcaaacaagcttgctactgtgatttctcgtccgagcagcggcggaggagagagagagagcatggccgaccacaaggaggagcctgtgccggagtctgtgatggacaagatcaccgagaagttccacggcggggactcgtcgtcgtcgtcgtctgactcggacgacgagaagaaggggtcctcgttggcgtcggcggcggaagccatgaaggccaagatctaccgccttttcggccgggagaggcccgtccactccgtcctcggcggcggcaagcctgccgatcttatcctatggaggaacaggaagatctctggcggggtacttgctggtgccacggccatctggctcctattcgaggtcatggagtaccatctcctcaccttggtgtgccactgtctcatcctctcgctggccatcctcttcctgtggtccaatgcctccactttcatcaacaagtccccaccgaacattcctgaggtcaaaatccctgaggatgtggctgttaatgttgccctgtcactgagatatgagatcaacaggggctttgctaccttaagggagattgggcatggccgtgatctgaagaaattcctaattgttattgcaggtctctggcttctttcagttctcgggagctgctgcaacttcctgacactgttctatattgtctttgtggcactgtacactgtaccagttctgtatgagaaatatgaggacaaggttgatgcttttggtgagaaggctatgactgaactgaagaagtattatgccattttcgatgagaagtgcctatcgaagattccaaagggcccccttaaggataagaagcactagattggtagtaaggtatttgctatgaatcaacatctacattatgtcactagctgtcacctctttctctgaaggatggtgcttggtcctggtctctagttgatagtatataatctgtatgggcaactttggtgtgactgacagtctgctgaaaactgttgatcttgtttttgggtttcagctttcaccatagttgcctggaagcttgaaatatattatgcgctctatcaatgtcatgtgaactttgtcatgtaccttc

SEQ ID NO: 4032 - protein, 257 aa, Zea mays subsp. mays
  peptide (1)..(257): Ceres Seq. ID no. 12409998
  misc_feature (24)..(256): Homolog of NCBI NO: 18398810 NR Description: expressed protein
  misc_feature (15)..(256): Homolog of NCBI NO: 34897094 NR Description: unknown protein [Oryza sativa (japonica
  misc_feature (8)..(248): Homolog of NCBI NO: 15234108 NR Description: hypothetical protein; protein id: At4g01230.1
  misc_feature (1)..(255): Homolog of NCBI NO: 18406991 NR Description: expressed protein
  misc_feature (3)..(250): Homolog of NCBI NO: 15222616 NR Description: hypothetical protein
  misc_feature (3)..(256): Homolog of NCBI NO: 15238125 NR Description: putative protein
  misc_feature (11)..(256): Homolog of NCBI NO: 15237093 NR Description: putative protein
  misc_feature (1)..(257): Homolog of NCBI NO: 34904202 NR Description: P0492F05.25 [Oryza sativa (japonica
  misc_feature (11)..(256): Homolog of NCBI NO: 15236556 NR Description: putative protein
  misc_feature (1)..(257): Homolog of NCBI NO: 34909318 NR Description: OSJNBb0021A09.5 [Oryza sativa (japonica
MADHKEEPVPESVMDKITEKFHGGDSSSSSSDSDDEKKGSSLASAAEAMKAKIYRLFGRERPVHSVLGGGKPADLILWRNRKISGGVLAGATAIWLLFEVMEYHLLTLVCHCLILSLAILFLWSNASTFINKSPPNIPEVKIPEDVAVNVALSLRYEINRGFATLREIGHGRDLKKFLIVIAGLWLLSVLGSCCNFLTLFYIVFVALYTVPVLYEKYEDKVDAFGEKAMTELKKYYAIFDEKCLSKIPKGPLKDKKH

SEQ ID NO: 4033 - protein, 244 aa, Zea mays subsp. mays
  peptide (1)..(244): Ceres Seq. ID no. 12409999
  misc_feature (11)..(243): Homolog of NCBI NO: 18398810 NR Description: expressed protein
  misc_feature (2)..(243): Homolog of NCBI NO: 34897094 NR Description: unknown protein [Oryza sativa (japonica
  misc_feature (1)..(235): Homolog of NCBI NO: 15234108 NR Description: hypothetical protein; protein id: At4g01230.1
  misc_feature (1)..(242): Homolog of NCBI NO: 18406991 NR Description: expressed protein
  misc_feature (1)..(237): Homolog of NCBI NO: 15222616 NR Description: hypothetical protein
  misc_feature (1)..(243): Homolog of NCBI NO: 15238125 NR Description: putative protein
  misc_feature (1)..(243): Homolog of NCBI NO: 15237093 NR Description: putative protein
  misc_feature (1)..(244): Homolog of NCBI NO: 34904202 NR Description: P0492F05.25 [Oryza sativa (japonica
  misc_feature (1)..(243): Homolog of NCBI NO: 15236556 NR Description: putative protein
  misc_feature (1)..(244): Homolog of NCBI NO: 34909318 NR Description: OSJNBb0021A09.5 [Oryza sativa (japonica
MDKITEKFHGGDSSSSSSDSDDEKKGSSLASAAEAMKAKIYRLFGRERPVHSVLGGGKPADLILWRNRKISGGVLAGATAIWLLFEVMEYHLLTLVCHCLILSLAILFLWSNASTFINKSPPNIPEVKIPEDVAVNVALSLRYEINRGFATLREIGHGRDLKKFLIVIAGLWLLSVLGSCCNFLTLFYIVFVALYTVPVLYEKYEDKVDAFGEKAMTELKKYYAIFDEKCLSKIPKGPLKDKKH

SEQ ID NO: 4034 - protein, 209 aa, Zea mays subsp. mays
  peptide (1)..(209): Ceres Seq. ID no. 12410000
  misc_feature (1)..(208): Homolog of NCBI NO: 18398810 NR Description: expressed protein
  misc_feature (1)..(208): Homolog of NCBI NO: 34897094 NR Description: unknown protein [Oryza sativa (japonica
  misc_feature (1)..(200): Homolog of NCBI NO: 15234108 NR Description: hypothetical protein; protein id: At4g01230.1
  misc_feature (1)..(207): Homolog of NCBI NO: 18406991 NR Description: expressed protein
  misc_feature (1)..(202): Homolog of NCBI NO: 15222616 NR Description: hypothetical protein
  misc_feature (1)..(208): Homolog of NCBI NO: 15238125 NR Description: putative protein
  misc_feature (1)..(208): Homolog of NCBI NO: 15237093 NR Description: putative protein
  misc_feature (1)..(209): Homolog of NCBI NO: 34904202 NR Description: P0492F05.25 [Oryza sativa (japonica
  misc_feature (1)..(208): Homolog of NCBI NO: 15236556 NR Description: putative protein
  misc_feature (1)..(209): Homolog of NCBI NO: 34909318 NR Description: OSJNBb0021A09.5 [Oryza sativa (japonica
MKAKIYRLFGRERPVHSVLGGGKPADLILWRNRKISGGVLAGATAIWLLFEVMEYHLLTLVCHCLILSLAILFLWSNASTFINKSPPNIPEVKIPEDVAVNVALSLRYEINRGFATLREIGHGRDLKKFLIVIAGLWLLSVLGSCCNFLTLFYIVFVALYTVPVLYEKYEDKVDAFGEKAMTELKKYYAIFDEKCLSKIPKGPLKDKKH

SEQ ID NO: 4035 - DNA, 1811 bp, Zea mays subsp. mays
  misc_feature (1)..(1811): Ceres Seq. ID no. 12423991
  misc_feature: MA Experiment ID: 108527 Result: Down-regulated in Transcription
  misc_feature: MA Experiment 108527 PARAMETER Experiment Name: Zm_5mM_NO_P Parameter: Age (day) Value: 8
  misc_feature: MA Experiment 108527 PARAMETER Experiment Name: Zm_5mM_NO_P Parameter: Organism Value: Zea mays
  misc_feature: MA Experiment 108527 PARAMETER Experiment Name: Zm_5mM_NO_P Parameter: Plant Line Value: 35A19
  misc_feature: MA Experiment 108527 PARAMETER Experiment Name: Zm_5mM_NO_P Parameter: Timepoint (hr) Value: 6
  misc_feature: MA Experiment 108527 PARAMETER Experiment Name: Zm_5mM_NO_P Parameter: Tissue Value: Aerial
  misc_feature: MA Experiment 108527 PARAMETER Experiment Name: Zm_5mM_NO_P Parameter: Treatment Value: 5mM NO vs. No Treatment
  misc_feature: MA Experiment ID: 108528 Result: Down-regulated in Transcription
  misc_feature: MA Experiment 108528 PARAMETER Experiment Name: Zm_Imbibed_Seeds_P Parameter: Age (day) Value: 5 vs. 2
  misc_feature: MA Experiment 108528 PARAMETER Experiment Name: Zm_Imbibed_Seeds_P Parameter: Organism Value: Zea mays
  misc_feature: MA Experiment 108528 PARAMETER Experiment Name: Zm_Imbibed_Seeds_P Parameter: Plant Line Value: 35A19
  misc_feature: MA Experiment 108528 PARAMETER Experiment Name: Zm_Imbibed_Seeds_P Parameter: Tissue Value: Aerial vs. Embryo
  misc_feature: MA Experiment ID: 108530 Result: Down-regulated in Transcription
  misc_feature: MA Experiment 108530 PARAMETER Experiment Name: Zm_Imbibed_Seeds_P Parameter: Age (day) Value: 6 vs. 2
  misc_feature: MA Experiment 108530 PARAMETER Experiment Name: Zm_Imbibed_Seeds_P Parameter: Organism Value: Zea mays
  misc_feature: MA Experiment 108530 PARAMETER Experiment Name: Zm_Imbibed_Seeds_P Parameter: Plant Line Value: 35A19
  misc_feature: MA Experiment 108530 PARAMETER Experiment Name: Zm_Imbibed_Seeds_P Parameter: Tissue Value: Aerial vs. Embryo
  misc_feature: MA Experiment ID: 108688 Result: Down-regulated in Transcription
  misc_feature: MA Experiment 108688 PARAMETER Experiment Name: Zm_Embryos-Flowers__P Parameter: Tissue Value: Immature Flowers vs. Aerial+
  misc_feature: MA Experiment ID: 108689 Result: Up-regulated in Transcription
  misc_feature: MA Experiment 108689 PARAMETER Experiment Name: Zm_Drought_Roots_P Parameter: Age (day) Value: 9
  misc_feature: MA Experiment 108689 PARAMETER Experiment Name: Zm_Drought_Roots_P Parameter: Organism Value: Zea mays
  misc_feature: MA Experiment 108689 PARAMETER Experiment Name: Zm_Drought_Roots_P Parameter: Plant Line Value: 35A19
  misc_feature: MA Experiment 108689 PARAMETER Experiment Name: Zm_Drought_Roots_P Parameter: Timepoint (hr) Value: 24
  misc_feature: MA Experiment 108689 PARAMETER Experiment Name: Zm_Drought_Roots_P Parameter: Tissue Value: Roots
  misc_feature: MA Experiment 108689 PARAMETER Experiment Name: Zm_Drought_Roots_P Parameter: Treatment Value: Drought vs. No Drought
  misc_feature: MA Experiment ID: 20000535 Result: Up-regulated in Transcription
  misc_feature: MA Experiment 20000535 PARAMETER Experiment Name: Zm_Hybrid_Seed_Dev_P Parameter: DAP Value: 30 vs. 12
  misc_feature: MA Experiment 20000535 PARAMETER Experiment Name: Zm_Hybrid_Seed_Dev_P Parameter: Organism Value: Zea mays
  misc_feature: MA Experiment 20000535 PARAMETER Experiment Name: Zm_Hybrid_Seed_Dev_P Parameter: Plant Line Value: 35A19
  misc_feature: MA Experiment 20000535 PARAMETER Experiment Name: Zm_Hybrid_Seed_Dev_P Parameter: Tissue Value: Embryo vs. Unfert Floret
gcacgagaccattacctagaacatcctaatcgaaaaaatgacacgcgggcaccatatgccacctgccgtccctcgcccccaccggcaccgacccccgccttcttcaaaaactttattcgccgaaaccccttgccacctcgccgccaccgcccaacaaacaggcgcgacgacctctactctagcctcgtcgccaccgccgtcaccggtcaccgccgccatataagtaaacgctcgcctcgtcctcctcccagactcgccaccctccgcctccgacacatggcccagccgcacctcgtgctcccctcgccgaggcccctcctccccgccgccgccactccatcgcgccgcgccgtcgccgtccgcgcggcgctctccaccgcttcgccgcccgccaaggccgcggcgggagcggaggcggtgcggtcgatccgcgcgcgccagatcgtggacagccgcgggaaccccaccgtcgaggtcgacctcgtcgccggggacggacgcctccaccgctccgcggtgcccagcggggcgtccacggggatctacgaggcgctcgagctccgcgatggtgacaaggccgtgtacggcggcaagggcgttctccaagctgtgcgcaacatcaacgaggttatcgcgcctaagctcgtgggcgtcgatgtgaggaaccaaagtgatgttgatgcaatcatgctagacattgatggaactcagaacaaatccaagttgggtgccaatgctattctcggagtctccttgagtgtgtgtagggcaggcgctggcgcaaagggggttcctctgtataaacatattcaggagcttgcaggaattaaggagcctgtcatgcctgttcctgctttcaatgtaataaatggaggtagccatgctggcaacaatttggccatgcaggagttcatgcttttacctgttggagcagctacatttgctgaagctcttcgtatgggcagcgaagtttaccatgtcctgaagggcatcattaaggcaaaatatggtcaagatgcatgcaatgtcggagatgaaggaggttttgctcctaatgttcaagacaacagagagggtcttgtcttgcttatggatgccattgagaaggcaggctacactggaatgatcaaaattggaatggatgttgcggcatcagagttccttacaaaggatgggaactatgatctaaactttaagaatcagcctaatgatggagtccatgttctttcagcccagcatctgggtgatctgtacagagattttgtcaaggatttccctattgtatcaattgaggacccttttgatcaggatgactggagttcatgggcatcattgcagtcctcagttggtatccaaattgtgggtgatgatttacttgtcacaaacccaaaacgaattgcagacgctattgacaggaaggcttgcaatgctcttttactaaaggtcaaccagattggtactgtcactgaatcaattcaagctgccctggattcaaaagctgctggttggggtgtgatggtcagccacagaagtggtgaaaccgaagacaacttcatcgcagatttggctgttggcttagcaagtgggcagattaaaactggggctccatgccgcagcgagaggctggccaaatacaatcagcttctgcggattgaagaggggcttggcaacgtgcgctatgcaggggaggcattcaggtctccataagaaatagactttaaatcaccgcgcgtgtgtgagaaagtgccagctttatatggacaagactattcagagaggataatgaatgagagctaataatttttttacac

SEQ ID NO: 4036 - protein, 568 aa, Zea mays subsp. mays
  peptide (1)..(568): Ceres Seq. ID no. 12423992
  misc_feature (278)..(568): Pfam Name: Enolase, C-terminal TIM barrel domain Pfam Description: Enolase, C-terminal TIM barrel domain
  misc_feature (140)..(568): Homolog of NCBI NO: 15221107 NR Description: putative enolase; protein id: At1g74030.1, by cDNA: gi_14334609, supported by cDNA: gi_17065639 [Arabidopsis
  misc_feature (139)..(568): Homolog of NCBI NO: 1169533 NR Description: Enolase (2-phosphoglycerate dehydratase)
  misc_feature (140)..(568): Homolog of NCBI NO: 119354 NR Description: Enolase (2-phosphoglycerate dehydratase)
  misc_feature (140)..(568): Homolog of NCBI NO: 17536383 NR Description: Enolase (46.6 kD) [Caenorhabditis elegans]
  misc_feature (140)..(568): Homolog of NCBI NO: 21392248 NR Description: SD23356p [Drosophila melanogaster]
  misc_feature (140)..(568): Homolog of NCBI NO: 24580914 NR Description: Enolase CG17654-PB >gi|24580916|ref|NP_722722.1|
  misc_feature (140)..(568): Homolog of NCBI NO: 8919731 NR Description: enolase [Spinacia oleracea]
  misc_feature (140)..(568): Homolog of NCBI NO: 119351 NR Description: Enolase (2-phosphoglycerate dehydratase)
  misc_feature (139)..(568): Homolog of NCBI NO: 105934 NR Description: phosphopyruvate hydratase (EC 4.2.1.11) beta -
  misc_feature (137)..(568): Homolog of NCBI NO: 1169534 NR Description: Enolase (2-phosphoglycerate dehydratase)
ARDHYLEHPNRKNDTRAPYATCRPSPPPAPTPAFFKNFIRRNPLPPRRHRPTNRRDDLYSSLVATAVTGHRRHISKRSPRPPPRLATLRLRHMAQPHLVLPSPRPLLPAAATPSRRAVAVRAALSTASPPAKAAAGAEAVRSIRARQIVDSRGNPTVEVDLVAGDGRLHRSAVPSGASTGIYEALELRDGDKAVYGGKGVLQAVRNINEVIAPKLVGVDVRNQSDVDAIMLDIDGTQNKSKLGANAILGVSLSVCRAGAGAKGVPLYKHIQELAGIKEPVMPVPAFNVINGGSHAGNNLAMQEFMLLPVGAATFAEALRMGSEVYHVLKGIIKAKYGQDACNVGDEGGFAPNVQDNREGLVLLMDAIEKAGYTGMIKIGMDVAASEFLTKDGNYDLNFKNQPNDGVHVLSAQHLGDLYRDFVKDFPIVSIEDPFDQDDWSSWASLQSSVGIQIVGDDLLVTNPKRIADAIDRKACNALLLKVNQIGTVTESIQAALDSKAAGWGVMVSHRSGETEDNFIADLAVGLASGQIKTGAPCRSERLAKYNQLLRIEEGLGNVRYAGEAFRSP

SEQ ID NO: 4037 - protein, 476 aa, Zea mays subsp. mays
  peptide (1)..(476): Ceres Seq. ID no. 12423993
  misc_feature (186)..(476): Pfam Name: Enolase, C-terminal TIM barrel domain Pfam Description: Enolase, C-terminal TIM barrel domain
  misc_feature (48)..(476): Homolog of NCBI NO: 15221107 NR Description: putative enolase; protein id: At1g74030.1, by cDNA: gi_14334609, supported by cDNA: gi_17065639 [Arabidopsis
  misc_feature (47)..(476): Homolog of NCBI NO: 1169533 NR Description: Enolase (2-phosphoglycerate dehydratase)
  misc_feature (48)..(476): Homolog of NCBI NO: 119354 NR Description: Enolase (2-phosphoglycerate dehydratase)
  misc_feature (48)..(476): Homolog of NCBI NO: 17536383 NR Description: Enolase (46.6 kD) [Caenorhabditis elegans]
  misc_feature (48)..(476): Homolog of NCBI NO: 21392248 NR Description: SD23356p [Drosophila melanogaster]
  misc_feature (48)..(476): Homolog of NCBI NO: 24580914 NR Description: Enolase CG17654-PB >gi|24580916|ref|NP_722722.1|
  misc_feature (48)..(476): Homolog of NCBI NO: 8919731 NR Description: enolase [Spinacia oleracea]
  misc_feature (48)..(476): Homolog of NCBI NO: 119351 NR Description: Enolase (2-phosphoglycerate dehydratase)
  misc_feature (47)..(476): Homolog of NCBI NO: 105934 NR Description: phosphopyruvate hydratase (EC 4.2.1.11) beta -
  misc_feature (45)..(476): Homolog of NCBI NO: 1169534 NR Description: Enolase (2-phosphoglycerate dehydratase)
MAQPHLVLPSPRPLLPAAATPSRRAVAVRAALSTASPPAKAAAGAEAVRSIRARQIVDSRGNPTVEVDLVAGDGRLHRSAVPSGASTGIYEALELRDGDKAVYGGKGVLQAVRNINEVIAPKLVGVDVRNQSDVDAIMLDIDGTQNKSKLGANAILGVSLSVCRAGAGAKGVPLYKHIQELAGIKEPVMPVPAFNVINGGSHAGNNLAMQEFMLLPVGAATFAEALRMGSEVYHVLKGIIKAKYGQDACNVGDEGGFAPNVQDNREGLVLLMDAIEKAGYTGMIKIGMDVAASEFLTKDGNYDLNFKNQPNDGVHVLSAQHLGDLYRDFVKDFPIVSIEDPFDQDDWSSWASLQSSVGIQIVGDDLLVTNPKRIADAIDRKACNALLLKVNQIGTVTESIQAALDSKAAGWGVMVSHRSGETEDNFIADLAVGLASGQIKTGAPCRSERLAKYNQLLRIEEGLGNVRYAGEAFRSP

SEQ ID NO: 4038 - protein, 339 aa, Zea mays subsp. mays
  peptide (1)..(339): Ceres Seq. ID no. 12423994
  misc_feature (49)..(339): Pfam Name: Enolase, C-terminal TIM barrel domain Pfam Description: Enolase, C-terminal TIM barrel domain
  misc_feature (1)..(339): Homolog of NCBI NO: 15221107 NR Description: putative enolase; protein id: At1g74030.1, by cDNA: gi_14334609, supported by cDNA: gi_17065639 [Arabidopsis
  misc_feature (1)..(339): Homolog of NCBI NO: 1169533 NR Description: Enolase (2-phosphoglycerate dehydratase)
  misc_feature (1)..(339): Homolog of NCBI NO: 119354 NR Description: Enolase (2-phosphoglycerate dehydratase)
  misc_feature (1)..(339): Homolog of NCBI NO: 17536383 NR Description: Enolase (46.6 kD) [Caenorhabditis elegans]
  misc_feature (1)..(339): Homolog of NCBI NO: 21392248 NR Description: SD23356p [Drosophila melanogaster]
  misc_feature (1)..(339): Homolog of NCBI NO: 24580914 NR Description: Enolase CG17654-PB >gi|24580916|ref|NP_722722.1|
  misc_feature (1)..(339): Homolog of NCBI NO: 8919731 NR Description: enolase [Spinacia oleracea]
  misc_feature (1)..(339): Homolog of NCBI NO: 119351 NR Description: Enolase (2-phosphoglycerate dehydratase)
  misc_feature (1)..(339): Homolog of NCBI NO: 105934 NR Description: phosphopyruvate hydratase (EC 4.2.1.11) beta -
  misc_feature (1)..(339): Homolog of NCBI NO: 1169534 NR Description: Enolase (2-phosphoglycerate dehydratase)
MLDIDGTQNKSKLGANAILGVSLSVCRAGAGAKGVPLYKHIQELAGIKEPVMPVPAFNVINGGSHAGNNLAMQEFMLLPVGAATFAEALRMGSEVYHVLKGIIKAKYGQDACNVGDEGGFAPNVQDNREGLVLLMDAIEKAGYTGMIKIGMDVAASEFLTKDGNYDLNFKNQPNDGVHVLSAQHLGDLYRDFVKDFPIVSIEDPFDQDDWSSWASLQSSVGIQIVGDDLLVTNPKRIADAIDRKACNALLLKVNQIGTVTESIQAALDSKAAGWGVMVSHRSGETEDNFIADLAVGLASGQIKTGAPCRSERLAKYNQLLRIEEGLGNVRYAGEAFRSP

SEQ ID NO: 4039 - DNA, 1191 bp, Zea mays subsp. mays
  misc_feature (1)..(1191): Ceres Seq. ID no. 12409992
  misc_feature: MA Experiment ID: 108528 Result: Up-regulated in Transcription
  misc_feature: MA Experiment 108528 PARAMETER Experiment Name: Zm_Imbibed_Seeds_P Parameter: Age (day) Value: 5 vs. 2
  misc_feature: MA Experiment 108528 PARAMETER Experiment Name: Zm_Imbibed_Seeds_P Parameter: Organism Value: Zea mays
  misc_feature: MA Experiment 108528 PARAMETER Experiment Name: Zm_Imbibed_Seeds_P Parameter: Plant Line Value: 35A19
  misc_feature: MA Experiment 108528 PARAMETER Experiment Name: Zm_Imbibed_Seeds_P Parameter: Tissue Value: Aerial vs. Embryo
  misc_feature: MA Experiment ID: 108530 Result: Up-regulated in Transcription
  misc_feature: MA Experiment 108530 PARAMETER Experiment Name: Zm_Imbibed_Seeds_P Parameter: Age (day) Value: 6 vs. 2
  misc_feature: MA Experiment 108530 PARAMETER Experiment Name: Zm_Imbibed_Seeds_P Parameter: Organism Value: Zea mays
  misc_feature: MA Experiment 108530 PARAMETER Experiment Name: Zm_Imbibed_Seeds_P Parameter: Plant Line Value: 35A19
  misc_feature: MA Experiment 108530 PARAMETER Experiment Name: Zm_Imbibed_Seeds_P Parameter: Tissue Value: Aerial vs. Embryo
  misc_feature: MA Experiment ID: 108545 Result: Up-regulated in Transcription
  misc_feature: MA Experiment 108545 PARAMETER Experiment Name: Zm_Imbibed_Seeds_P Parameter: Age (day) Value: 3 vs. 2
  misc_feature: MA Experiment 108545 PARAMETER Experiment Name: Zm_Imbibed_Seeds_P Parameter: Organism Value: Zea mays
  misc_feature: MA Experiment 108545 PARAMETER Experiment Name: Zm_Imbibed_Seeds_P Parameter: Plant Line Value: 35A19
  misc_feature: MA Experiment 108545 PARAMETER Experiment Name: Zm_Imbibed_Seeds_P Parameter: Tissue Value: Aerial vs. Embryo
  misc_feature: MA Experiment ID: 108547 Result: Up-regulated in Transcription
  misc_feature: MA Experiment 108547 PARAMETER Experiment Name: Zm_Imbibed_Seeds_P Parameter: Age (day) Value: 4 vs. 2
  misc_feature: MA Experiment 108547 PARAMETER Experiment Name: Zm_Imbibed_Seeds_P Parameter: Organism Value: Zea mays
  misc_feature: MA Experiment 108547 PARAMETER Experiment Name: Zm_Imbibed_Seeds_P Parameter: Plant Line Value: 35A19
  misc_feature: MA Experiment 108547 PARAMETER Experiment Name: Zm_Imbibed_Seeds_P Parameter: Tissue Value: Aerial vs. Embryo
  misc_feature: MA Experiment ID: 20000488 Result: Up-regulated in Transcription
  misc_feature: MA Experiment 20000488 PARAMETER Experiment Name: Zm_50mM_NH4NO3_L_to_H_P Parameter: Organism Value: Zea mays
  misc_feature: MA Experiment 20000488 PARAMETER Experiment Name: Zm_50mM_NH4NO3_L_to_H_P Parameter: Timepoint (hr) Value: 8
  misc_feature: MA Experiment 20000488 PARAMETER Experiment Name: Zm_50mM_NH4NO3_L_to_H_P Parameter: Tissue Value: Leaves
  misc_feature: MA Experiment 20000488 PARAMETER Experiment Name: Zm_50mM_NH4NO3_L_to_H_P Parameter: Treatment Value: 50mM NH4NO3 vs. 100mM Mannitol
  misc_feature: MA Experiment ID: 20000492 Result: Up-regulated in Transcription
  misc_feature: MA Experiment 20000492 PARAMETER Experiment Name: Zm_Hybrid_Seed_Dev_P Parameter: DAP Value: 12
  misc_feature: MA Experiment 20000492 PARAMETER Experiment Name: Zm_Hybrid_Seed_Dev_P Parameter: Organism Value: Zea mays
  misc_feature: MA Experiment 20000492 PARAMETER Experiment Name: Zm_Hybrid_Seed_Dev_P Parameter: Plant Line Value: 35A19
  misc_feature: MA Experiment 20000492 PARAMETER Experiment Name: Zm_Hybrid_Seed_Dev_P Parameter: Tissue Value: Fert Kernel vs. Unfert Floret
  misc_feature: MA Experiment ID: 20001606 Result: Up-regulated in Transcription
  misc_feature: MA Experiment 20001606 PARAMETER Experiment Name: Zm_50ppm_KNO3_L-to-H_P Parameter: Age (day) Value: 19
  misc_feature: MA Experiment 20001606 PARAMETER Experiment Name: Zm_50ppm_KNO3_L-to-H_P Parameter: Organism Value: Zea mays
  misc_feature: MA Experiment 20001606 PARAMETER Experiment Name: Zm_50ppm_KNO3_L-to-H_P Parameter: Plant Line Value: 35A19
  misc_feature: MA Experiment 20001606 PARAMETER Experiment Name: Zm_50ppm_KNO3_L-to-H_P Parameter: Timepoint (hr) Value: 8
  misc_feature: MA Experiment 20001606 PARAMETER Experiment Name: Zm_50ppm_KNO3_L-to-H_P Parameter: Tissue Value: Shoots
  misc_feature: MA Experiment 20001606 PARAMETER Experiment Name: Zm_50ppm_KNO3_L-to-H_P Parameter: Treatment Value: 50ppm KNO3 vs. 50ppm KCl
  misc_feature: MA Experiment ID: 20001608 Result: Up-regulated in Transcription
  misc_feature: MA Experiment 20001608 PARAMETER Experiment Name: Zm_50ppm_KNO3_L-to-H_P Parameter: Age (day) Value: 21
  misc_feature: MA Experiment 20001608 PARAMETER Experiment Name: Zm_50ppm_KNO3_L-to-H_P Parameter: Organism Value: Zea mays
  misc_feature: MA Experiment 20001608 PARAMETER Experiment Name: Zm_50ppm_KNO3_L-to-H_P Parameter: Plant Line Value: 35A19
  misc_feature: MA Experiment 20001608 PARAMETER Experiment Name: Zm_50ppm_KNO3_L-to-H_P Parameter: Timepoint (hr) Value: 48
  misc_feature: MA Experiment 20001608 PARAMETER Experiment Name: Zm_50ppm_KNO3_L-to-H_P Parameter: Tissue Value: Shoots
  misc_feature: MA Experiment 20001608 PARAMETER Experiment Name: Zm_50ppm_KNO3_L-to-H_P Parameter: Treatment Value: 50ppm KNO3 vs. 50ppm KCl
attcattttttttcttttttggtattttccggacagtggagtggagggcgatagatagggcagcatggcggcaaccttctgcgctggacccgccgcatccgcgggcagtaaaccctagctccgccggctgccgaccccagaacctaactcgggctgccgtgctgtctgcttgctggcggcccagcaggccgactcccgctttcgtctccctccggcgccccaatgccgagctgcggccgctgcgcgtggccgccggctccggcgttgacccgaaggttgtcaacggggaagattttcctcccatgaaggacctaattcagctatacaggacagcttttctagaaggaaatgaggaggttcttggtgtagttgagaaggcaatcactgctgtggaaaaagagaagagtacgatagcttcccaatttgaaagtattacaaccgaaataacttctgggaaggaaaagtttattcgcttaaatgccgacctggagaatttccggaaacagactgaaaaggaccgtgcaaagttaacatcaaatatacgggtggaagttgttcagagtctgttacctctagttgatagttttgagaaaacgaatctagagaacaccccagagactgagaaggagcaaaagatcagcgcaagctatcaaggcatatacaagcagttagttgaaacactaagatatttgggtgtgggagttgtggaaacagttggcaagccatttgatccttcggtccatgaggccatctcacgagaagcatccatgcaattcaaggcagggattgtcatgcatgaagtccgcagagggttccatttgaaggagaggctgctaaggcctgctactgtgaaggtctctactggctctggcaaacaaagtgcaagctcataggcgggggacaaagatgctgctttgtgaatctgatcaaacgaccaacaggaactgataggcacacatttttctgttcataacatgccgaatgtgtttgatctcaaatgagacgggatcagctatgtatggtgttgacagggagcaccagcttgaagttttgctgttgcttgtaatctgctagaattttgtccaccagaagagagagaatgaaacattggacattcataccggatttatattgagttccttgctcacttcattggacatccataccggatttatattgacttccttgccc

SEQ ID NO: 4040 - protein, 296 aa, Zea mays subsp. mays
  peptide (1)..(296): Ceres Seq. ID no. 12409993
  misc_feature (132)..(286): Pfam Name: GrpE Pfam Description: GrpE
  misc_feature (110)..(286): Homolog of NCBI NO: 17229937 NR Description: heat shock protein [Nostoc sp. PCC 7120]
  misc_feature (124)..(296): Homolog of NCBI NO: 33862294 NR Description: Heat shock protein GrpE [Prochlorococcus marinus
  misc_feature (116)..(296): Homolog of NCBI NO: 33860576 NR Description: Heat shock protein GrpE
  misc_feature (143)..(296): Homolog of NCBI NO: 22298857 NR Description: heat shock protein [Thermosynechococcus elongatus
  misc_feature (120)..(296): Homolog of NCBI NO: 15384279 NR Description: co-chaperone CGE1 precursor isoform b
  misc_feature (45)..(296): Homolog of NCBI NO: 15384277 NR Description: co-chaperone CGE1 precursor isoform a
  misc_feature (104)..(296): Homolog of NCBI NO: 30686476 NR Description: chloroplast GrpE protein [Arabidopsis thaliana]
  misc_feature (104)..(296): Homolog of NCBI NO: 18418410 NR Description: chloroplast GrpE protein
  misc_feature (35)..(296): Homolog of NCBI NO: 21593629 NR Description: putative heat shock protein [Arabidopsis thaliana]
  misc_feature (35)..(296): Homolog of NCBI NO: 18400095 NR Description: putative heat shock protein
SFFFFFGIFRTVEWRAIDRAAWRQPSALDPPHPRAVNPSSAGCRPQNLTRAAVLSACWRPSRPTPAFVSLRRPNAELRPLRVAAGSGVDPKVVNGEDFPPMKDLIQLYRTAFLEGNEEVLGVVEKAITAVEKEKSTIASQFESITTEITSGKEKFIRLNADLENFRKQTEKDRAKLTSNIRVEVVQSLLPLVDSFEKTNLENTPETEKEQKISASYQGIYKQLVETLRYLGVGVVETVGKPFDPSVHEAISREASMQFKAGIVMHEVRRGFHLKERLLRPATVKVSTGSGKQSASS

SEQ ID NO: 4041 - protein, 196 aa, Zea mays subsp. mays
  peptide (1)..(196): Ceres Seq. ID no. 12409994
  misc_feature (32)..(186): Pfam Name: GrpE Pfam Description: GrpE
  misc_feature (10)..(186): Homolog of NCBI NO: 17229937 NR Description: heat shock protein [Nostoc sp. PCC 7120]
  misc_feature (24)..(196): Homolog of NCBI NO: 33862294 NR Description: Heat shock protein GrpE [Prochlorococcus marinus
  misc_feature (16)..(196): Homolog of NCBI NO: 33860576 NR Description: Heat shock protein GrpE
  misc_feature (43)..(196): Homolog of NCBI NO: 22298857 NR Description: heat shock protein [Thermosynechococcus elongatus
  misc_feature (20)..(196): Homolog of NCBI NO: 15384279 NR Description: co-chaperone CGE1 precursor isoform b
  misc_feature (1)..(196): Homolog of NCBI NO: 15384277 NR Description: co-chaperone CGE1 precursor isoform a
  misc_feature (4)..(196): Homolog of NCBI NO: 30686476 NR Description: chloroplast GrpE protein [Arabidopsis thaliana]
  misc_feature (4)..(196): Homolog of NCBI NO: 18418410 NR Description: chloroplast GrpE protein
  misc_feature (1)..(196): Homolog of NCBI NO: 21593629 NR Description: putative heat shock protein [Arabidopsis thaliana]
  misc_feature (1)..(196): Homolog of NCBI NO: 18400095 NR Description: putative heat shock protein
MKDLIQLYRTAFLEGNEEVLGVVEKAITAVEKEKSTIASQFESITTEITSGKEKFIRLNADLENFRKQTEKDRAKLTSNIRVEVVQSLLPLVDSFEKTNLENTPETEKEQKISASYQGIYKQLVETLRYLGVGVVETVGKPFDPSVHEAISREASMQFKAGIVMHEVRRGFHLKERLLRPATVKVSTGSGKQSASS

SEQ ID NO: 4042 - DNA, 1864 bp, Zea mays subsp. mays
  misc_feature (1)..(1864): Ceres Seq. ID no. 12405693
  misc_feature: MA Experiment ID: 108504 Result: Down-regulated in Transcription
  misc_feature: MA Experiment 108504 PARAMETER Experiment Name: Zm_Drought_P Parameter: Age (day) Value: 8
  misc_feature: MA Experiment 108504 PARAMETER Experiment Name: Zm_Drought_P Parameter: Organism Value: Zea mays
  misc_feature: MA Experiment 108504 PARAMETER Experiment Name: Zm_Drought_P Parameter: Plant Line Value: 35A19
  misc_feature: MA Experiment 108504 PARAMETER Experiment Name: Zm_Drought_P Parameter: Timepoint (hr) Value: 12
  misc_feature: MA Experiment 108504 PARAMETER Experiment Name: Zm_Drought_P Parameter: Tissue Value: Aerial
  misc_feature: MA Experiment 108504 PARAMETER Experiment Name: Zm_Drought_P Parameter: Treatment Value: Drought vs. No Drought
  misc_feature: MA Experiment ID: 108513 Result: Down-regulated in Transcription
  misc_feature: MA Experiment 108513 PARAMETER Experiment Name: Zm_100uM_ABA_P Parameter: Age (day) Value: 8
  misc_feature: MA Experiment 108513 PARAMETER Experiment Name: Zm_100uM_ABA_P Parameter: Organism Value: Zea mays
  misc_feature: MA Experiment 108513 PARAMETER Experiment Name: Zm_100uM_ABA_P Parameter: Plant Line Value: 35A19
  misc_feature: MA Experiment 108513 PARAMETER Experiment Name: Zm_100uM_ABA_P Parameter: Timepoint (hr) Value: 6
  misc_feature: MA Experiment 108513 PARAMETER Experiment Name: Zm_100uM_ABA_P Parameter: Tissue Value: Aerial
  misc_feature: MA Experiment 108513 PARAMETER Experiment Name: Zm_100uM_ABA_P Parameter: Treatment Value: 100uM ABA vs. No Treatment
  misc_feature: MA Experiment ID: 108515 Result: Down-regulated in Transcription
  misc_feature: MA Experiment 108515 PARAMETER Experiment Name: Zm_2mM_SA_P Parameter: Age (day) Value: 8
  misc_feature: MA Experiment 108515 PARAMETER Experiment Name: Zm_2mM_SA_P Parameter: Organism Value: Zea mays
  misc_feature: MA Experiment 108515 PARAMETER Experiment Name: Zm_2mM_SA_P Parameter: Plant Line Value: 35A19
  misc_feature: MA Experiment 108515 PARAMETER Experiment Name: Zm_2mM_SA_P Parameter: Timepoint (hr) Value: 12
  misc_feature: MA Experiment 108515 PARAMETER Experiment Name: Zm_2mM_SA_P Parameter: Tissue Value: Aerial
  misc_feature: MA Experiment 108515 PARAMETER Experiment Name: Zm_2mM_SA_P Parameter: Treatment Value: 2mM SA vs. No Treatment
  misc_feature: MA Experiment ID: 108527 Result: Down-regulated in Transcription
  misc_feature: MA Experiment 108527 PARAMETER Experiment Name: Zm_5mM_NO_P Parameter: Age (day) Value: 8
  misc_feature: MA Experiment 108527 PARAMETER Experiment Name: Zm_5mM_NO_P Parameter: Organism Value: Zea mays
  misc_feature: MA Experiment 108527 PARAMETER Experiment Name: Zm_5mM_NO_P Parameter: Plant Line Value: 35A19
  misc_feature: MA Experiment 108527 PARAMETER Experiment Name: Zm_5mM_NO_P Parameter: Timepoint (hr) Value: 6
  misc_feature: MA Experiment 108527 PARAMETER Experiment Name: Zm_5mM_NO_P Parameter: Tissue Value: Aerial
  misc_feature: MA Experiment 108527 PARAMETER Experiment Name: Zm_5mM_NO_P Parameter: Treatment Value: 5mM NO vs. No Treatment
  misc_feature: MA Experiment ID: 108528 Result: Up-regulated in Transcription
  misc_feature: MA Experiment 108528 PARAMETER Experiment Name: Zm_Imbibed_Seeds_P Parameter: Age (day) Value: 5 vs. 2
  misc_feature: MA Experiment 108528 PARAMETER Experiment Name: Zm_Imbibed_Seeds_P Parameter: Organism Value: Zea mays
  misc_feature: MA Experiment 108528 PARAMETER Experiment Name: Zm_Imbibed_Seeds_P Parameter: Plant Line Value: 35A19
  misc_feature: MA Experiment 108528 PARAMETER Experiment Name: Zm_Imbibed_Seeds_P Parameter: Tissue Value: Aerial vs. Embryo
  misc_feature: MA Experiment ID: 108529 Result: Up-regulated in Transcription
  misc_feature: MA Experiment 108529 PARAMETER Experiment Name: Zm_Imbibed_Seeds_P Parameter: Age (day) Value: 5 vs. 2
  misc_feature: MA Experiment 108529 PARAMETER Experiment Name: Zm_Imbibed_Seeds_P Parameter: Organism Value: Zea mays
  misc_feature: MA Experiment 108529 PARAMETER Experiment Name: Zm_Imbibed_Seeds_P Parameter: Plant Line Value: 35A19
  misc_feature: MA Experiment 108529 PARAMETER Experiment Name: Zm_Imbibed_Seeds_P Parameter: Tissue Value: Roots vs. Embryo
  misc_feature: MA Experiment ID: 108530 Result: Up-regulated in Transcription
  misc_feature: MA Experiment 108530 PARAMETER Experiment Name: Zm_Imbibed_Seeds_P Parameter: Age (day) Value: 6 vs. 2
  misc_feature: MA Experiment 108530 PARAMETER Experiment Name: Zm_Imbibed_Seeds_P Parameter: Organism Value: Zea mays
  misc_feature: MA Experiment 108530 PARAMETER Experiment Name: Zm_Imbibed_Seeds_P Parameter: Plant Line Value: 35A19
  misc_feature: MA Experiment 108530 PARAMETER Experiment Name: Zm_Imbibed_Seeds_P Parameter: Tissue Value: Aerial vs. Embryo
  misc_feature: MA Experiment ID: 108534 Result: Up-regulated in Transcription
  misc_feature: MA Experiment 108534 PARAMETER Experiment Name: Zm_4deg_Cold_P Parameter: Age (hr) Value: 8
  misc_feature: MA Experiment 108534 PARAMETER Experiment Name: Zm_4deg_Cold_P Parameter: Organism Value: Zea mays
  misc_feature: MA Experiment 108534 PARAMETER Experiment Name: Zm_4deg_Cold_P Parameter: Plant Line Value: 35A19
  misc_feature: MA Experiment 108534 PARAMETER Experiment Name: Zm_4deg_Cold_P Parameter: Temperature (deg C) Value: 4 vs. 22
  misc_feature: MA Experiment 108534 PARAMETER Experiment Name: Zm_4deg_Cold_P Parameter: Timepoint (hr) Value: 6
  misc_feature: MA Experiment 108534 PARAMETER Experiment Name: Zm_4deg_Cold_P Parameter: Tissue Value: Aerial
  misc_feature: MA Experiment ID: 108535 Result: Down-regulated in Transcription
  misc_feature: MA Experiment 108535 PARAMETER Experiment Name: Zm_Meristem_P Parameter: Age (day) Value: 8
  misc_feature: MA Experiment 108535 PARAMETER Experiment Name: Zm_Meristem_P Parameter: Organism Value: Zea mays
  misc_feature: MA Experiment 108535 PARAMETER Experiment Name: Zm_Meristem_P Parameter: Plant Line Value: 35A19
  misc_feature: MA Experiment 108535 PARAMETER Experiment Name: Zm_Meristem_P Parameter: Tissue Value: Root Meristem vs. Above Root Meristem
  misc_feature: MA Experiment ID: 108540 Result: Down-regulated in Transcription
  misc_feature: MA Experiment 108540 PARAMETER Experiment Name: Zm_20percent_PEG_P Parameter: Age (day) Value: 8
  misc_feature: MA Experiment 108540 PARAMETER Experiment Name: Zm_20percent_PEG_P Parameter: Organism Value: Zea mays
  misc_feature: MA Experiment 108540 PARAMETER Experiment Name: Zm_20percent_PEG_P Parameter: Plant Line Value: 35A19
  misc_feature: MA Experiment 108540 PARAMETER Experiment Name: Zm_20percent_PEG_P Parameter: Timepoint (hr) Value: 6
  misc_feature: MA Experiment 108540 PARAMETER Experiment Name: Zm_20percent_PEG_P Parameter: Tissue Value: Aerial
  misc_feature: MA Experiment 108540 PARAMETER Experiment Name: Zm_20percent_PEG_P Parameter: Treatment Value: 20percent PEG vs. No Treatment
  misc_feature: MA Experiment ID: 108542 Result: Down-regulated in Transcription
  misc_feature: MA Experiment 108542 PARAMETER Experiment Name: Zm_150mM_NaCl_P Parameter: Age (day) Value: 8
  misc_feature: MA Experiment 108542 PARAMETER Experiment Name: Zm_150mM_NaCl_P Parameter: Organism Value: Zea mays
  misc_feature: MA Experiment 108542 PARAMETER Experiment Name: Zm_150mM_NaCl_P Parameter: Plant Line Value: 35A19
  misc_feature: MA Experiment 108542 PARAMETER Experiment Name: Zm_150mM_NaCl_P Parameter: Timepoint (hr) Value: 6
  misc_feature: MA Experiment 108542 PARAMETER Experiment Name: Zm_150mM_NaCl_P Parameter: Tissue Value: Aerial
  misc_feature: MA Experiment 108542 PARAMETER Experiment Name: Zm_150mM_NaCl_P Parameter: Treatment Value: 150mM NaCl vs. No Treatment
  misc_feature: MA Experiment ID: 108544 Result: Down-regulated in Transcription
  misc_feature: MA Experiment ID: 108545 Result: Up-regulated in Transcription
  misc_feature: MA Experiment 108545 PARAMETER Experiment Name: Zm_Imbibed_Seeds_P Parameter: Age (day) Value: 3 vs. 2
  misc_feature: MA Experiment 108545 PARAMETER Experiment Name: Zm_Imbibed_Seeds_P Parameter: Organism Value: Zea mays
  misc_feature: MA Experiment 108545 PARAMETER Experiment Name: Zm_Imbibed_Seeds_P Parameter: Plant Line Value: 35A19
  misc_feature: MA Experiment 108545 PARAMETER Experiment Name: Zm_Imbibed_Seeds_P Parameter: Tissue Value: Aerial vs. Embryo
  misc_feature: MA Experiment ID: 108546 Result: Up-regulated in Transcription
  misc_feature: MA Experiment 108546 PARAMETER Experiment Name: Zm_Imbibed_Seeds_P Parameter: Age (day) Value: 3 vs. 2
  misc_feature: MA Experiment 108546 PARAMETER Experiment Name: Zm_Imbibed_Seeds_P Parameter: Organism Value: Zea mays
  misc_feature: MA Experiment 108546 PARAMETER Experiment Name: Zm_Imbibed_Seeds_P Parameter: Plant Line Value: 35A19
  misc_feature: MA Experiment 108546 PARAMETER Experiment Name: Zm_Imbibed_Seeds_P Parameter: Tissue Value: Roots vs. Embryo
  misc_feature: MA Experiment ID: 108547 Result: Up-regulated in Transcription
  misc_feature: MA Experiment 108547 PARAMETER Experiment Name: Zm_Imbibed_Seeds_P Parameter: Age (day) Value: 4 vs. 2
  misc_feature: MA Experiment 108547 PARAMETER Experiment Name: Zm_Imbibed_Seeds_P Parameter: Organism Value: Zea mays
  misc_feature: MA Experiment 108547 PARAMETER Experiment Name: Zm_Imbibed_Seeds_P Parameter: Plant Line Value: 35A19
  misc_feature: MA Experiment 108547 PARAMETER Experiment Name: Zm_Imbibed_Seeds_P Parameter: Tissue Value: Aerial vs. Embryo
  misc_feature: MA Experiment ID: 108556 Result: Down-regulated in Transcription
  misc_feature: MA Experiment 108556 PARAMETER Experiment Name: Zm_Drought_P Parameter: Age (day) Value: 9
  misc_feature: MA Experiment 108556 PARAMETER Experiment Name: Zm_Drought_P Parameter: Organism Value: Zea mays
  misc_feature: MA Experiment 108556 PARAMETER Experiment Name: Zm_Drought_P Parameter: Plant Line Value: 35A19
  misc_feature: MA Experiment 108556 PARAMETER Experiment Name: Zm_Drought_P Parameter: Timepoint (hr) Value: 24
  misc_feature: MA Experiment 108556 PARAMETER Experiment Name: Zm_Drought_P Parameter: Tissue Value: Aerial
  misc_feature: MA Experiment 108556 PARAMETER Experiment Name: Zm_Drought_P Parameter: Treatment Value: Drought vs. No Drought
  misc_feature: MA Experiment ID: 108559 Result: Down-regulated in Transcription
  misc_feature: MA Experiment 108559 PARAMETER Experiment Name: Zm_5mM_NO_P Parameter: Age (day) Value: 8
  misc_feature: MA Experiment 108559 PARAMETER Experiment Name: Zm_5mM_NO_P Parameter: Organism Value: Zea mays
  misc_feature: MA Experiment 108559 PARAMETER Experiment Name: Zm_5mM_NO_P Parameter: Plant Line Value: 35A19
  misc_feature: MA Experiment 108559 PARAMETER Experiment Name: Zm_5mM_NO_P Parameter: Timepoint (hr) Value: 12
  misc_feature: MA Experiment 108559 PARAMETER Experiment Name: Zm_5mM_NO_P Parameter: Tissue Value: Aerial
  misc_feature: MA Experiment 108559 PARAMETER Experiment Name: Zm_5mM_NO_P Parameter: Treatment Value: 5mM NO vs. No Treatment
  misc_feature: MA Experiment ID: 108597 Result: Down-regulated in Transcription
  misc_feature: MA Experiment 108597 PARAMETER Experiment Name: Zm_100uM_ABA_P Parameter: Age (day) Value: 9
  misc_feature: MA Experiment 108597 PARAMETER Experiment Name: Zm_100uM_ABA_P Parameter: Organism Value: Zea mays
  misc_feature: MA Experiment 108597 PARAMETER Experiment Name: Zm_100uM_ABA_P Parameter: Plant Line Value: 35A19
  misc_feature: MA Experiment 108597 PARAMETER Experiment Name: Zm_100uM_ABA_P Parameter: Timepoint (hr) Value: 24
  misc_feature: MA Experiment 108597 PARAMETER Experiment Name: Zm_100uM_ABA_P Parameter: Tissue Value: Aerial
  misc_feature: MA Experiment 108597 PARAMETER Experiment Name: Zm_100uM_ABA_P Parameter: Treatment Value: 100uM ABA vs. No Treatment
  misc_feature: MA Experiment ID: 108687 Result: Down-regulated in Transcription
  misc_feature: MA Experiment 108687 PARAMETER Experiment Name: Zm_Embryos-Flowers__P Parameter: Tissue Value: Embryo vs. Aerial+
  misc_feature: MA Experiment ID: 20000477 Result: Down-regulated in Transcription
  misc_feature: MA Experiment 20000477 PARAMETER Experiment Name: Zm_5mM_SA_P Parameter: Age (day) Value: 10
  misc_feature: MA Experiment 20000477 PARAMETER Experiment Name: Zm_5mM_SA_P Parameter: Organism Value: Zea mays
  misc_feature: MA Experiment 20000477 PARAMETER Experiment Name: Zm_5mM_SA_P Parameter: Plant Line Value: 35A19
  misc_feature: MA Experiment 20000477 PARAMETER Experiment Name: Zm_5mM_SA_P Parameter: Timepoint (hr) Value: 48
  misc_feature: MA Experiment 20000477 PARAMETER Experiment Name: Zm_5mM_SA_P Parameter: Tissue Value: Aerial
  misc_feature: MA Experiment 20000477 PARAMETER Experiment Name: Zm_5mM_SA_P Parameter: Treatment Value: 5mM SA vs. No Treatment
  misc_feature: MA Experiment ID: 20000478 Result: Down-regulated in Transcription
  misc_feature: MA Experiment 20000478 PARAMETER Experiment Name: Zm_5mM_SA_P Parameter: Age (day) Value: 11
  misc_feature: MA Experiment 20000478 PARAMETER Experiment Name: Zm_5mM_SA_P Parameter: Organism Value: Zea mays
  misc_feature: MA Experiment 20000478 PARAMETER Experiment Name: Zm_5mM_SA_P Parameter: Plant Line Value: 35A19
  misc_feature: MA Experiment 20000478 PARAMETER Experiment Name: Zm_5mM_SA_P Parameter: Timepoint (hr) Value: 72
  misc_feature: MA Experiment 20000478 PARAMETER Experiment Name: Zm_5mM_SA_P Parameter: Tissue Value: Aerial
  misc_feature: MA Experiment 20000478 PARAMETER Experiment Name: Zm_5mM_SA_P Parameter: Treatment Value: 5mM SA vs. No Treatment
  misc_feature: MA Experiment ID: 20000480 Result: Down-regulated in Transcription
  misc_feature: MA Experiment 20000480 PARAMETER Experiment Name: Zm_Drought_P Parameter: Age (day) Value: 11
  misc_feature: MA Experiment 20000480 PARAMETER Experiment Name: Zm_Drought_P Parameter: Organism Value: Zea mays
  misc_feature: MA Experiment 20000480 PARAMETER Experiment Name: Zm_Drought_P Parameter: Plant Line Value: 35A19
  misc_feature: MA Experiment 20000480 PARAMETER Experiment Name: Zm_Drought_P Parameter: Timepoint (hr) Value: 72
  misc_feature: MA Experiment 20000480 PARAMETER Experiment Name: Zm_Drought_P Parameter: Tissue Value: Aerial
  misc_feature: MA Experiment 20000480 PARAMETER Experiment Name: Zm_Drought_P Parameter: Treatment Value: Drought vs. No Drought
  misc_feature: MA Experiment ID: 20000492 Result: Down-regulated in Transcription
  misc_feature: MA Experiment 20000492 PARAMETER Experiment Name: Zm_Hybrid_Seed_Dev_P Parameter: DAP Value: 12
  misc_feature: MA Experiment 20000492 PARAMETER Experiment Name: Zm_Hybrid_Seed_Dev_P Parameter: Organism Value: Zea mays
  misc_feature: MA Experiment 20000492 PARAMETER Experiment Name: Zm_Hybrid_Seed_Dev_P Parameter: Plant Line Value: 35A19
  misc_feature: MA Experiment 20000492 PARAMETER Experiment Name: Zm_Hybrid_Seed_Dev_P Parameter: Tissue Value: Fert Kernel vs. Unfert Floret
  misc_feature: MA Experiment ID: 20000534 Result: Down-regulated in Transcription
  misc_feature: MA Experiment 20000534 PARAMETER Experiment Name: Zm_Hybrid_Pollen_P Parameter: Age (day) Value: 8
  misc_feature: MA Experiment 20000534 PARAMETER Experiment Name: Zm_Hybrid_Pollen_P Parameter: Organism Value: Zea mays
  misc_feature: MA Experiment 20000534 PARAMETER Experiment Name: Zm_Hybrid_Pollen_P Parameter: Plant Line Value: 35A19
  misc_feature: MA Experiment 20000534 PARAMETER Experiment Name: Zm_Hybrid_Pollen_P Parameter: Tissue Value: Pollen vs. Aerial
  misc_feature: MA Experiment ID: 20000535 Result: Down-regulated in Transcription
  misc_feature: MA Experiment 20000535 PARAMETER Experiment Name: Zm_Hybrid_Seed_Dev_P Parameter: DAP Value: 30 vs. 12
  misc_feature: MA Experiment 20000535 PARAMETER Experiment Name: Zm_Hybrid_Seed_Dev_P Parameter: Organism Value: Zea mays
  misc_feature: MA Experiment 20000535 PARAMETER Experiment Name: Zm_Hybrid_Seed_Dev_P Parameter: Plant Line Value: 35A19
  misc_feature: MA Experiment 20000535 PARAMETER Experiment Name: Zm_Hybrid_Seed_Dev_P Parameter: Tissue Value: Embryo vs. Unfert Floret
  misc_feature: MA Experiment ID: 20001608 Result: Down-regulated in Transcription
  misc_feature: MA Experiment 20001608 PARAMETER Experiment Name: Zm_50ppm_KNO3_L-to-H_P Parameter: Age (day) Value: 21
  misc_feature: MA Experiment 20001608 PARAMETER Experiment Name: Zm_50ppm_KNO3_L-to-H_P Parameter: Organism Value: Zea mays
  misc_feature: MA Experiment 20001608 PARAMETER Experiment Name: Zm_50ppm_KNO3_L-to-H_P Parameter: Plant Line Value: 35A19
  misc_feature: MA Experiment 20001608 PARAMETER Experiment Name: Zm_50ppm_KNO3_L-to-H_P Parameter: Timepoint (hr) Value: 48
  misc_feature: MA Experiment 20001608 PARAMETER Experiment Name: Zm_50ppm_KNO3_L-to-H_P Parameter: Tissue Value: Shoots
  misc_feature: MA Experiment 20001608 PARAMETER Experiment Name: Zm_50ppm_KNO3_L-to-H_P Parameter: Treatment Value: 50ppm KNO3 vs. 50ppm KCl
aaccacgcctcgaaatataaccccccgccacaccgtacgagacgagggcagatatggaagctgatgctgctgctgccagtggcggcctggccctgctgcccgccgtgctgctcctcgtggcgctctccaccctcgtcttctccacatggagcaaccgcaacagcaggctgcccccgaggcccgatggccctcccgctgatcggacacctgcacctcatccgcccgccgccgcacagggccttcgaccgcatcctggcacgctacgggccgctcgtctacctccgcctcgggccctccacgcactgcgtcgtcgcgggcaccgcggacgcgcgcgggacctcctcaagcacgaggccagcatcccggagcggccgctcacggccgtcacgcgccacctcgcctacgacgacgccggcttcgccttcgcgccctacggcccgcactggcgcttcatgaagcgcctctgcatgtcggagctgctgggcccgcggaccgtggaccagctgcgccccgtgcgggaggccgagctggcggccgtgctggaggcggcgcgccaggcggccgccgctcgggagcccatcgacgtcagccgccacctcatcagcatgtccaacaacgccatcatgcgcatggtggccagcgcgctgccgggccacatgacggaggcggccagggactgcgccaagcacgtcgccgagctcgtgggggccttcaacgtcgaggactacgtcggcctctgccgcggctgggacctgcaggggctcacgcggaggacgcgcgaggtgcgtgacaagttcgacgcgctgctggagatcatgatcacgggcaaggaggagagtcgccgtcgtcgccacgccaccaccgacaccggcggcggcaccaaggacctgctggacatcctcatggacgcggcggaggacgccaacgccgaggtcaggctcaccagggagaacatcaaggcgttcgtcctcgacatcttcacggccggctccgacaccaccgccaccagcgtggagtggatgctggcgctgctcatcaaccacccggcctgcatggacaagctgcgcgcggagctggacgccgtggtgggcgcgtcgcgcctggtcggggagcaggacgtcccgcgccttccctacctgcaggccgtcttcaaggagacgctgcggctgcagccccccgcggtgttcgctcagcgggagaccatcgagccggtccacgtccgcggctacgtcatcccgcccaagacctccgtcttcttcaacatcttctccatcggccgcgacccggggctgctgggaggacccgctccagttccggcccgagcgcttcatgcccggcggcgccggcgccggccgtggaccccaaggggcagcacatgcagctcatgccgtttggaagcggccgccgcgcctgccccggcatgggcctagccatgcaggccgtgccggccttcctcgccgcgctggtgcagtgcttccactgggaggtgcccatcccgccgggccaatccactgcgccgcccttgtacatggaggaggcagcggggctcgtcaccgcccggaagaaccatctcctcctcatccccacaccgcgcctcaatccgctaccggcaagagcggctacgtagttagtacctgcgaatccagtctcagttcatcggtccatccaaattcagacgtgtcctccattattgcaagccgcgcactaagatcatatttctgtttgtttatatttctcggtcacacatacgtttgcaatcaccttcaggaaaagtgacctttgtacccgttcgatgttggtacatccagatccgtgtgctcaggaattacgtattactactatatatatactggtccgtttgagt

SEQ ID NO: 4043 - protein, 458 aa, Zea mays subsp. mays
  peptide (1)..(458): Ceres Seq. ID no. 12405694
  misc_feature (93)..(411): Pfam Name: Cytochrome P450 Pfam Description: Cytochrome P450
  misc_feature (93)..(428): Homolog of NCBI NO: 6118407 NR Description: flavone synthase II [Callistephus chinensis]
  misc_feature (93)..(411): Homolog of NCBI NO: 5081817 NR Description: flavone synthase II [Gerbera hybrida]
  misc_feature (93)..(425): Homolog of NCBI NO: 5832707 NR Description: cytochrome P450 [Antirrhinum majus]
  misc_feature (10)..(425): Homolog of NCBI NO: 38344759 NR Description: OSJNBa0068L06.2 [Oryza sativa (japonica
MEADAAAASGGLALLPAVLLLVALSTLVFSTWSNRNSRLPPRPDGPPADRTPAPHPPAAAQGLRPHPGTLRAARLPPPRALHALRRRGHRGRARDLLKHEASIPERPLTAVTRHLAYDDAGFAFAPYGPHWRFMKRLCMSELLGPRTVDQLRPVREAELAAVLEAARQAAAAREPIDVSRHLISMSNNAIMRMVASALPGHMTEAARDCAKHVAELVGAFNVEDYVGLCRGWDLQGLTRRTREVRDKFDALLEIMITGKEESRRRRHATTDTGGGTKDLLDILMDAAEDANAEVRLTRENIKAFVLDIFTAGSDTTATSVEWMLALLINHPACMDKLRAELDAVVGASRLVGEQDVPRLPYLQAVFKETLRLQPPAVFAQRETIEPVHVRGYVIPPKTSVFFNIFSIGRDPGLLGGPAPVPARALHARRRRRRPWTPRGSTCSSCRLEAAAAPAPAWA

SEQ ID NO: 4044 - protein, 325 aa, Zea mays subsp. mays
  peptide (1)..(325): Ceres Seq. ID no. 12405695
  misc_feature (1)..(278): Pfam Name: Cytochrome P450 Pfam Description: Cytochrome P450
  misc_feature (1)..(295): Homolog of NCBI NO: 6118407 NR Description: flavone synthase II [Callistephus chinensis]
  misc_feature (1)..(278): Homolog of NCBI NO: 5081817 NR Description: flavone synthase II [Gerbera hybrida]
  misc_feature (1)..(292): Homolog of NCBI NO: 5832707 NR Description: cytochrome P450 [Antirrhinum majus]
  misc_feature (1)..(292): Homolog of NCBI NO: 38344759 NR Description: OSJNBa0068L06.2 [Oryza sativa (japonica
MKRLCMSELLGPRTVDQLRPVREAELAAVLEAARQAAAAREPIDVSRHLISMSNNAIMRMVASALPGHMTEAARDCAKHVAELVGAFNVEDYVGLCRGWDLQGLTRRTREVRDKFDALLEIMITGKEESRRRRHATTDTGGGTKDLLDILMDAAEDANAEVRLTRENIKAFVLDIFTAGSDTTATSVEWMLALLINHPACMDKLRAELDAVVGASRLVGEQDVPRLPYLQAVFKETLRLQPPAVFAQRETIEPVHVRGYVIPPKTSVFFNIFSIGRDPGLLGGPAPVPARALHARRRRRRPWTPRGSTCSSCRLEAAAAPAPAWA

SEQ ID NO: 4045 - protein, 320 aa, Zea mays subsp. mays
  peptide (1)..(320): Ceres Seq. ID no. 12405696
  misc_feature (1)..(273): Pfam Name: Cytochrome P450 Pfam Description: Cytochrome P450
  misc_feature (1)..(290): Homolog of NCBI NO: 6118407 NR Description: flavone synthase II [Callistephus chinensis]
  misc_feature (1)..(273): Homolog of NCBI NO: 5081817 NR Description: flavone synthase II [Gerbera hybrida]
  misc_feature (1)..(287): Homolog of NCBI NO: 5832707 NR Description: cytochrome P450 [Antirrhinum majus]
  misc_feature (1)..(287): Homolog of NCBI NO: 38344759 NR Description: OSJNBa0068L06.2 [Oryza sativa (japonica
MSELLGPRTVDQLRPVREAELAAVLEAARQAAAAREPIDVSRHLISMSNNAIMRMVASALPGHMTEAARDCAKHVAELVGAFNVEDYVGLCRGWDLQGLTRRTREVRDKFDALLEIMITGKEESRRRRHATTDTGGGTKDLLDILMDAAEDANAEVRLTRENIKAFVLDIFTAGSDTTATSVEWMLALLINHPACMDKLRAELDAVVGASRLVGEQDVPRLPYLQAVFKETLRLQPPAVFAQRETIEPVHVRGYVIPPKTSVFFNIFSIGRDPGLLGGPAPVPARALHARRRRRRPWTPRGSTCSSCRLEAAAAPAPAWA

SEQ ID NO: 4046 - DNA, 1723 bp, Zea mays subsp. mays
  misc_feature (1)..(1723): Ceres Seq. ID no. 12376740
  misc_feature: MA Experiment ID: 108527 Result: Down-regulated in Transcription
  misc_feature: MA Experiment 108527 PARAMETER Experiment Name: Zm_5mM_NO_P Parameter: Age (day) Value: 8
  misc_feature: MA Experiment 108527 PARAMETER Experiment Name: Zm_5mM_NO_P Parameter: Organism Value: Zea mays
  misc_feature: MA Experiment 108527 PARAMETER Experiment Name: Zm_5mM_NO_P Parameter: Plant Line Value: 35A19
  misc_feature: MA Experiment 108527 PARAMETER Experiment Name: Zm_5mM_NO_P Parameter: Timepoint (hr) Value: 6
  misc_feature: MA Experiment 108527 PARAMETER Experiment Name: Zm_5mM_NO_P Parameter: Tissue Value: Aerial
  misc_feature: MA Experiment 108527 PARAMETER Experiment Name: Zm_5mM_NO_P Parameter: Treatment Value: 5mM NO vs. No Treatment
  misc_feature: MA Experiment ID: 108528 Result: Up-regulated in Transcription
  misc_feature: MA Experiment 108528 PARAMETER Experiment Name: Zm_Imbibed_Seeds_P Parameter: Age (day) Value: 5 vs. 2
  misc_feature: MA Experiment 108528 PARAMETER Experiment Name: Zm_Imbibed_Seeds_P Parameter: Organism Value: Zea mays
  misc_feature: MA Experiment 108528 PARAMETER Experiment Name: Zm_Imbibed_Seeds_P Parameter: Plant Line Value: 35A19
  misc_feature: MA Experiment 108528 PARAMETER Experiment Name: Zm_Imbibed_Seeds_P Parameter: Tissue Value: Aerial vs. Embryo
  misc_feature: MA Experiment ID: 108529 Result: Down-regulated in Transcription
  misc_feature: MA Experiment 108529 PARAMETER Experiment Name: Zm_Imbibed_Seeds_P Parameter: Age (day) Value: 5 vs. 2
  misc_feature: MA Experiment 108529 PARAMETER Experiment Name: Zm_Imbibed_Seeds_P Parameter: Organism Value: Zea mays
  misc_feature: MA Experiment 108529 PARAMETER Experiment Name: Zm_Imbibed_Seeds_P Parameter: Plant Line Value: 35A19
  misc_feature: MA Experiment 108529 PARAMETER Experiment Name: Zm_Imbibed_Seeds_P Parameter: Tissue Value: Roots vs. Embryo
  misc_feature: MA Experiment ID: 108530 Result: Up-regulated in Transcription
  misc_feature: MA Experiment 108530 PARAMETER Experiment Name: Zm_Imbibed_Seeds_P Parameter: Age (day) Value: 6 vs. 2
  misc_feature: MA Experiment 108530 PARAMETER Experiment Name: Zm_Imbibed_Seeds_P Parameter: Organism Value: Zea mays
  misc_feature: MA Experiment 108530 PARAMETER Experiment Name: Zm_Imbibed_Seeds_P Parameter: Plant Line Value: 35A19
  misc_feature: MA Experiment 108530 PARAMETER Experiment Name: Zm_Imbibed_Seeds_P Parameter: Tissue Value: Aerial vs. Embryo
  misc_feature: MA Experiment ID: 108543 Result: Down-regulated in Transcription
  misc_feature: MA Experiment ID: 108544 Result: Up-regulated in Transcription
  misc_feature: MA Experiment ID: 108546 Result: Down-regulated in Transcription
  misc_feature: MA Experiment 108546 PARAMETER Experiment Name: Zm_Imbibed_Seeds_P Parameter: Age (day) Value: 3 vs. 2
  misc_feature: MA Experiment 108546 PARAMETER Experiment Name: Zm_Imbibed_Seeds_P Parameter: Organism Value: Zea mays
  misc_feature: MA Experiment 108546 PARAMETER Experiment Name: Zm_Imbibed_Seeds_P Parameter: Plant Line Value: 35A19
  misc_feature: MA Experiment 108546 PARAMETER Experiment Name: Zm_Imbibed_Seeds_P Parameter: Tissue Value: Roots vs. Embryo
  misc_feature: MA Experiment ID: 108547 Result: Up-regulated in Transcription
  misc_feature: MA Experiment 108547 PARAMETER Experiment Name: Zm_Imbibed_Seeds_P Parameter: Age (day) Value: 4 vs. 2
  misc_feature: MA Experiment 108547 PARAMETER Experiment Name: Zm_Imbibed_Seeds_P Parameter: Organism Value: Zea mays
  misc_feature: MA Experiment 108547 PARAMETER Experiment Name: Zm_Imbibed_Seeds_P Parameter: Plant Line Value: 35A19
  misc_feature: MA Experiment 108547 PARAMETER Experiment Name: Zm_Imbibed_Seeds_P Parameter: Tissue Value: Aerial vs. Embryo
  misc_feature: MA Experiment ID: 108559 Result: Down-regulated in Transcription
  misc_feature: MA Experiment 108559 PARAMETER Experiment Name: Zm_5mM_NO_P Parameter: Age (day) Value: 8
  misc_feature: MA Experiment 108559 PARAMETER Experiment Name: Zm_5mM_NO_P Parameter: Organism Value: Zea mays
  misc_feature: MA Experiment 108559 PARAMETER Experiment Name: Zm_5mM_NO_P Parameter: Plant Line Value: 35A19
  misc_feature: MA Experiment 108559 PARAMETER Experiment Name: Zm_5mM_NO_P Parameter: Timepoint (hr) Value: 12
  misc_feature: MA Experiment 108559 PARAMETER Experiment Name: Zm_5mM_NO_P Parameter: Tissue Value: Aerial
  misc_feature: MA Experiment 108559 PARAMETER Experiment Name: Zm_5mM_NO_P Parameter: Treatment Value: 5mM NO vs. No Treatment
  misc_feature: MA Experiment ID: 108687 Result: Down-regulated in Transcription
  misc_feature: MA Experiment 108687 PARAMETER Experiment Name: Zm_Embryos-Flowers__P Parameter: Tissue Value: Embryo vs. Aerial+
  misc_feature: MA Experiment ID: 108688 Result: Down-regulated in Transcription
  misc_feature: MA Experiment 108688 PARAMETER Experiment Name: Zm_Embryos-Flowers__P Parameter: Tissue Value: Immature Flowers vs. Aerial+
  misc_feature: MA Experiment ID: 108689 Result: Up-regulated in Transcription
  misc_feature: MA Experiment 108689 PARAMETER Experiment Name: Zm_Drought_Roots_P Parameter: Age (day) Value: 9
  misc_feature: MA Experiment 108689 PARAMETER Experiment Name: Zm_Drought_Roots_P Parameter: Organism Value: Zea mays
  misc_feature: MA Experiment 108689 PARAMETER Experiment Name: Zm_Drought_Roots_P Parameter: Plant Line Value: 35A19
  misc_feature: MA Experiment 108689 PARAMETER Experiment Name: Zm_Drought_Roots_P Parameter: Timepoint (hr) Value: 24
  misc_feature: MA Experiment 108689 PARAMETER Experiment Name: Zm_Drought_Roots_P Parameter: Tissue Value: Roots
  misc_feature: MA Experiment 108689 PARAMETER Experiment Name: Zm_Drought_Roots_P Parameter: Treatment Value: Drought vs. No Drought
  misc_feature: MA Experiment ID: 20000477 Result: Down-regulated in Transcription
  misc_feature: MA Experiment 20000477 PARAMETER Experiment Name: Zm_5mM_SA_P Parameter: Age (day) Value: 10
  misc_feature: MA Experiment 20000477 PARAMETER Experiment Name: Zm_5mM_SA_P Parameter: Organism Value: Zea mays
  misc_feature: MA Experiment 20000477 PARAMETER Experiment Name: Zm_5mM_SA_P Parameter: Plant Line Value: 35A19
  misc_feature: MA Experiment 20000477 PARAMETER Experiment Name: Zm_5mM_SA_P Parameter: Timepoint (hr) Value: 48
  misc_feature: MA Experiment 20000477 PARAMETER Experiment Name: Zm_5mM_SA_P Parameter: Tissue Value: Aerial
  misc_feature: MA Experiment 20000477 PARAMETER Experiment Name: Zm_5mM_SA_P Parameter: Treatment Value: 5mM SA vs. No Treatment
  misc_feature: MA Experiment ID: 20000478 Result: Down-regulated in Transcription
  misc_feature: MA Experiment 20000478 PARAMETER Experiment Name: Zm_5mM_SA_P Parameter: Age (day) Value: 11
  misc_feature: MA Experiment 20000478 PARAMETER Experiment Name: Zm_5mM_SA_P Parameter: Organism Value: Zea mays
  misc_feature: MA Experiment 20000478 PARAMETER Experiment Name: Zm_5mM_SA_P Parameter: Plant Line Value: 35A19
  misc_feature: MA Experiment 20000478 PARAMETER Experiment Name: Zm_5mM_SA_P Parameter: Timepoint (hr) Value: 72
  misc_feature: MA Experiment 20000478 PARAMETER Experiment Name: Zm_5mM_SA_P Parameter: Tissue Value: Aerial
  misc_feature: MA Experiment 20000478 PARAMETER Experiment Name: Zm_5mM_SA_P Parameter: Treatment Value: 5mM SA vs. No Treatment
  misc_feature: MA Experiment ID: 20000535 Result: Up-regulated in Transcription
  misc_feature: MA Experiment 20000535 PARAMETER Experiment Name: Zm_Hybrid_Seed_Dev_P Parameter: DAP Value: 30 vs. 12
  misc_feature: MA Experiment 20000535 PARAMETER Experiment Name: Zm_Hybrid_Seed_Dev_P Parameter: Organism Value: Zea mays
  misc_feature: MA Experiment 20000535 PARAMETER Experiment Name: Zm_Hybrid_Seed_Dev_P Parameter: Plant Line Value: 35A19
  misc_feature: MA Experiment 20000535 PARAMETER Experiment Name: Zm_Hybrid_Seed_Dev_P Parameter: Tissue Value: Embryo vs. Unfert Floret
  misc_feature: MA Experiment ID: 20000626 Result: Down-regulated in Transcription
  misc_feature: MA Experiment 20000626 PARAMETER Experiment Name: Zm_Herbicide-Treatments_P Parameter: Timepoint (hr) Value: 12
  misc_feature: MA Experiment 20000626 PARAMETER Experiment Name: Zm_Herbicide-Treatments_P Parameter: Tissue Value: Aerial
  misc_feature: MA Experiment 20000626 PARAMETER Experiment Name: Zm_Herbicide-Treatments_P Parameter: Treatment Value: Roundup vs. No Treatment
gcacgagaccattacctagaacatcctaatcgaaaaatcgtctgcaactgcatcgctcgctctctcctttcactgggaacatctatcagctcgcgctcattggccatctttggcttccatggagaggctcattgccggcctacttggcttcctattggttgcatcggtaggaagccatgcagctcgtgctccggatcagtactggaagtctgctcttcccaacactcccatgccgacctccctctcccaactcctcgacgccgctccagccggcggcggcacgaccgtcaacgtcggctggggcggtgtttcacgtcgatgctgggcacggtaagcccgggggtacgacggttgacgtaggcaagggcggcgtcggcgtcaacgttaaccctggcaggagcggcaagcccggcggcacgacggttggcgtcgggaagggcggagtcggcgttaacgtcaacccgggatacggaaagcccggcggcaccaccgttggcgtcggaaagggtggcgttggcgttaacgtcaaccccggcaagcccggtggcacaacggtcggcgtcggcaagggcggagtgggcgtcaacgtcaatcccggcaaaccggccggtggtgccggtacaaccgttggcgttggcaaaggcggcgtgggcgtgggcgtcaatcccgggcacggcaagccgggcggcaccacggtcggcgttggcaagggcggggttggcgttcacgtgaacccgggaaagaagcccgtccacgtcaacgtctcccctttcatctacacgtacgccgcgtcggagacgcagctgcacgacgaccccagcgtggcgctcttcttccaggagacggacctccggcccggtaagaagatgaccgtccagttcgccagcaccgggacgaccggcaccaagttcctcccgcggagcgaggccgaggccatcccgttctcctcacagaaggtgcccgagatcctcgcccgcctctcggtggacccggactccgtcgaggcggcggagatggcgcagacgctgcgcgactgcgaggcgcccgcggccaagggcgagaagaaggcgtgcgccacgtcgctggagtccatggtggacttcgccaccgccagcctcgggaccaggcacgtgagggccgtgtcgaccgtcgtggcgaaggagggatcgccgaagcaggagtacacggtgaccggcgtggagcgcgctgccggcggcaccgacgacgacggccgggtcgtggcctgccacgcggagccgtacgcgtacgccgtgttcgcgtgccacctgacgccgcagacgcgggcgtactctgtgtcgatgctcggcagggacggcacggccgtggacgctgtcgcggtgtgccacgccgacacgtccggctggaaccccaagcacgtcgccttccaggtgctcaacgtgaagcccggcaccgtgccggtctgccacttcctgccgcaggaccacgtcgtctggacccgcagcggctgagtctgctggatggccgccgtttgctcgcgtcgcgccgcctggagtgatttgttatgttccagtggcctctaggcatactgtcatattattattataccgaggtatcacgagtttgcttatgtttccagtacttgatgcttgtatggatatggtgtagccagctcagcaagtatcaacccacctgcttaattctgttgtatagttttaaataaacagacaacctctttatgggc

SEQ ID NO: 4047 - protein, 437 aa, Zea mays subsp. mays
  peptide (1)..(437): Ceres Seq. ID no. 12376741
  misc_feature (48)..(183): Pfam Name: Dehydrin Pfam Description: Dehydrin
  misc_feature (182)..(433): Homolog of NCBI NO: 14422442 NR Description: BURP domain-containing protein [Bruguiera
  misc_feature (165)..(437): Homolog of NCBI NO: 38344535 NR Description: OSJNBa0036B17.11 [Oryza sativa (japonica
  misc_feature (171)..(433): Homolog of NCBI NO: 14422448 NR Description: BURP domain-containing protein [Bruguiera
  misc_feature (148)..(433): Homolog of NCBI NO: 14422446 NR Description: BURP domain-containing protein [Bruguiera
  misc_feature (149)..(433): Homolog of NCBI NO: 33578034 NR Description: BURP domain-containing protein [Gossypium
  misc_feature (149)..(433): Homolog of NCBI NO: 18447761 NR Description: dehydration-induced protein RD22-like protein
  misc_feature (124)..(433): Homolog of NCBI NO: 16588826 NR Description: dehydration-responsive protein RD22 [Prunus
  misc_feature (104)..(433): Homolog of NCBI NO: 15239478 NR Description: dehydration-induced protein RD22
  misc_feature (124)..(433): Homolog of NCBI NO: 14422444 NR Description: BURP domain-containing protein [Bruguiera
  misc_feature (55)..(437): Homolog of NCBI NO: 34910186 NR Description: putative dehydration-responsive protein RD22
MQLVLRISTGSLLFPTLPCRPPSPNSSTPLQPAAARPSTSAGAVFHVDAGHGKPGGTTVDVGKGGVGVNVNPGRSGKPGGTTVGVGKGGVGVNVNPGYGKPGGTTVGVGKGGVGVNVNPGKPGGTTVGVGKGGVGVNVNPGKPAGGAGTTVGVGKGGVGVGVNPGHGKPGGTTVGVGKGGVGVHVNPGKKPVHVNVSPFIYTYAASETQLHDDPSVALFFQETDLRPGKKMTVQFASTGTTGTKFLPRSEAEAIPFSSQKVPEILARLSVDPDSVEAAEMAQTLRDCEAPAAKGEKKACATSLESMVDFATASLGTRHVRAVSTVVAKEGSPKQEYTVTGVERAAGGTDDDGRVVACHAEPYAYAVFACHLTPQTRAYSVSMLGRDGTAVDAVAVCHADTSGWNPKHVAFQVLNVKPGTVPVCHFLPQDHVVWTRSG

SEQ ID NO: 4048 - DNA, 1384 bp, Zea mays subsp. mays
  misc_feature (1)..(1384): Ceres Seq. ID no. 15180114
  misc_feature: MA Experiment ID: 108523 Result: Down-regulated in Transcription
  misc_feature: MA Experiment 108523 PARAMETER Experiment Name: Zm_42deg_Heat_P Parameter: Age (day) Value: 8
  misc_feature: MA Experiment 108523 PARAMETER Experiment Name: Zm_42deg_Heat_P Parameter: Organism Value: Zea mays
  misc_feature: MA Experiment 108523 PARAMETER Experiment Name: Zm_42deg_Heat_P Parameter: Plant Line Value: 35A19
  misc_feature: MA Experiment 108523 PARAMETER Experiment Name: Zm_42deg_Heat_P Parameter: Temperature (deg C) Value: 42 vs. 22
  misc_feature: MA Experiment 108523 PARAMETER Experiment Name: Zm_42deg_Heat_P Parameter: Timepoint (hr) Value: 6
  misc_feature: MA Experiment 108523 PARAMETER Experiment Name: Zm_42deg_Heat_P Parameter: Tissue Value: Aerial
  misc_feature: MA Experiment ID: 108529 Result: Down-regulated in Transcription
  misc_feature: MA Experiment 108529 PARAMETER Experiment Name: Zm_Imbibed_Seeds_P Parameter: Age (day) Value: 5 vs. 2
  misc_feature: MA Experiment 108529 PARAMETER Experiment Name: Zm_Imbibed_Seeds_P Parameter: Organism Value: Zea mays
  misc_feature: MA Experiment 108529 PARAMETER Experiment Name: Zm_Imbibed_Seeds_P Parameter: Plant Line Value: 35A19
  misc_feature: MA Experiment 108529 PARAMETER Experiment Name: Zm_Imbibed_Seeds_P Parameter: Tissue Value: Roots vs. Embryo
  misc_feature: MA Experiment ID: 108543 Result: Up-regulated in Transcription
  misc_feature: MA Experiment ID: 108544 Result: Down-regulated in Transcription
  misc_feature: MA Experiment ID: 108546 Result: Down-regulated in Transcription
  misc_feature: MA Experiment 108546 PARAMETER Experiment Name: Zm_Imbibed_Seeds_P Parameter: Age (day) Value: 3 vs. 2
  misc_feature: MA Experiment 108546 PARAMETER Experiment Name: Zm_Imbibed_Seeds_P Parameter: Organism Value: Zea mays
  misc_feature: MA Experiment 108546 PARAMETER Experiment Name: Zm_Imbibed_Seeds_P Parameter: Plant Line Value: 35A19
  misc_feature: MA Experiment 108546 PARAMETER Experiment Name: Zm_Imbibed_Seeds_P Parameter: Tissue Value: Roots vs. Embryo
  misc_feature: MA Experiment ID: 108556 Result: Down-regulated in Transcription
  misc_feature: MA Experiment 108556 PARAMETER Experiment Name: Zm_Drought_P Parameter: Age (day) Value: 9
  misc_feature: MA Experiment 108556 PARAMETER Experiment Name: Zm_Drought_P Parameter: Organism Value: Zea mays
  misc_feature: MA Experiment 108556 PARAMETER Experiment Name: Zm_Drought_P Parameter: Plant Line Value: 35A19
  misc_feature: MA Experiment 108556 PARAMETER Experiment Name: Zm_Drought_P Parameter: Timepoint (hr) Value: 24
  misc_feature: MA Experiment 108556 PARAMETER Experiment Name: Zm_Drought_P Parameter: Tissue Value: Aerial
  misc_feature: MA Experiment 108556 PARAMETER Experiment Name: Zm_Drought_P Parameter: Treatment Value: Drought vs. No Drought
  misc_feature: MA Experiment ID: 108687 Result: Down-regulated in Transcription
  misc_feature: MA Experiment 108687 PARAMETER Experiment Name: Zm_Embryos-Flowers__P Parameter: Tissue Value: Embryo vs. Aerial+
  misc_feature: MA Experiment ID: 108689 Result: Down-regulated in Transcription
  misc_feature: MA Experiment 108689 PARAMETER Experiment Name: Zm_Drought_Roots_P Parameter: Age (day) Value: 9
  misc_feature: MA Experiment 108689 PARAMETER Experiment Name: Zm_Drought_Roots_P Parameter: Organism Value: Zea mays
  misc_feature: MA Experiment 108689 PARAMETER Experiment Name: Zm_Drought_Roots_P Parameter: Plant Line Value: 35A19
  misc_feature: MA Experiment 108689 PARAMETER Experiment Name: Zm_Drought_Roots_P Parameter: Timepoint (hr) Value: 24
  misc_feature: MA Experiment 108689 PARAMETER Experiment Name: Zm_Drought_Roots_P Parameter: Tissue Value: Roots
  misc_feature: MA Experiment 108689 PARAMETER Experiment Name: Zm_Drought_Roots_P Parameter: Treatment Value: Drought vs. No Drought
  misc_feature: MA Experiment ID: 20000477 Result: Down-regulated in Transcription
  misc_feature: MA Experiment 20000477 PARAMETER Experiment Name: Zm_5mM_SA_P Parameter: Age (day) Value: 10
  misc_feature: MA Experiment 20000477 PARAMETER Experiment Name: Zm_5mM_SA_P Parameter: Organism Value: Zea mays
  misc_feature: MA Experiment 20000477 PARAMETER Experiment Name: Zm_5mM_SA_P Parameter: Plant Line Value: 35A19
  misc_feature: MA Experiment 20000477 PARAMETER Experiment Name: Zm_5mM_SA_P Parameter: Timepoint (hr) Value: 48
  misc_feature: MA Experiment 20000477 PARAMETER Experiment Name: Zm_5mM_SA_P Parameter: Tissue Value: Aerial
  misc_feature: MA Experiment 20000477 PARAMETER Experiment Name: Zm_5mM_SA_P Parameter: Treatment Value: 5mM SA vs. No Treatment
  misc_feature: MA Experiment ID: 20000478 Result: Down-regulated in Transcription
  misc_feature: MA Experiment 20000478 PARAMETER Experiment Name: Zm_5mM_SA_P Parameter: Age (day) Value: 11
  misc_feature: MA Experiment 20000478 PARAMETER Experiment Name: Zm_5mM_SA_P Parameter: Organism Value: Zea mays
  misc_feature: MA Experiment 20000478 PARAMETER Experiment Name: Zm_5mM_SA_P Parameter: Plant Line Value: 35A19
  misc_feature: MA Experiment 20000478 PARAMETER Experiment Name: Zm_5mM_SA_P Parameter: Timepoint (hr) Value: 72
  misc_feature: MA Experiment 20000478 PARAMETER Experiment Name: Zm_5mM_SA_P Parameter: Tissue Value: Aerial
  misc_feature: MA Experiment 20000478 PARAMETER Experiment Name: Zm_5mM_SA_P Parameter: Treatment Value: 5mM SA vs. No Treatment
  misc_feature: MA Experiment ID: 20000479 Result: Down-regulated in Transcription
  misc_feature: MA Experiment 20000479 PARAMETER Experiment Name: Zm_Drought_P Parameter: Age (day) Value: 10
  misc_feature: MA Experiment 20000479 PARAMETER Experiment Name: Zm_Drought_P Parameter: Organism Value: Zea mays
  misc_feature: MA Experiment 20000479 PARAMETER Experiment Name: Zm_Drought_P Parameter: Plant Line Value: 35A19
  misc_feature: MA Experiment 20000479 PARAMETER Experiment Name: Zm_Drought_P Parameter: Timepoint (hr) Value: 48
  misc_feature: MA Experiment 20000479 PARAMETER Experiment Name: Zm_Drought_P Parameter: Tissue Value: Aerial
  misc_feature: MA Experiment 20000479 PARAMETER Experiment Name: Zm_Drought_P Parameter: Treatment Value: Drought vs. No Drought
  misc_feature: MA Experiment ID: 20000480 Result: Down-regulated in Transcription
  misc_feature: MA Experiment 20000480 PARAMETER Experiment Name: Zm_Drought_P Parameter: Age (day) Value: 11
  misc_feature: MA Experiment 20000480 PARAMETER Experiment Name: Zm_Drought_P Parameter: Organism Value: Zea mays
  misc_feature: MA Experiment 20000480 PARAMETER Experiment Name: Zm_Drought_P Parameter: Plant Line Value: 35A19
  misc_feature: MA Experiment 20000480 PARAMETER Experiment Name: Zm_Drought_P Parameter: Timepoint (hr) Value: 72
  misc_feature: MA Experiment 20000480 PARAMETER Experiment Name: Zm_Drought_P Parameter: Tissue Value: Aerial
  misc_feature: MA Experiment 20000480 PARAMETER Experiment Name: Zm_Drought_P Parameter: Treatment Value: Drought vs. No Drought
  misc_feature: MA Experiment ID: 20000488 Result: Down-regulated in Transcription
  misc_feature: MA Experiment 20000488 PARAMETER Experiment Name: Zm_50mM_NH4NO3_L_to_H_P Parameter: Organism Value: Zea mays
  misc_feature: MA Experiment 20000488 PARAMETER Experiment Name: Zm_50mM_NH4NO3_L_to_H_P Parameter: Timepoint (hr) Value: 8
  misc_feature: MA Experiment 20000488 PARAMETER Experiment Name: Zm_50mM_NH4NO3_L_to_H_P Parameter: Tissue Value: Leaves
  misc_feature: MA Experiment 20000488 PARAMETER Experiment Name: Zm_50mM_NH4NO3_L_to_H_P Parameter: Treatment Value: 50mM NH4NO3 vs. 100mM Mannitol
  misc_feature: MA Experiment ID: 20000535 Result: Up-regulated in Transcription
  misc_feature: MA Experiment 20000535 PARAMETER Experiment Name: Zm_Hybrid_Seed_Dev_P Parameter: DAP Value: 30 vs. 12
  misc_feature: MA Experiment 20000535 PARAMETER Experiment Name: Zm_Hybrid_Seed_Dev_P Parameter: Organism Value: Zea mays
  misc_feature: MA Experiment 20000535 PARAMETER Experiment Name: Zm_Hybrid_Seed_Dev_P Parameter: Plant Line Value: 35A19
  misc_feature: MA Experiment 20000535 PARAMETER Experiment Name: Zm_Hybrid_Seed_Dev_P Parameter: Tissue Value: Embryo vs. Unfert Floret
  misc_feature: MA Experiment ID: 20000626 Result: Down-regulated in Transcription
  misc_feature: MA Experiment 20000626 PARAMETER Experiment Name: Zm_Herbicide-Treatments_P Parameter: Timepoint (hr) Value: 12
  misc_feature: MA Experiment 20000626 PARAMETER Experiment Name: Zm_Herbicide-Treatments_P Parameter: Tissue Value: Aerial
  misc_feature: MA Experiment 20000626 PARAMETER Experiment Name: Zm_Herbicide-Treatments_P Parameter: Treatment Value: Roundup vs. No Treatment
caaagatgtctctgtaaacaaaccagataaccttgcttcagcatcaaacaacattcatcccaagcttgtgatcctccacatgaacatggccctctatgtatatgatgatataatgaggatgactgaaaatttgagcgaaaaatacattattggttatggagcctcaagtacagtctacagatgcgacctgaagaactgcaagccaattgcgattaaaaagctgtatgctcactaccctcagagcttgaaggaattcgagactgaacttgagactgttggaagcatcaaacaccggaatcttgtaagccttcaggggtactccctgtcaccatctgggaatctcctcttctatgattacatggaaaatggcagcctctgggacattttacatgcagcttcatcgaagaaaaagaaactcgattgggaggctcgtctcaagattgctctcggtgctgctcaaggcctggcttatcttcaccatgagtgcagtccacgaataatccacagggatgtgaaatcaaagaatatcctcctagacaaagactacgaggctcatcttgctgactttggtattgccaagagtttgtgtgtgtcgaagacgcacacatcaacgtacgtgatgggcaccattggctacattgaccctgagtatgcacggacatcccggatcaacgagaaatcggatgtgtacagctacggcattgtcttgctggagttgcttaccggcaaaaagcctgtcgacgacgagtgcaaccttcaccacttgatcctatccaaagccgcagagaacacggtcatggagacggtcgaccaggacatcaccgacacgtgcaaggacctcggcgaggtcaagaaggtgttccagctggcgctcctttgcagcaagaggcagccgtcggatcgaccgaccatgcacgaggtcgcgcgcgtcctggacagcctcgtctgcccagcaggcccgccgccgaagcaggcgcaggcacaggcacaggcacaggcgtcggataagccgtccaccacggcgccgagctatgtcagcgagtacgtcggcctacgaggcggcggcggcggcagcgccctctcctgcaccaactcgtcgagcgcgtccgacgccgagctcttcatgaagtttggcgaggtgatctcgcggagcacggaatagtccaatagatcgacgatcattttgtgttacagtttacaataggtgtctggccggcgccctgtgatgtgactcgctgtaaatatgccgctgccttctcgttgggactccactaggcactagtagctatttttctccgttatgcacgtctctctctctctttttttgctgggaaactcgaactgtaactaaaggaacggatttatgtgcaggctgtgtttactc

SEQ ID NO: 4049 - protein, 386 aa, Zea mays subsp. mays
  peptide (1)..(386): Ceres Seq. ID no. 15180115
  misc_feature (21)..(315): Homolog of NCBI NO: 30697726 NR Description: leucine rich repeat protein family [Arabidopsis
  misc_feature (21)..(315): Homolog of NCBI NO: 10177448 NR Description: receptor-like protein kinase [Arabidopsis
  misc_feature (38)..(315): Homolog of NCBI NO: 26451159 NR Description: unknown protein [Arabidopsis thaliana]
  misc_feature (6)..(315): Homolog of NCBI NO: 28140043 NR Description: receptor-like protein kinase [Elaeis guineensis]
  misc_feature (21)..(315): Homolog of NCBI NO: 8809636 NR Description: receptor-like protein kinase [Arabidopsis
  misc_feature (21)..(348): Homolog of NCBI NO: 15240720 NR Description: receptor-related protein kinase [Arabidopsis
  misc_feature (21)..(315): Homolog of NCBI NO: 15241760 NR Description: expressed protein [Arabidopsis thaliana]
  misc_feature (6)..(385): Homolog of NCBI NO: 34898088 NR Description: ESTs C22657(S0014),C22656(S0014) correspond to a of the predicted gene.~Similar to receptor protein kinase, ERECTA
  misc_feature (20)..(386): Homolog of NCBI NO: 15225286 NR Description: receptor-related protein kinase, ERECTA
  misc_feature (1)..(386): Homolog of NCBI NO: 18390097 NR Description: putative receptor protein kinase [Sorghum bicolor]
KDVSVNKPDNLASASNNIHPKLVILHMNMALYVYDDIMRMTENLSEKYIIGYGASSTVYRCDLKNCKPIAIKKLYAHYPQSLKEFETELETVGSIKHRNLVSLQGYSLSPSGNLLFYDYMENGSLWDILHAASSKKKKLDWEARLKIALGAAQGLAYLHHECSPRIIHRDVKSKNILLDKDYEAHLADFGIAKSLCVSKTHTSTYVMGTIGYIDPEYARTSRINEKSDVYSYGIVLLELLTGKKPVDDECNLHHLILSKAAENTVMETVDQDITDTCKDLGEVKKVFQLALLCSKRQPSDRPTMHEVARVLDSLVCPAGPPPKQAQAQAQAQASDKPSTTAPSYVSEYVGLRGGGGGSALSCTNSSSASDAELFMKFGEVISRSTE

SEQ ID NO: 4050 - protein, 360 aa, Zea mays subsp. mays
  peptide (1)..(360): Ceres Seq. ID no. 15180116
  misc_feature (1)..(289): Homolog of NCBI NO: 30697726 NR Description: leucine rich repeat protein family [Arabidopsis
  misc_feature (1)..(289): Homolog of NCBI NO: 10177448 NR Description: receptor-like protein kinase [Arabidopsis
  misc_feature (12)..(289): Homolog of NCBI NO: 26451159 NR Description: unknown protein [Arabidopsis thaliana]
  misc_feature (1)..(289): Homolog of NCBI NO: 28140043 NR Description: receptor-like protein kinase [Elaeis guineensis]
  misc_feature (1)..(289): Homolog of NCBI NO: 8809636 NR Description: receptor-like protein kinase [Arabidopsis
  misc_feature (1)..(322): Homolog of NCBI NO: 15240720 NR Description: receptor-related protein kinase [Arabidopsis
  misc_feature (1)..(289): Homolog of NCBI NO: 15241760 NR Description: expressed protein [Arabidopsis thaliana]
  misc_feature (1)..(359): Homolog of NCBI NO: 34898088 NR Description: ESTs C22657(S0014),C22656(S0014) correspond to a of the predicted gene.~Similar to receptor protein kinase, ERECTA
  misc_feature (1)..(360): Homolog of NCBI NO: 15225286 NR Description: receptor-related protein kinase, ERECTA
  misc_feature (1)..(360): Homolog of NCBI NO: 18390097 NR Description: putative receptor protein kinase [Sorghum bicolor]
MNMALYVYDDIMRMTENLSEKYIIGYGASSTVYRCDLKNCKPIAIKKLYAHYPQSLKEFETELETVGSIKHRNLVSLQGYSLSPSGNLLFYDYMENGSLWDILHAASSKKKKLDWEARLKIALGAAQGLAYLHHECSPRIIHRDVKSKNILLDKDYEAHLADFGIAKSLCVSKTHTSTYVMGTIGYIDPEYARTSRINEKSDVYSYGIVLLELLTGKKPVDDECNLHHLILSKAAENTVMETVDQDITDTCKDLGEVKKVFQLALLCSKRQPSDRPTMHEVARVLDSLVCPAGPPPKQAQAQAQAQASDKPSTTAPSYVSEYVGLRGGGGGSALSCTNSSSASDAELFMKFGEVISRSTE

SEQ ID NO: 4051 - protein, 358 aa, Zea mays subsp. mays
  peptide (1)..(358): Ceres Seq. ID no. 15180117
  misc_feature (1)..(287): Homolog of NCBI NO: 15241760 NR Description: expressed protein [Arabidopsis thaliana]
  misc_feature (1)..(357): Homolog of NCBI NO: 34898088 NR Description: ESTs C22657(S0014),C22656(S0014) correspond to a of the predicted gene.~Similar to receptor protein kinase, ERECTA
  misc_feature (1)..(358): Homolog of NCBI NO: 15225286 NR Description: receptor-related protein kinase, ERECTA
  misc_feature (1)..(358): Homolog of NCBI NO: 18390097 NR Description: putative receptor protein kinase [Sorghum bicolor]
  misc_feature (1)..(287): Homolog of NCBI NO: 30697726 NR Description: leucine rich repeat protein family [Arabidopsis
  misc_feature (1)..(287): Homolog of NCBI NO: 10177448 NR Description: receptor-like protein kinase [Arabidopsis
  misc_feature (10)..(287): Homolog of NCBI NO: 26451159 NR Description: unknown protein [Arabidopsis thaliana]
  misc_feature (1)..(287): Homolog of NCBI NO: 28140043 NR Description: receptor-like protein kinase [Elaeis guineensis]
  misc_feature (1)..(287): Homolog of NCBI NO: 8809636 NR Description: receptor-like protein kinase [Arabidopsis
  misc_feature (1)..(320): Homolog of NCBI NO: 15240720 NR Description: receptor-related protein kinase [Arabidopsis
MALYVYDDIMRMTENLSEKYIIGYGASSTVYRCDLKNCKPIAIKKLYAHYPQSLKEFETELETVGSIKHRNLVSLQGYSLSPSGNLLFYDYMENGSLWDILHAASSKKKKLDWEARLKIALGAAQGLAYLHHECSPRIIHRDVKSKNILLDKDYEAHLADFGIAKSLCVSKTHTSTYVMGTIGYIDPEYARTSRINEKSDVYSYGIVLLELLTGKKPVDDECNLHHLILSKAAENTVMETVDQDITDTCKDLGEVKKVFQLALLCSKRQPSDRPTMHEVARVLDSLVCPAGPPPKQAQAQAQAQASDKPSTTAPSYVSEYVGLRGGGGGSALSCTNSSSASDAELFMKFGEVISRSTE

SEQ ID NO: 4052 - DNA, 1856 bp, Zea mays subsp. mays
  misc_feature (1)..(1856): Ceres Seq. ID no. 13635560
  misc_feature: MA Experiment ID: 108522 Result: Up-regulated in Transcription
  misc_feature: MA Experiment 108522 PARAMETER Experiment Name: Zm_42deg_Heat_P Parameter: Age (day) Value: 8
  misc_feature: MA Experiment 108522 PARAMETER Experiment Name: Zm_42deg_Heat_P Parameter: Organism Value: Zea mays
  misc_feature: MA Experiment 108522 PARAMETER Experiment Name: Zm_42deg_Heat_P Parameter: Plant Line Value: 35A19
  misc_feature: MA Experiment 108522 PARAMETER Experiment Name: Zm_42deg_Heat_P Parameter: Temperature (deg C) Value: 42 vs. 22
  misc_feature: MA Experiment 108522 PARAMETER Experiment Name: Zm_42deg_Heat_P Parameter: Timepoint (hr) Value: 1
  misc_feature: MA Experiment 108522 PARAMETER Experiment Name: Zm_42deg_Heat_P Parameter: Tissue Value: Aerial
  misc_feature: MA Experiment ID: 108523 Result: Up-regulated in Transcription
  misc_feature: MA Experiment 108523 PARAMETER Experiment Name: Zm_42deg_Heat_P Parameter: Age (day) Value: 8
  misc_feature: MA Experiment 108523 PARAMETER Experiment Name: Zm_42deg_Heat_P Parameter: Organism Value: Zea mays
  misc_feature: MA Experiment 108523 PARAMETER Experiment Name: Zm_42deg_Heat_P Parameter: Plant Line Value: 35A19
  misc_feature: MA Experiment 108523 PARAMETER Experiment Name: Zm_42deg_Heat_P Parameter: Temperature (deg C) Value: 42 vs. 22
  misc_feature: MA Experiment 108523 PARAMETER Experiment Name: Zm_42deg_Heat_P Parameter: Timepoint (hr) Value: 6
  misc_feature: MA Experiment 108523 PARAMETER Experiment Name: Zm_42deg_Heat_P Parameter: Tissue Value: Aerial
  misc_feature: MA Experiment ID: 108535 Result: Up-regulated in Transcription
  misc_feature: MA Experiment 108535 PARAMETER Experiment Name: Zm_Meristem_P Parameter: Age (day) Value: 8
  misc_feature: MA Experiment 108535 PARAMETER Experiment Name: Zm_Meristem_P Parameter: Organism Value: Zea mays
  misc_feature: MA Experiment 108535 PARAMETER Experiment Name: Zm_Meristem_P Parameter: Plant Line Value: 35A19
  misc_feature: MA Experiment 108535 PARAMETER Experiment Name: Zm_Meristem_P Parameter: Tissue Value: Root Meristem vs. Above Root Meristem
  misc_feature: MA Experiment ID: 108544 Result: Down-regulated in Transcription
gatgatgggagggcgcgctctgctgctgctcctggtctcggcgctgctcgttcagatccgcgcctctgacccgctgctgtacgagccgtttgatgaggacttcgagggtagatggatcgtctccaagaaggatgaataccaaggtgtatggaagcatgccaagagtgatgggcatgaggactatggcctccttgttagtgacaaggcaaggaaatacgccataatcaaggagcttgatgagccagttaccttaaatgatgggacagtggtcctgcagtttgaagtgagacttcagaatggccttgaatgtggaggtgcctacattaagtacatccgccctcaggatgctggatgggatgccaaggagtttgataatgagactccatacactattatgtttggtccagataaatgtgggtcaaccaacaaggttcatttcatccttaagcacaagaatcctaagactggaaagtatgttgagcatcacctcaaattcccaccttctgtcccatacgacaagctctctcatgtctacacagctatcttgaagccagacaatgaggtcagaattttgatcgatggggaagaaaagaagaaggcaaacttcctttctgctgatgactttgagccagcacttatcccatccaagaccattcctgaccctgatgacaagaagccggaggactgggatgagagagctaaaatccctgatccagatgcagtgaagcctgatgattgggatgaggatgcccccatggaaattgtggatgaggaagccaccaagcctgagggatggttggatgatgaacccgaggagattgatgatcctgaggcagccaagcccgaggactgggacgatgaagaggatggtgaatgggaggcaccaaagattgacaaccccaagtgtgaagaggcacctggatgtggcgagtggaagaggccgatgaagcagaatcctgcttacaaaggcaagtggcatgcacctatgattgacaaccccaactacaagggaatctggaagcctcaggagatacccaaccctgagtactttgagcttgacaggcctgattttgatccaattgctgctattgggattgagatctggacaatgcaggatggcatcctgttcgacaatatcttgattgctgatgatgagaaagttgccacctccattctggagaagacatggaagcccaagtatgatgttgagaaggaaaaggagaaggctgaggaggctgctgctggtgcagatggtctttctgacttccagaagaagatttttgacgtcctgtacaagattgctgatattccgttcttggcaccctacaagaccaagattattgatgttatcgagaagggagagaagcagcccaacatcactattggcattttggtctccgttgtcatcgtgttcgttaccgttctcttcaagatcctttttggtggcaagaaaccagtggcacctgtgaaacctgcagctgagggcgnaagtaagcccaaggccgcggagacggacggtgctggaagcagtggtgacaaggatgagaaagaggatgaaaaggacgagacaggcccacgtcggaggacccgaagaggagacatagacctgtttttgacgtgttttagctcttctggcgtctgcttattttgagaactcttaatatttgtgagtgtataataggagcttatgtcacctctgcggcttcccccgctgctgatttgtttttaatggttagaccaggacccttcacgagcgtagaatttagttcttgttggtcatttatgtgctgtgcctgacggtgttcaatcagatagaggtgatggtttttttggtagatcaaatcaaggaatatttc

SEQ ID NO: 4053 - protein, 549 aa, Zea mays subsp. mays
  peptide (1)..(549): Ceres Seq. ID no. 13635561
  misc_feature (25)..(381): Pfam Name: Calreticulin family Pfam Description: Calreticulin family
  misc_feature (1)..(531): Homolog of NCBI NO: 21740628 NR Description: OSJNBb0012E08.10 [Oryza sativa (japonica
  misc_feature (107)..(482): Homolog of NCBI NO: 7441503 NR Description: calnexin - maize (fragment)
  misc_feature (2)..(531): Homolog of NCBI NO: 3334138 NR Description: CALNEXIN HOMOLOG PRECURSOR
  misc_feature (7)..(533): Homolog of NCBI NO: 15240353 NR Description: calnexin 1 (CNX1) [Arabidopsis thaliana]
  misc_feature (6)..(533): Homolog of NCBI NO: 31321896 NR Description: putative papillar cell-specific calnexin
  misc_feature (2)..(531): Homolog of NCBI NO: 11131469 NR Description: Calnexin homolog precursor
  misc_feature (7)..(531): Homolog of NCBI NO: 15240773 NR Description: calnexin, putative [Arabidopsis thaliana]
  misc_feature (7)..(531): Homolog of NCBI NO: 473878 NR Description: calnexin homolog
  misc_feature (10)..(531): Homolog of NCBI NO: 11131766 NR Description: Calnexin homolog precursor
  misc_feature (24)..(535): Homolog of NCBI NO: 18564808 NR Description: calnexin [Aspergillus niger]
  misc_feature (496)..(496): Xaa is any aa, unknown or other
MMGGRALLLLLVSALLVQIRASDPLLYEPFDEDFEGRWIVSKKDEYQGVWKHAKSDGHEDYGLLVSDKARKYAIIKELDEPVTLNDGTVVLQFEVRLQNGLECGGAYIKYIRPQDAGWDAKEFDNETPYTIMFGPDKCGSTNKVHFILKHKNPKTGKYVEHHLKFPPSVPYDKLSHVYTAILKPDNEVRILIDGEEKKKANFLSADDFEPALIPSKTIPDPDDKKPEDWDERAKIPDPDAVKPDDWDEDAPMEIVDEEATKPEGWLDDEPEEIDDPEAAKPEDWDDEEDGEWEAPKIDNPKCEEAPGCGEWKRPMKQNPAYKGKWHAPMIDNPNYKGIWKPQEIPNPEYFELDRPDFDPIAAIGIEIWTMQDGILFDNILIADDEKVATSILEKTWKPKYDVEKEKEKAEEAAAGADGLSDFQKKIFDVLYKIADIPFLAPYKTKIIDVIEKGEKQPNITIGILVSVVIVFVTVLFKILFGGKKPVAPVKPAAEGXSKPKAAETDGAGSSGDKDEKEDEKDETGPRRRTRRGDIDLFLTCFSSSGVCLF

SEQ ID NO: 4054 - protein, 548 aa, Zea mays subsp. mays
  peptide (1)..(548): Ceres Seq. ID no. 13635562
  misc_feature (24)..(380): Pfam Name: Calreticulin family Pfam Description: Calreticulin family
  misc_feature (1)..(530): Homolog of NCBI NO: 3334138 NR Description: CALNEXIN HOMOLOG PRECURSOR
  misc_feature (6)..(532): Homolog of NCBI NO: 15240353 NR Description: calnexin 1 (CNX1) [Arabidopsis thaliana]
  misc_feature (5)..(532): Homolog of NCBI NO: 31321896 NR Description: putative papillar cell-specific calnexin
  misc_feature (1)..(530): Homolog of NCBI NO: 11131469 NR Description: Calnexin homolog precursor
  misc_feature (1)..(530): Homolog of NCBI NO: 21740628 NR Description: OSJNBb0012E08.10 [Oryza sativa (japonica
  misc_feature (106)..(481): Homolog of NCBI NO: 7441503 NR Description: calnexin - maize (fragment)
  misc_feature (6)..(530): Homolog of NCBI NO: 15240773 NR Description: calnexin, putative [Arabidopsis thaliana]
  misc_feature (6)..(530): Homolog of NCBI NO: 473878 NR Description: calnexin homolog
  misc_feature (9)..(530): Homolog of NCBI NO: 11131766 NR Description: Calnexin homolog precursor
  misc_feature (23)..(534): Homolog of NCBI NO: 18564808 NR Description: calnexin [Aspergillus niger]
  misc_feature (495)..(495): Xaa is any aa, unknown or other
MGGRALLLLLVSALLVQIRASDPLLYEPFDEDFEGRWIVSKKDEYQGVWKHAKSDGHEDYGLLVSDKARKYAIIKELDEPVTLNDGTVVLQFEVRLQNGLECGGAYIKYIRPQDAGWDAKEFDNETPYTIMFGPDKCGSTNKVHFILKHKNPKTGKYVEHHLKFPPSVPYDKLSHVYTAILKPDNEVRILIDGEEKKKANFLSADDFEPALIPSKTIPDPDDKKPEDWDERAKIPDPDAVKPDDWDEDAPMEIVDEEATKPEGWLDDEPEEIDDPEAAKPEDWDDEEDGEWEAPKIDNPKCEEAPGCGEWKRPMKQNPAYKGKWHAPMIDNPNYKGIWKPQEIPNPEYFELDRPDFDPIAAIGIEIWTMQDGILFDNILIADDEKVATSILEKTWKPKYDVEKEKEKAEEAAAGADGLSDFQKKIFDVLYKIADIPFLAPYKTKIIDVIEKGEKQPNITIGILVSVVIVFVTVLFKILFGGKKPVAPVKPAAEGXSKPKAAETDGAGSSGDKDEKEDEKDETGPRRRTRRGDIDLFLTCFSSSGVCLF

SEQ ID NO: 4055 - protein, 418 aa, Zea mays subsp. mays
  peptide (1)..(418): Ceres Seq. ID no. 13635563
  misc_feature (1)..(250): Pfam Name: Calreticulin family Pfam Description: Calreticulin family
  misc_feature (1)..(400): Homolog of NCBI NO: 21740628 NR Description: OSJNBb0012E08.10 [Oryza sativa (japonica
  misc_feature (1)..(351): Homolog of NCBI NO: 7441503 NR Description: calnexin - maize (fragment)
  misc_feature (1)..(400): Homolog of NCBI NO: 3334138 NR Description: CALNEXIN HOMOLOG PRECURSOR
  misc_feature (1)..(402): Homolog of NCBI NO: 15240353 NR Description: calnexin 1 (CNX1) [Arabidopsis thaliana]
  misc_feature (1)..(402): Homolog of NCBI NO: 31321896 NR Description: putative papillar cell-specific calnexin
  misc_feature (1)..(400): Homolog of NCBI NO: 11131469 NR Description: Calnexin homolog precursor
  misc_feature (1)..(400): Homolog of NCBI NO: 15240773 NR Description: calnexin, putative [Arabidopsis thaliana]
  misc_feature (1)..(400): Homolog of NCBI NO: 473878 NR Description: calnexin homolog
  misc_feature (1)..(400): Homolog of NCBI NO: 11131766 NR Description: Calnexin homolog precursor
  misc_feature (1)..(404): Homolog of NCBI NO: 18564808 NR Description: calnexin [Aspergillus niger]
  misc_feature (365)..(365): Xaa is any aa, unknown or other
MFGPDKCGSTNKVHFILKHKNPKTGKYVEHHLKFPPSVPYDKLSHVYTAILKPDNEVRILIDGEEKKKANFLSADDFEPALIPSKTIPDPDDKKPEDWDERAKIPDPDAVKPDDWDEDAPMEIVDEEATKPEGWLDDEPEEIDDPEAAKPEDWDDEEDGEWEAPKIDNPKCEEAPGCGEWKRPMKQNPAYKGKWHAPMIDNPNYKGIWKPQEIPNPEYFELDRPDFDPIAAIGIEIWTMQDGILFDNILIADDEKVATSILEKTWKPKYDVEKEKEKAEEAAAGADGLSDFQKKIFDVLYKIADIPFLAPYKTKIIDVIEKGEKQPNITIGILVSVVIVFVTVLFKILFGGKKPVAPVKPAAEGXSKPKAAETDGAGSSGDKDEKEDEKDETGPRRRTRRGDIDLFLTCFSSSGVCLF

SEQ ID NO: 4056 - DNA, 1845 bp, Zea mays subsp. mays
  misc_feature (1)..(1845): Ceres Seq. ID no. 13492086
  misc_feature: MA Experiment ID: 108522 Result: Down-regulated in Transcription
  misc_feature: MA Experiment 108522 PARAMETER Experiment Name: Zm_42deg_Heat_P Parameter: Age (day) Value: 8
  misc_feature: MA Experiment 108522 PARAMETER Experiment Name: Zm_42deg_Heat_P Parameter: Organism Value: Zea mays
  misc_feature: MA Experiment 108522 PARAMETER Experiment Name: Zm_42deg_Heat_P Parameter: Plant Line Value: 35A19
  misc_feature: MA Experiment 108522 PARAMETER Experiment Name: Zm_42deg_Heat_P Parameter: Temperature (deg C) Value: 42 vs. 22
  misc_feature: MA Experiment 108522 PARAMETER Experiment Name: Zm_42deg_Heat_P Parameter: Timepoint (hr) Value: 1
  misc_feature: MA Experiment 108522 PARAMETER Experiment Name: Zm_42deg_Heat_P Parameter: Tissue Value: Aerial
  misc_feature: MA Experiment ID: 108529 Result: Up-regulated in Transcription
  misc_feature: MA Experiment 108529 PARAMETER Experiment Name: Zm_Imbibed_Seeds_P Parameter: Age (day) Value: 5 vs. 2
  misc_feature: MA Experiment 108529 PARAMETER Experiment Name: Zm_Imbibed_Seeds_P Parameter: Organism Value: Zea mays
  misc_feature: MA Experiment 108529 PARAMETER Experiment Name: Zm_Imbibed_Seeds_P Parameter: Plant Line Value: 35A19
  misc_feature: MA Experiment 108529 PARAMETER Experiment Name: Zm_Imbibed_Seeds_P Parameter: Tissue Value: Roots vs. Embryo
  misc_feature: MA Experiment ID: 108544 Result: Up-regulated in Transcription
  misc_feature: MA Experiment ID: 108556 Result: Up-regulated in Transcription
  misc_feature: MA Experiment 108556 PARAMETER Experiment Name: Zm_Drought_P Parameter: Age (day) Value: 9
  misc_feature: MA Experiment 108556 PARAMETER Experiment Name: Zm_Drought_P Parameter: Organism Value: Zea mays
  misc_feature: MA Experiment 108556 PARAMETER Experiment Name: Zm_Drought_P Parameter: Plant Line Value: 35A19
  misc_feature: MA Experiment 108556 PARAMETER Experiment Name: Zm_Drought_P Parameter: Timepoint (hr) Value: 24
  misc_feature: MA Experiment 108556 PARAMETER Experiment Name: Zm_Drought_P Parameter: Tissue Value: Aerial
  misc_feature: MA Experiment 108556 PARAMETER Experiment Name: Zm_Drought_P Parameter: Treatment Value: Drought vs. No Drought
  misc_feature: MA Experiment ID: 108559 Result: Up-regulated in Transcription
  misc_feature: MA Experiment 108559 PARAMETER Experiment Name: Zm_5mM_NO_P Parameter: Age (day) Value: 8
  misc_feature: MA Experiment 108559 PARAMETER Experiment Name: Zm_5mM_NO_P Parameter: Organism Value: Zea mays
  misc_feature: MA Experiment 108559 PARAMETER Experiment Name: Zm_5mM_NO_P Parameter: Plant Line Value: 35A19
  misc_feature: MA Experiment 108559 PARAMETER Experiment Name: Zm_5mM_NO_P Parameter: Timepoint (hr) Value: 12
  misc_feature: MA Experiment 108559 PARAMETER Experiment Name: Zm_5mM_NO_P Parameter: Tissue Value: Aerial
  misc_feature: MA Experiment 108559 PARAMETER Experiment Name: Zm_5mM_NO_P Parameter: Treatment Value: 5mM NO vs. No Treatment
  misc_feature: MA Experiment ID: 108687 Result: Down-regulated in Transcription
  misc_feature: MA Experiment 108687 PARAMETER Experiment Name: Zm_Embryos-Flowers__P Parameter: Tissue Value: Embryo vs. Aerial+
  misc_feature: MA Experiment ID: 20000108 Result: Down-regulated in Transcription
  misc_feature: MA Experiment 20000108 PARAMETER Experiment Name: Zm_Root-Tips_P Parameter: Age (day) Value: 12
  misc_feature: MA Experiment 20000108 PARAMETER Experiment Name: Zm_Root-Tips_P Parameter: Organism Value: Zea mays
  misc_feature: MA Experiment 20000108 PARAMETER Experiment Name: Zm_Root-Tips_P Parameter: Tissue Value: Root tips vs. Root mid region    35
  misc_feature: MA Experiment 20000108 PARAMETER Experiment Name: Zm_Root-Tips_P Parameter: Tissue Value: Root tips vs. Root mid region   Sequence Listing-Misc Features (4)
  misc_feature: MA Experiment ID: 20000488 Result: Down-regulated in Transcription
  misc_feature: MA Experiment 20000488 PARAMETER Experiment Name: Zm_50mM_NH4NO3_L_to_H_P Parameter: Organism Value: Zea mays
  misc_feature: MA Experiment 20000488 PARAMETER Experiment Name: Zm_50mM_NH4NO3_L_to_H_P Parameter: Timepoint (hr) Value: 8
  misc_feature: MA Experiment 20000488 PARAMETER Experiment Name: Zm_50mM_NH4NO3_L_to_H_P Parameter: Tissue Value: Leaves
  misc_feature: MA Experiment 20000488 PARAMETER Experiment Name: Zm_50mM_NH4NO3_L_to_H_P Parameter: Treatment Value: 50mM NH4NO3 vs. 100mM Mannitol
  misc_feature: MA Experiment ID: 20000535 Result: Down-regulated in Transcription
  misc_feature: MA Experiment 20000535 PARAMETER Experiment Name: Zm_Hybrid_Seed_Dev_P Parameter: DAP Value: 30 vs. 12
  misc_feature: MA Experiment 20000535 PARAMETER Experiment Name: Zm_Hybrid_Seed_Dev_P Parameter: Organism Value: Zea mays
  misc_feature: MA Experiment 20000535 PARAMETER Experiment Name: Zm_Hybrid_Seed_Dev_P Parameter: Plant Line Value: 35A19
  misc_feature: MA Experiment 20000535 PARAMETER Experiment Name: Zm_Hybrid_Seed_Dev_P Parameter: Tissue Value: Embryo vs. Unfert Floret
  misc_feature: MA Experiment ID: 20000627 Result: Up-regulated in Transcription
  misc_feature: MA Experiment 20000627 PARAMETER Experiment Name: Zm_Herbicide-Treatments_P Parameter: Timepoint (hr) Value: 12
  misc_feature: MA Experiment 20000627 PARAMETER Experiment Name: Zm_Herbicide-Treatments_P Parameter: Tissue Value: Aerial
  misc_feature: MA Experiment 20000627 PARAMETER Experiment Name: Zm_Herbicide-Treatments_P Parameter: Treatment Value: Finale vs. No Treatment
  misc_feature: MA Experiment ID: 20001608 Result: Down-regulated in Transcription
  misc_feature: MA Experiment 20001608 PARAMETER Experiment Name: Zm_50ppm_KNO3_L-to-H_P Parameter: Age (day) Value: 21
  misc_feature: MA Experiment 20001608 PARAMETER Experiment Name: Zm_50ppm_KNO3_L-to-H_P Parameter: Organism Value: Zea mays
  misc_feature: MA Experiment 20001608 PARAMETER Experiment Name: Zm_50ppm_KNO3_L-to-H_P Parameter: Plant Line Value: 35A19
  misc_feature: MA Experiment 20001608 PARAMETER Experiment Name: Zm_50ppm_KNO3_L-to-H_P Parameter: Timepoint (hr) Value: 48
  misc_feature: MA Experiment 20001608 PARAMETER Experiment Name: Zm_50ppm_KNO3_L-to-H_P Parameter: Tissue Value: Shoots
  misc_feature: MA Experiment 20001608 PARAMETER Experiment Name: Zm_50ppm_KNO3_L-to-H_P Parameter: Treatment Value: 50ppm KNO3 vs. 50ppm KCl
atctgctctgctccggtccgttccgctccttcctccccctatctagctagccttcccgttcctgcatcgcggcggagatgggcgcctccaccacgccgctcgcgtcggcggcggcgctgcttctgctgctgctcgcgccgctcgccgcggcggcggacagcatgtcgatcgtctcctacggcgagcggagcgaggaggaggcgcggcggatgtacgccgagtggatggcggcgcacggccggacctacaacgccgtcggcgaggaggagcgcaggttcgaggtgttcagggacaacctccgctacgtcgacgcccacaacgccgccgccgacgcgggcgtccactccttccgcctcgggctcaaccgcttcgccgacctcaccaacgacgagtaccgcgccacctacctcggcgtcaggagcaggccgcagagggagaggaggctcggtgacaggtacctggccggcgacaacgaggacctgccggagtccgtcgactggcgggccaagggcgccgtcgcggagatcaaggaccagggcagctgcgggagttgctgggctttctcaacaatagcggctgtggaaggcatcaaccagattgttactggcgacatgatctccttgtctgagcaggagcttgttgactgtgacacttcatacaaccaggggtgcaatggaggtctgatggactatgcgtttgagttcatcatcaacaatggcggaatcgacaccgaggaggattacccttacaagggcacggacggacggtgtgatgtcaacaggaaaaacgccaaggttgttactatcgacagctatgaagatgtaccagcgaacagtgagaaaagtctgcagaaggcagttgcgaaccagcccatcagtgttgcaattgaggctggtggcagagcatttcagctctacaactcgggtatcttcacaggaacctgtggaacagcgttggaccatggtgtcacggccgtcggctacggcacagagaacggcaaggactactggatcgtgaagaactcttggggcagcagctggggcgagtccggctacgtcaggatggagcgcaacatcaaggcgtccagcggcaagtgtggtatcgccgttgagccgtcgtaccctctgaagaagggcgccaaccccccgaaccctgggccgaccccgccttcccccaccccgccgcccaccgtctgcgacaactactactcgtgccccgacagcaccacctgctgctgcatctacgagtacggcaagtactgcttcgcctggggctgctgcccgctcgagggcgccacctgctgcgacgaccactacagctgctgcccccatgactaccccgtctgcaacgtcaagcagggaacctgcctcatgggcaaggacagcccactgtcactgtcagtgaaggctacgaagcgcaccctggccaagccgcactgggctttctctggcaacacagctgctgatggcatgaagagcagcgcatgagaaaaacgcagcatggcattaggccgtcaacagccagcatgattagagcccccctgcatgcagaatgatcacccggtcccgtagttcacgacgaaagcatggctgggcggccgctgtttacggatttacttatatcactatagtaggtactcctcctgtacataagcctgaaaaaaaaatgggttcagttgtttatggaactctgccaaatttgcttttgcatgccatgtaaaaatccagctagctcttgccaagcttcacctgcgcagttcaacaggactgcgattgatattcggtgtaatggaagtatttatcggaacaatcagcaatgttatgctatattcatttcttggacgtg

SEQ ID NO: 4057 - protein, 469 aa, Zea mays subsp. mays
  peptide (1)..(469): Ceres Seq. ID no. 13492087
  misc_feature (135)..(350): Pfam Name: Papain family cysteine protease Pfam Description: Papain family cysteine protease
  misc_feature (1)..(469): Homolog of NCBI NO: 6682829 NR Description: cysteine protease component of protease-inhibitor
  misc_feature (1)..(469): Homolog of NCBI NO: 7435806 NR Description: cysteine proteinase mir3 (EC 3.4.22.-) - maize
  misc_feature (8)..(469): Homolog of NCBI NO: 129231 NR Description: Oryzain alpha chain precursor
  misc_feature (8)..(469): Homolog of NCBI NO: 38345906 NR Description: OSJNBb0059K02.8 [Oryza sativa (japonica
  misc_feature (8)..(432): Homolog of NCBI NO: 10241433 NR Description: putative oryzain alpha precursor [Oryza sativa
  misc_feature (8)..(455): Homolog of NCBI NO: 14517542 NR Description: F2G19.31/F2G19.31 [Arabidopsis thaliana]
  misc_feature (8)..(455): Homolog of NCBI NO: 18401614 NR Description: cysteine proteinase RD21A [Arabidopsis thaliana]
  misc_feature (8)..(434): Homolog of NCBI NO: 18141285 NR Description: senescence-associated cysteine protease [Brassica
  misc_feature (15)..(457): Homolog of NCBI NO: 18422289 NR Description: cysteine proteinase RD21A [Arabidopsis thaliana]
  misc_feature (14)..(463): Homolog of NCBI NO: 7435791 NR Description: cysteine proteinase (EC 3.4.22.-) 3 precursor - bean >gi|2511693|emb|CAB17076.1| cysteine proteinase precursor
MGASTTPLASAAALLLLLLAPLAAAADSMSIVSYGERSEEEARRMYAEWMAAHGRTYNAVGEEERRFEVFRDNLRYVDAHNAAADAGVHSFRLGLNRFADLTNDEYRATYLGVRSRPQRERRLGDRYLAGDNEDLPESVDWRAKGAVAEIKDQGSCGSCWAFSTIAAVEGINQIVTGDMISLSEQELVDCDTSYNQGCNGGLMDYAFEFIINNGGIDTEEDYPYKGTDGRCDVNRKNAKVVTIDSYEDVPANSEKSLQKAVANQPISVAIEAGGRAFQLYNSGIFTGTCGTALDHGVTAVGYGTENGKDYWIVKNSWGSSWGESGYVRMERNIKASSGKCGIAVEPSYPLKKGANPPNPGPTPPSPTPPPTVCDNYYSCPDSTTCCCIYEYGKYCFAWGCCPLEGATCCDDHYSCCPHDYPVCNVKQGTCLMGKDSPLSLSVKATKRTLAKPHWAFSGNTAADGMKSSA

SEQ ID NO: 4058 - protein, 441 aa, Zea mays subsp. mays
  peptide (1)..(441): Ceres Seq. ID no. 13492088
  misc_feature (107)..(322): Pfam Name: Papain family cysteine protease Pfam Description: Papain family cysteine protease
  misc_feature (1)..(441): Homolog of NCBI NO: 6682829 NR Description: cysteine protease component of protease-inhibitor
  misc_feature (1)..(441): Homolog of NCBI NO: 7435806 NR Description: cysteine proteinase mir3 (EC 3.4.22.-) - maize
  misc_feature (1)..(441): Homolog of NCBI NO: 129231 NR Description: Oryzain alpha chain precursor
  misc_feature (1)..(441): Homolog of NCBI NO: 38345906 NR Description: OSJNBb0059K02.8 [Oryza sativa (japonica
  misc_feature (1)..(404): Homolog of NCBI NO: 10241433 NR Description: putative oryzain alpha precursor [Oryza sativa
  misc_feature (1)..(427): Homolog of NCBI NO: 14517542 NR Description: F2G19.31/F2G19.31 [Arabidopsis thaliana]
  misc_feature (1)..(427): Homolog of NCBI NO: 18401614 NR Description: cysteine proteinase RD21A [Arabidopsis thaliana]
  misc_feature (1)..(406): Homolog of NCBI NO: 18141285 NR Description: senescence-associated cysteine protease [Brassica
  misc_feature (1)..(429): Homolog of NCBI NO: 18422289 NR Description: cysteine proteinase RD21A [Arabidopsis thaliana]
  misc_feature (1)..(435): Homolog of NCBI NO: 7435791 NR Description: cysteine proteinase (EC 3.4.22.-) 3 precursor - bean >gi|2511693|emb|CAB17076.1| cysteine proteinase precursor
MSIVSYGERSEEEARRMYAEWMAAHGRTYNAVGEEERRFEVFRDNLRYVDAHNAAADAGVHSFRLGLNRFADLTNDEYRATYLGVRSRPQRERRLGDRYLAGDNEDLPESVDWRAKGAVAEIKDQGSCGSCWAFSTIAAVEGINQIVTGDMISLSEQELVDCDTSYNQGCNGGLMDYAFEFIINNGGIDTEEDYPYKGTDGRCDVNRKNAKVVTIDSYEDVPANSEKSLQKAVANQPISVAIEAGGRAFQLYNSGIFTGTCGTALDHGVTAVGYGTENGKDYWIVKNSWGSSWGESGYVRMERNIKASSGKCGIAVEPSYPLKKGANPPNPGPTPPSPTPPPTVCDNYYSCPDSTTCCCIYEYGKYCFAWGCCPLEGATCCDDHYSCCPHDYPVCNVKQGTCLMGKDSPLSLSVKATKRTLAKPHWAFSGNTAADGMKSSA

SEQ ID NO: 4059 - protein, 425 aa, Zea mays subsp. mays
  peptide (1)..(425): Ceres Seq. ID no. 13492089
  misc_feature (91)..(306): Pfam Name: Papain family cysteine protease Pfam Description: Papain family cysteine protease
  misc_feature (1)..(425): Homolog of NCBI NO: 6682829 NR Description: cysteine protease component of protease-inhibitor
  misc_feature (1)..(425): Homolog of NCBI NO: 7435806 NR Description: cysteine proteinase mir3 (EC 3.4.22.-) - maize
  misc_feature (1)..(425): Homolog of NCBI NO: 129231 NR Description: Oryzain alpha chain precursor
  misc_feature (1)..(425): Homolog of NCBI NO: 38345906 NR Description: OSJNBb0059K02.8 [Oryza sativa (japonica
  misc_feature (1)..(388): Homolog of NCBI NO: 10241433 NR Description: putative oryzain alpha precursor [Oryza sativa
  misc_feature (1)..(411): Homolog of NCBI NO: 14517542 NR Description: F2G19.31/F2G19.31 [Arabidopsis thaliana]
  misc_feature (1)..(411): Homolog of NCBI NO: 18401614 NR Description: cysteine proteinase RD21A [Arabidopsis thaliana]
  misc_feature (1)..(390): Homolog of NCBI NO: 18141285 NR Description: senescence-associated cysteine protease [Brassica
  misc_feature (1)..(413): Homolog of NCBI NO: 18422289 NR Description: cysteine proteinase RD21A [Arabidopsis thaliana]
  misc_feature (1)..(419): Homolog of NCBI NO: 7435791 NR Description: cysteine proteinase (EC 3.4.22.-) 3 precursor - bean >gi|2511693|emb|CAB17076.1| cysteine proteinase precursor
MYAEWMAAHGRTYNAVGEEERRFEVFRDNLRYVDAHNAAADAGVHSFRLGLNRFADLTNDEYRATYLGVRSRPQRERRLGDRYLAGDNEDLPESVDWRAKGAVAEIKDQGSCGSCWAFSTIAAVEGINQIVTGDMISLSEQELVDCDTSYNQGCNGGLMDYAFEFIINNGGIDTEEDYPYKGTDGRCDVNRKNAKVVTIDSYEDVPANSEKSLQKAVANQPISVAIEAGGRAFQLYNSGIFTGTCGTALDHGVTAVGYGTENGKDYWIVKNSWGSSWGESGYVRMERNIKASSGKCGIAVEPSYPLKKGANPPNPGPTPPSPTPPPTVCDNYYSCPDSTTCCCIYEYGKYCFAWGCCPLEGATCCDDHYSCCPHDYPVCNVKQGTCLMGKDSPLSLSVKATKRTLAKPHWAFSGNTAADGMKSSA

SEQ ID NO: 4060 - DNA, 1434 bp, Zea mays subsp. mays
  misc_feature (1)..(1434): Ceres Seq. ID no. 12345959
  misc_feature: MA Experiment ID: 108522 Result: Up-regulated in Transcription
  misc_feature: MA Experiment 108522 PARAMETER Experiment Name: Zm_42deg_Heat_P Parameter: Age (day) Value: 8
  misc_feature: MA Experiment 108522 PARAMETER Experiment Name: Zm_42deg_Heat_P Parameter: Organism Value: Zea mays
  misc_feature: MA Experiment 108522 PARAMETER Experiment Name: Zm_42deg_Heat_P Parameter: Plant Line Value: 35A19
  misc_feature: MA Experiment 108522 PARAMETER Experiment Name: Zm_42deg_Heat_P Parameter: Temperature (deg C) Value: 42 vs. 22
  misc_feature: MA Experiment 108522 PARAMETER Experiment Name: Zm_42deg_Heat_P Parameter: Timepoint (hr) Value: 1
  misc_feature: MA Experiment 108522 PARAMETER Experiment Name: Zm_42deg_Heat_P Parameter: Tissue Value: Aerial
gacacacgaaattctcaggtcccggtcccgggtccaggcacccttctcgctcggttgctcgggagctttccccttcctgttcctgaagcttccgacatccgaccgcctcctcctcctcgttctactcgccgccccttctaggatcatccagaggcgtgccggtgaaacgcgagagcggtgaggcatggcgatgcagacgggggtcgcgacctccaaggtcctcatcctcgtcggtgcagggatgacgggctcgatcctgctgcggaatggccgcttatctgatgtgttgggagaactccaggagattatgaagggtgtaaatcaaggaactgcttcgggtccctatgacattgcacttattcaagctcagattcggaatttagcccaagaagtcagagatttgacattgtcaaagcccattaccatactgaatggcaaatctgactcgggaggcagtttatcatcctacatactgccagcagcagcagttggagcaatgggttattgctacatgtggtggaaggggttgtctctctcagatgtcatgtttgtcacaaaacacaacatggcaaatgctgttcagagcatgtcaaagcagttggagcaagtttcatcagcactagctgcaacaaaaagacatctaactcaacggcttgagaatttggatggcaaaatggatgaacaagtagaggtctccaaagctattagaaatgaggtcaatgatgttaaagatgacctgtctcaaattggatttgatgtcgaatcaattcagaaaatggttgctggattggagggaaagatcgagttacttgagaacaaacaggacgtggctaatactggtatctggtacctctgccaagtagcaggcggtttaaaagatggaataaacaccaggtttttccaggaaaccagtgagaagctgaagctctcacattcagctcaacctgaaaacaagccagtgaaggggcttgaatttttttcggaaagcgccatggaacagaaagtagctgactccaaaccaattgcggtgacagtcgacgctgagaagcctgagaaaaccgctgctgtaatgggcaccacagtgcacaggtctatcaggttctcatatcggaaggcaggccttgctttgtgatcaaatcctctccgcttgagatgcacgtggccttcctggttgcttttcttttttggcaacaaccttcctggttgctttgtctgatggtcagaaaacatggaagaataacctgcaactggagtgacagaatttcttttccccgcagtagacaggtgtgcgttatttggtctgatttgaaactatcttcagtccgctatcaatttttttccttggattttgattcattttatgtttcgacttgttgccttgtatactgtaaaggcattggaaagaatacataaaacacgaatgttttttttgcc

SEQ ID NO: 4061 - protein, 315 aa, Zea mays subsp. mays
  peptide (1)..(315): Ceres Seq. ID no. 12345960
  misc_feature (11)..(225): Homolog of NCBI NO: 22329773 NR Description: Expressed protein
  misc_feature (7)..(220): Homolog of NCBI NO: 30688826 NR Description: expressed protein [Arabidopsis thaliana]
  misc_feature (12)..(213): Homolog of NCBI NO: 34894218 NR Description: P0439B06.30 [Oryza sativa (japonica
  misc_feature (1)..(225): Homolog of NCBI NO: 34906300 NR Description: unnamed protein product [Oryza sativa (japonica
  misc_feature (1)..(249): Homolog of NCBI NO: 7487252 NR Description: hypothetical protein At2g02730 [imported] -
  misc_feature (1)..(249): Homolog of NCBI NO: 15227027 NR Description: expressed protein
  misc_feature (1)..(229): Homolog of NCBI NO: 25361065 NR Description: protein T7N9.6 [imported] - Arabidopsis thaliana
  misc_feature (1)..(229): Homolog of NCBI NO: 21537323 NR Description: unknown [Arabidopsis thaliana]
  misc_feature (1)..(229): Homolog of NCBI NO: 18396143 NR Description: bZIP family transcription factor
  misc_feature (1)..(303): Homolog of NCBI NO: 18390460 NR Description: expressed protein
MAMQTGVATSKVLILVGAGMTGSILLRNGRLSDVLGELQEIMKGVNQGTASGPYDIALIQAQIRNLAQEVRDLTLSKPITILNGKSDSGGSLSSYILPAAAVGAMGYCYMWWKGLSLSDVMFVTKHNMANAVQSMSKQLEQVSSALAATKRHLTQRLENLDGKMDEQVEVSKAIRNEVNDVKDDLSQIGFDVESIQKMVAGLEGKIELLENKQDVANTGIWYLCQVAGGLKDGINTRFFQETSEKLKLSHSAQPENKPVKGLEFFSESAMEQKVADSKPIAVTVDAEKPEKTAAVMGTTVHRSIRFSYRKAGLAL

SEQ ID NO: 4062 - protein, 313 aa, Zea mays subsp. mays
  peptide (1)..(313): Ceres Seq. ID no. 12345961
  misc_feature (9)..(223): Homolog of NCBI NO: 22329773 NR Description: Expressed protein
  misc_feature (5)..(218): Homolog of NCBI NO: 30688826 NR Description: expressed protein [Arabidopsis thaliana]
  misc_feature (10)..(211): Homolog of NCBI NO: 34894218 NR Description: P0439B06.30 [Oryza sativa (japonica
  misc_feature (1)..(223): Homolog of NCBI NO: 34906300 NR Description: unnamed protein product [Oryza sativa (japonica
  misc_feature (1)..(247): Homolog of NCBI NO: 7487252 NR Description: hypothetical protein At2g02730 [imported] -
  misc_feature (1)..(247): Homolog of NCBI NO: 15227027 NR Description: expressed protein
  misc_feature (1)..(227): Homolog of NCBI NO: 25361065 NR Description: protein T7N9.6 [imported] - Arabidopsis thaliana
  misc_feature (1)..(227): Homolog of NCBI NO: 21537323 NR Description: unknown [Arabidopsis thaliana]
  misc_feature (1)..(227): Homolog of NCBI NO: 18396143 NR Description: bZIP family transcription factor
  misc_feature (1)..(301): Homolog of NCBI NO: 18390460 NR Description: expressed protein
MQTGVATSKVLILVGAGMTGSILLRNGRLSDVLGELQEIMKGVNQGTASGPYDIALIQAQIRNLAQEVRDLTLSKPITILNGKSDSGGSLSSYILPAAAVGAMGYCYMWWKGLSLSDVMFVTKHNMANAVQSMSKQLEQVSSALAATKRHLTQRLENLDGKMDEQVEVSKAIRNEVNDVKDDLSQIGFDVESIQKMVAGLEGKIELLENKQDVANTGIWYLCQVAGGLKDGINTRFFQETSEKLKLSHSAQPENKPVKGLEFFSESAMEQKVADSKPIAVTVDAEKPEKTAAVMGTTVHRSIRFSYRKAGLAL

SEQ ID NO: 4063 - protein, 296 aa, Zea mays subsp. mays
  peptide (1)..(296): Ceres Seq. ID no. 12345962
  misc_feature (1)..(206): Homolog of NCBI NO: 22329773 NR Description: Expressed protein
  misc_feature (1)..(201): Homolog of NCBI NO: 30688826 NR Description: expressed protein [Arabidopsis thaliana]
  misc_feature (1)..(194): Homolog of NCBI NO: 34894218 NR Description: P0439B06.30 [Oryza sativa (japonica
  misc_feature (1)..(206): Homolog of NCBI NO: 34906300 NR Description: unnamed protein product [Oryza sativa (japonica
  misc_feature (1)..(230): Homolog of NCBI NO: 7487252 NR Description: hypothetical protein At2g02730 [imported] -
  misc_feature (1)..(230): Homolog of NCBI NO: 15227027 NR Description: expressed protein
  misc_feature (1)..(210): Homolog of NCBI NO: 25361065 NR Description: protein T7N9.6 [imported] - Arabidopsis thaliana
  misc_feature (1)..(210): Homolog of NCBI NO: 21537323 NR Description: unknown [Arabidopsis thaliana]
  misc_feature (1)..(210): Homolog of NCBI NO: 18396143 NR Description: bZIP family transcription factor
  misc_feature (1)..(284): Homolog of NCBI NO: 18390460 NR Description: expressed protein
MTGSILLRNGRLSDVLGELQEIMKGVNQGTASGPYDIALIQAQIRNLAQEVRDLTLSKPITILNGKSDSGGSLSSYILPAAAVGAMGYCYMWWKGLSLSDVMFVTKHNMANAVQSMSKQLEQVSSALAATKRHLTQRLENLDGKMDEQVEVSKAIRNEVNDVKDDLSQIGFDVESIQKMVAGLEGKIELLENKQDVANTGIWYLCQVAGGLKDGINTRFFQETSEKLKLSHSAQPENKPVKGLEFFSESAMEQKVADSKPIAVTVDAEKPEKTAAVMGTTVHRSIRFSYRKAGLAL

SEQ ID NO: 4064 - DNA, 1050 bp, Zea mays subsp. mays
  misc_feature (1)..(1050): Ceres Seq. ID no. 12361487
  misc_feature: MA Experiment ID: 108504 Result: Up-regulated in Transcription
  misc_feature: MA Experiment 108504 PARAMETER Experiment Name: Zm_Drought_P Parameter: Age (day) Value: 8
  misc_feature: MA Experiment 108504 PARAMETER Experiment Name: Zm_Drought_P Parameter: Organism Value: Zea mays
  misc_feature: MA Experiment 108504 PARAMETER Experiment Name: Zm_Drought_P Parameter: Plant Line Value: 35A19
  misc_feature: MA Experiment 108504 PARAMETER Experiment Name: Zm_Drought_P Parameter: Timepoint (hr) Value: 12
  misc_feature: MA Experiment 108504 PARAMETER Experiment Name: Zm_Drought_P Parameter: Tissue Value: Aerial
  misc_feature: MA Experiment 108504 PARAMETER Experiment Name: Zm_Drought_P Parameter: Treatment Value: Drought vs. No Drought
  misc_feature: MA Experiment ID: 108528 Result: Down-regulated in Transcription
  misc_feature: MA Experiment 108528 PARAMETER Experiment Name: Zm_Imbibed_Seeds_P Parameter: Age (day) Value: 5 vs. 2
  misc_feature: MA Experiment 108528 PARAMETER Experiment Name: Zm_Imbibed_Seeds_P Parameter: Organism Value: Zea mays
  misc_feature: MA Experiment 108528 PARAMETER Experiment Name: Zm_Imbibed_Seeds_P Parameter: Plant Line Value: 35A19
  misc_feature: MA Experiment 108528 PARAMETER Experiment Name: Zm_Imbibed_Seeds_P Parameter: Tissue Value: Aerial vs. Embryo
  misc_feature: MA Experiment ID: 108529 Result: Down-regulated in Transcription
  misc_feature: MA Experiment 108529 PARAMETER Experiment Name: Zm_Imbibed_Seeds_P Parameter: Age (day) Value: 5 vs. 2
  misc_feature: MA Experiment 108529 PARAMETER Experiment Name: Zm_Imbibed_Seeds_P Parameter: Organism Value: Zea mays
  misc_feature: MA Experiment 108529 PARAMETER Experiment Name: Zm_Imbibed_Seeds_P Parameter: Plant Line Value: 35A19
  misc_feature: MA Experiment 108529 PARAMETER Experiment Name: Zm_Imbibed_Seeds_P Parameter: Tissue Value: Roots vs. Embryo
  misc_feature: MA Experiment ID: 108530 Result: Down-regulated in Transcription
  misc_feature: MA Experiment 108530 PARAMETER Experiment Name: Zm_Imbibed_Seeds_P Parameter: Age (day) Value: 6 vs. 2
  misc_feature: MA Experiment 108530 PARAMETER Experiment Name: Zm_Imbibed_Seeds_P Parameter: Organism Value: Zea mays
  misc_feature: MA Experiment 108530 PARAMETER Experiment Name: Zm_Imbibed_Seeds_P Parameter: Plant Line Value: 35A19
  misc_feature: MA Experiment 108530 PARAMETER Experiment Name: Zm_Imbibed_Seeds_P Parameter: Tissue Value: Aerial vs. Embryo
  misc_feature: MA Experiment ID: 108532 Result: Up-regulated in Transcription
  misc_feature: MA Experiment 108532 PARAMETER Experiment Name: Zm_20uM_KNO3_H-to-L_P Parameter: Age (day) Value: 11
  misc_feature: MA Experiment 108532 PARAMETER Experiment Name: Zm_20uM_KNO3_H-to-L_P Parameter: Organism Value: Zea mays
  misc_feature: MA Experiment 108532 PARAMETER Experiment Name: Zm_20uM_KNO3_H-to-L_P Parameter: Plant Line Value: 35A19
  misc_feature: MA Experiment 108532 PARAMETER Experiment Name: Zm_20uM_KNO3_H-to-L_P Parameter: Timepoint (hr) Value: 16
  misc_feature: MA Experiment 108532 PARAMETER Experiment Name: Zm_20uM_KNO3_H-to-L_P Parameter: Tissue Value: Roots
  misc_feature: MA Experiment 108532 PARAMETER Experiment Name: Zm_20uM_KNO3_H-to-L_P Parameter: Treatment Value: 20uM KNO3 vs. 60mM KNO3
  misc_feature: MA Experiment ID: 108540 Result: Up-regulated in Transcription
  misc_feature: MA Experiment 108540 PARAMETER Experiment Name: Zm_20percent_PEG_P Parameter: Age (day) Value: 8
  misc_feature: MA Experiment 108540 PARAMETER Experiment Name: Zm_20percent_PEG_P Parameter: Organism Value: Zea mays
  misc_feature: MA Experiment 108540 PARAMETER Experiment Name: Zm_20percent_PEG_P Parameter: Plant Line Value: 35A19
  misc_feature: MA Experiment 108540 PARAMETER Experiment Name: Zm_20percent_PEG_P Parameter: Timepoint (hr) Value: 6
  misc_feature: MA Experiment 108540 PARAMETER Experiment Name: Zm_20percent_PEG_P Parameter: Tissue Value: Aerial
  misc_feature: MA Experiment 108540 PARAMETER Experiment Name: Zm_20percent_PEG_P Parameter: Treatment Value: 20percent PEG vs. No Treatment
  misc_feature: MA Experiment ID: 108543 Result: Down-regulated in Transcription
  misc_feature: MA Experiment ID: 108544 Result: Up-regulated in Transcription
  misc_feature: MA Experiment ID: 108545 Result: Down-regulated in Transcription
  misc_feature: MA Experiment 108545 PARAMETER Experiment Name: Zm_Imbibed_Seeds_P Parameter: Age (day) Value: 3 vs. 2
  misc_feature: MA Experiment 108545 PARAMETER Experiment Name: Zm_Imbibed_Seeds_P Parameter: Organism Value: Zea mays
  misc_feature: MA Experiment 108545 PARAMETER Experiment Name: Zm_Imbibed_Seeds_P Parameter: Plant Line Value: 35A19
  misc_feature: MA Experiment 108545 PARAMETER Experiment Name: Zm_Imbibed_Seeds_P Parameter: Tissue Value: Aerial vs. Embryo
  misc_feature: MA Experiment ID: 108546 Result: Down-regulated in Transcription
  misc_feature: MA Experiment 108546 PARAMETER Experiment Name: Zm_Imbibed_Seeds_P Parameter: Age (day) Value: 3 vs. 2
  misc_feature: MA Experiment 108546 PARAMETER Experiment Name: Zm_Imbibed_Seeds_P Parameter: Organism Value: Zea mays
  misc_feature: MA Experiment 108546 PARAMETER Experiment Name: Zm_Imbibed_Seeds_P Parameter: Plant Line Value: 35A19
  misc_feature: MA Experiment 108546 PARAMETER Experiment Name: Zm_Imbibed_Seeds_P Parameter: Tissue Value: Roots vs. Embryo
  misc_feature: MA Experiment ID: 108547 Result: Down-regulated in Transcription
  misc_feature: MA Experiment 108547 PARAMETER Experiment Name: Zm_Imbibed_Seeds_P Parameter: Age (day) Value: 4 vs. 2
  misc_feature: MA Experiment 108547 PARAMETER Experiment Name: Zm_Imbibed_Seeds_P Parameter: Organism Value: Zea mays
  misc_feature: MA Experiment 108547 PARAMETER Experiment Name: Zm_Imbibed_Seeds_P Parameter: Plant Line Value: 35A19
  misc_feature: MA Experiment 108547 PARAMETER Experiment Name: Zm_Imbibed_Seeds_P Parameter: Tissue Value: Aerial vs. Embryo
  misc_feature: MA Experiment ID: 108548 Result: Down-regulated in Transcription
  misc_feature: MA Experiment 108548 PARAMETER Experiment Name: Zm_20uM_KNO3_H-to-L_P Parameter: Age (day) Value: 11
  misc_feature: MA Experiment 108548 PARAMETER Experiment Name: Zm_20uM_KNO3_H-to-L_P Parameter: Organism Value: Zea mays
  misc_feature: MA Experiment 108548 PARAMETER Experiment Name: Zm_20uM_KNO3_H-to-L_P Parameter: Plant Line Value: 35A19
  misc_feature: MA Experiment 108548 PARAMETER Experiment Name: Zm_20uM_KNO3_H-to-L_P Parameter: Timepoint (hr) Value: 4
  misc_feature: MA Experiment 108548 PARAMETER Experiment Name: Zm_20uM_KNO3_H-to-L_P Parameter: Tissue Value: Roots
  misc_feature: MA Experiment 108548 PARAMETER Experiment Name: Zm_20uM_KNO3_H-to-L_P Parameter: Treatment Value: 20uM KNO3 vs. 60mM KNO3
  misc_feature: MA Experiment ID: 108556 Result: Up-regulated in Transcription
  misc_feature: MA Experiment 108556 PARAMETER Experiment Name: Zm_Drought_P Parameter: Age (day) Value: 9
  misc_feature: MA Experiment 108556 PARAMETER Experiment Name: Zm_Drought_P Parameter: Organism Value: Zea mays
  misc_feature: MA Experiment 108556 PARAMETER Experiment Name: Zm_Drought_P Parameter: Plant Line Value: 35A19
  misc_feature: MA Experiment 108556 PARAMETER Experiment Name: Zm_Drought_P Parameter: Timepoint (hr) Value: 24
  misc_feature: MA Experiment 108556 PARAMETER Experiment Name: Zm_Drought_P Parameter: Tissue Value: Aerial
  misc_feature: MA Experiment 108556 PARAMETER Experiment Name: Zm_Drought_P Parameter: Treatment Value: Drought vs. No Drought
  misc_feature: MA Experiment ID: 108597 Result: Up-regulated in Transcription
  misc_feature: MA Experiment 108597 PARAMETER Experiment Name: Zm_100uM_ABA_P Parameter: Age (day) Value: 9
  misc_feature: MA Experiment 108597 PARAMETER Experiment Name: Zm_100uM_ABA_P Parameter: Organism Value: Zea mays
  misc_feature: MA Experiment 108597 PARAMETER Experiment Name: Zm_100uM_ABA_P Parameter: Plant Line Value: 35A19
  misc_feature: MA Experiment 108597 PARAMETER Experiment Name: Zm_100uM_ABA_P Parameter: Timepoint (hr) Value: 24
  misc_feature: MA Experiment 108597 PARAMETER Experiment Name: Zm_100uM_ABA_P Parameter: Tissue Value: Aerial
  misc_feature: MA Experiment 108597 PARAMETER Experiment Name: Zm_100uM_ABA_P Parameter: Treatment Value: 100uM ABA vs. No Treatment
  misc_feature: MA Experiment ID: 108599 Result: Down-regulated in Transcription
  misc_feature: MA Experiment 108599 PARAMETER Experiment Name: Zm_RT1_P Parameter: Age (day) Value: 11
  misc_feature: MA Experiment 108599 PARAMETER Experiment Name: Zm_RT1_P Parameter: Organism Value: Zea mays
  misc_feature: MA Experiment 108599 PARAMETER Experiment Name: Zm_RT1_P Parameter: Plant Line Value: rt1 mut vs. rt1 wt
  misc_feature: MA Experiment 108599 PARAMETER Experiment Name: Zm_RT1_P Parameter: Tissue Value: Roots
  misc_feature: MA Experiment ID: 20000487 Result: Down-regulated in Transcription
  misc_feature: MA Experiment 20000487 PARAMETER Experiment Name: Zm_50mM_NH4NO3_L_to_H_P Parameter: Organism Value: Zea mays
  misc_feature: MA Experiment 20000487 PARAMETER Experiment Name: Zm_50mM_NH4NO3_L_to_H_P Parameter: Timepoint (hr) Value: 4
  misc_feature: MA Experiment 20000487 PARAMETER Experiment Name: Zm_50mM_NH4NO3_L_to_H_P Parameter: Tissue Value: Leaves
  misc_feature: MA Experiment 20000487 PARAMETER Experiment Name: Zm_50mM_NH4NO3_L_to_H_P Parameter: Treatment Value: 50mM NH4NO3 vs. 100mM Mannitol
  misc_feature: MA Experiment ID: 20000535 Result: Down-regulated in Transcription
  misc_feature: MA Experiment 20000535 PARAMETER Experiment Name: Zm_Hybrid_Seed_Dev_P Parameter: DAP Value: 30 vs. 12
  misc_feature: MA Experiment 20000535 PARAMETER Experiment Name: Zm_Hybrid_Seed_Dev_P Parameter: Organism Value: Zea mays
  misc_feature: MA Experiment 20000535 PARAMETER Experiment Name: Zm_Hybrid_Seed_Dev_P Parameter: Plant Line Value: 35A19
  misc_feature: MA Experiment 20000535 PARAMETER Experiment Name: Zm_Hybrid_Seed_Dev_P Parameter: Tissue Value: Embryo vs. Unfert Floret
  misc_feature: MA Experiment ID: 20000626 Result: Up-regulated in Transcription
  misc_feature: MA Experiment 20000626 PARAMETER Experiment Name: Zm_Herbicide-Treatments_P Parameter: Timepoint (hr) Value: 12
  misc_feature: MA Experiment 20000626 PARAMETER Experiment Name: Zm_Herbicide-Treatments_P Parameter: Tissue Value: Aerial
  misc_feature: MA Experiment 20000626 PARAMETER Experiment Name: Zm_Herbicide-Treatments_P Parameter: Treatment Value: Roundup vs. No Treatment
  misc_feature: MA Experiment ID: 20000630 Result: Up-regulated in Transcription
  misc_feature: MA Experiment 20000630 PARAMETER Experiment Name: Zm_Herbicide-Treatments_P Parameter: Timepoint (hr) Value: 4
  misc_feature: MA Experiment 20000630 PARAMETER Experiment Name: Zm_Herbicide-Treatments_P Parameter: Tissue Value: Aerial
  misc_feature: MA Experiment 20000630 PARAMETER Experiment Name: Zm_Herbicide-Treatments_P Parameter: Treatment Value: Roundup vs. No Treatment
  misc_feature: MA Experiment ID: 20001610 Result: Down-regulated in Transcription
  misc_feature: MA Experiment 20001610 PARAMETER Experiment Name: Zm_50ppm_KNO3_L-to-H_P Parameter: Age (day) Value: 19
  misc_feature: MA Experiment 20001610 PARAMETER Experiment Name: Zm_50ppm_KNO3_L-to-H_P Parameter: Organism Value: Zea mays
  misc_feature: MA Experiment 20001610 PARAMETER Experiment Name: Zm_50ppm_KNO3_L-to-H_P Parameter: Plant Line Value: 35A19
  misc_feature: MA Experiment 20001610 PARAMETER Experiment Name: Zm_50ppm_KNO3_L-to-H_P Parameter: Timepoint (hr) Value: 2
  misc_feature: MA Experiment 20001610 PARAMETER Experiment Name: Zm_50ppm_KNO3_L-to-H_P Parameter: Tissue Value: Roots
  misc_feature: MA Experiment 20001610 PARAMETER Experiment Name: Zm_50ppm_KNO3_L-to-H_P Parameter: Treatment Value: 50ppm KNO3 vs. 50ppm KCl
  misc_feature: MA Experiment ID: 20001612 Result: Down-regulated in Transcription
  misc_feature: MA Experiment 20001612 PARAMETER Experiment Name: Zm_50ppm_KNO3_L-to-H_P Parameter: Age (day) Value: 19
  misc_feature: MA Experiment 20001612 PARAMETER Experiment Name: Zm_50ppm_KNO3_L-to-H_P Parameter: Organism Value: Zea mays
  misc_feature: MA Experiment 20001612 PARAMETER Experiment Name: Zm_50ppm_KNO3_L-to-H_P Parameter: Plant Line Value: 35A19
  misc_feature: MA Experiment 20001612 PARAMETER Experiment Name: Zm_50ppm_KNO3_L-to-H_P Parameter: Timepoint (hr) Value: 8
  misc_feature: MA Experiment 20001612 PARAMETER Experiment Name: Zm_50ppm_KNO3_L-to-H_P Parameter: Tissue Value: Roots
  misc_feature: MA Experiment 20001612 PARAMETER Experiment Name: Zm_50ppm_KNO3_L-to-H_P Parameter: Treatment Value: 50ppm KNO3 vs. 50ppm KCl
gcacgagaccattacctagaacatcctaatcgaaaaatccaaactcacagcacgctagctcttcagaacttgcggacgaaagactgaccgtgcaccgctagcagatcgatcgaccatggcgtcgtcctctcttctcctcctcgccgccgtcgccctcttcgccgcctccgcagacgcggccaccttcaacgtcatcaaccgctgcaagaacacgctgtggccggccgccctccccggcggcggcgcgcgcctggaccctggcaagacgtggaccgtgcaggtgccggcgggcacggcgcacgcgcgggtgtgggcgcgcacggggtgcagcttcgacggcagcggccgcgggacgtgccagacgggggactgcggcggcgcgctggcgtgcaccgtgtccgggagaacccccgcgacgctgggctgagtacacgctcaacaggaacggcccggactacatcgacatctccctcgtggatggcttcaacgtgcccatgtccttccagtgccgcggcaggggccccagctgcaaggccgacatcaacgcccagtgccccgccgcgctcaaggtgcccggcggctgcgccagcgcctgcgagaagctcggcggcgacacctactgctgccggggccagtacaaggacaagtgcccgcccacggactactccaggttcttcaagaggctgtgcccggacgcctacagctacgccaaggacgaccagaccagcaccttcacctgcccacagggctccaactacgatgtcgtgctctgcccgtgagccacatgttcgagagatcaacgaccatgcattcgcagctcgcaacaagtgcacactagtacaactatacacaagaaataagagtcgcgatatttattattatcgcgcgtggagtagttggtaaataaatcgcttattgcgagtattttggcccatgaataaggccttacttactggccatcatttccgacatatatacgtttgttcatgaataaagaaactttgcaaaacagcacaatatataatttagcacaatatataattttggagc

SEQ ID NO: 4065 - protein, 141 aa, Zea mays subsp. mays
  peptide (1)..(141): Ceres Seq. ID no. 12361488
  misc_feature (1)..(99): Pfam Name: Equine herpesvirus glycoprotein gp2 Pfam Description: Equine herpesvirus glycoprotein gp2
MASTCPCPSSAAAGAPAARPTSTPSAPPRSRCPAAAPAPARSSAATPTAAGASTRTSARPRTTPGSSRGCARTPTATPRTTRPAPSPAHRAPTTMSCSAREPHVREINDHAFAARNKCTLVQLYTRNKSRDIYYYRAWSSW

SEQ ID NO: 4066 - protein, 103 aa, Zea mays subsp. mays
  peptide (1)..(103): Ceres Seq. ID no. 12361489
  misc_feature (28)..(102): Pfam Name: Thaumatin family Pfam Description: Thaumatin family
  misc_feature (8)..(102): Homolog of NCBI NO: 1389554 NR Description: neutral PR-5 (osmotin-like protein, PR-5d)
  misc_feature (37)..(102): Homolog of NCBI NO: 7406714 NR Description: putative thaumatin-like protein [Vitis vinifera]
  misc_feature (8)..(102): Homolog of NCBI NO: 31095603 NR Description: PR5-like protein [Lycopersicon esculentum]
  misc_feature (8)..(102): Homolog of NCBI NO: 1709496 NR Description: OSMOTIN-LIKE PROTEIN OSML15 PRECURSOR (PA15)
  misc_feature (2)..(102): Homolog of NCBI NO: 135780 NR Description: Thaumatin II precursor
  misc_feature (22)..(102): Homolog of NCBI NO: 444321 NR Description: protein P21
  misc_feature (6)..(102): Homolog of NCBI NO: 34894240 NR Description: putative receptor serine/threonine kinase
  misc_feature (22)..(102): Homolog of NCBI NO: 129320 NR Description: P21 PROTEIN
  misc_feature (1)..(102): Homolog of NCBI NO: 7442171 NR Description: thaumatin-like protein - rice
  misc_feature (1)..(102): Homolog of NCBI NO: 2062389 NR Description: pathogenesis-related thaumatin-like protein
MASSSLLLLAAVALFAASADAATFNVINRCKNTLWPAALPGGGARLDPGKTWTVQVPAGTAHARVWARTGCSFDGSGRGTCQTGDCGGALACTVSGRTPATLG

SEQ ID NO: 4067 - protein, 94 aa, Zea mays subsp. mays
  peptide (1)..(94): Ceres Seq. ID no. 12361490
  misc_feature (1)..(94): Pfam Name: Thaumatin family Pfam Description: Thaumatin family
  misc_feature (1)..(94): Homolog of NCBI NO: 1389554 NR Description: neutral PR-5 (osmotin-like protein, PR-5d)
  misc_feature (1)..(94): Homolog of NCBI NO: 7406714 NR Description: putative thaumatin-like protein [Vitis vinifera]
  misc_feature (1)..(94): Homolog of NCBI NO: 31095603 NR Description: PR5-like protein [Lycopersicon esculentum]
  misc_feature (1)..(94): Homolog of NCBI NO: 1709496 NR Description: OSMOTIN-LIKE PROTEIN OSML15 PRECURSOR (PA15)
  misc_feature (1)..(94): Homolog of NCBI NO: 135780 NR Description: Thaumatin II precursor
  misc_feature (1)..(94): Homolog of NCBI NO: 444321 NR Description: protein P21
  misc_feature (1)..(94): Homolog of NCBI NO: 34894240 NR Description: putative receptor serine/threonine kinase
  misc_feature (1)..(94): Homolog of NCBI NO: 129320 NR Description: P21 PROTEIN
  misc_feature (1)..(94): Homolog of NCBI NO: 7442171 NR Description: thaumatin-like protein - rice
  misc_feature (1)..(94): Homolog of NCBI NO: 2062389 NR Description: pathogenesis-related thaumatin-like protein
MSFQCRGRGPSCKADINAQCPAALKVPGGCASACEKLGGDTYCCRGQYKDKCPPTDYSRFFKRLCPDAYSYAKDDQTSTFTCPQGSNYDVVLCP

SEQ ID NO: 4068 - DNA, 900 bp, Zea mays subsp. mays
  misc_feature (1)..(900): Ceres Seq. ID no. 12565933
  misc_feature: MA Experiment ID: 108534 Result: Up-regulated in Transcription
  misc_feature: MA Experiment 108534 PARAMETER Experiment Name: Zm_4deg_Cold_P Parameter: Age (hr) Value: 8
  misc_feature: MA Experiment 108534 PARAMETER Experiment Name: Zm_4deg_Cold_P Parameter: Organism Value: Zea mays
  misc_feature: MA Experiment 108534 PARAMETER Experiment Name: Zm_4deg_Cold_P Parameter: Plant Line Value: 35A19
  misc_feature: MA Experiment 108534 PARAMETER Experiment Name: Zm_4deg_Cold_P Parameter: Temperature (deg C) Value: 4 vs. 22
  misc_feature: MA Experiment 108534 PARAMETER Experiment Name: Zm_4deg_Cold_P Parameter: Timepoint (hr) Value: 6
  misc_feature: MA Experiment 108534 PARAMETER Experiment Name: Zm_4deg_Cold_P Parameter: Tissue Value: Aerial
  misc_feature: MA Experiment ID: 108689 Result: Up-regulated in Transcription
  misc_feature: MA Experiment 108689 PARAMETER Experiment Name: Zm_Drought_Roots_P Parameter: Age (day) Value: 9
  misc_feature: MA Experiment 108689 PARAMETER Experiment Name: Zm_Drought_Roots_P Parameter: Organism Value: Zea mays
  misc_feature: MA Experiment 108689 PARAMETER Experiment Name: Zm_Drought_Roots_P Parameter: Plant Line Value: 35A19
  misc_feature: MA Experiment 108689 PARAMETER Experiment Name: Zm_Drought_Roots_P Parameter: Timepoint (hr) Value: 24
  misc_feature: MA Experiment 108689 PARAMETER Experiment Name: Zm_Drought_Roots_P Parameter: Tissue Value: Roots
  misc_feature: MA Experiment 108689 PARAMETER Experiment Name: Zm_Drought_Roots_P Parameter: Treatment Value: Drought vs. No Drought
  misc_feature: MA Experiment ID: 20000535 Result: Down-regulated in Transcription
  misc_feature: MA Experiment 20000535 PARAMETER Experiment Name: Zm_Hybrid_Seed_Dev_P Parameter: DAP Value: 30 vs. 12
  misc_feature: MA Experiment 20000535 PARAMETER Experiment Name: Zm_Hybrid_Seed_Dev_P Parameter: Organism Value: Zea mays
  misc_feature: MA Experiment 20000535 PARAMETER Experiment Name: Zm_Hybrid_Seed_Dev_P Parameter: Plant Line Value: 35A19
  misc_feature: MA Experiment 20000535 PARAMETER Experiment Name: Zm_Hybrid_Seed_Dev_P Parameter: Tissue Value: Embryo vs. Unfert Floret
aaaggcaccaccaccagctagctctctgtctgctgctcctctcaaaagagtcgcagttcactttgttgtactagagcgctgagcagatctttccttgtttctccattccggtacgaaggggtggggtccaagtgaagggaagggaagggaagagaaggcctgctgcgagcgatgggcatcgtcgacgtcgtctccgagttctgctccttgccgaggactcgccggcatctcaagaagaggaagcagttccagacggtggagatgaaggtgcgcatcgactgcgaagggtgcgagcgcaaggtgaagaaggcgatggagggcatgaagggcgtgagctccgtggaggtggcggccaagcagaacaaggtgacggtcacgggctacgtggacgccgccaaggtcatgcgccgcgtcgcctacaagacgggcaagcgggtggagccctggccctacgtgccctacgagatggtgcagcacccctacgcgccgggcgcctacgacaagaaggcgcccgccggctacgtccgcaacgtcgtcgccgaccccaccgccgcgccgctcgccagggcctcctccaccgaggtccgctacaccgccgccttcagcgacgagaaccccaacgcctgctccgtcatgtagacgtagacccacccacacaccgaccgacccacttgttttctagctattagttactagtagtatagtaggtgcttgcttgggagagttgctcttggaggaggttttgctcttcctgaccctttttctttttctttttttcgttttccggtttcatgtagatgtagtgtgcgttttgatttttgtgaaaaaaaataaactagtttgtaacggtagaccacttgtgcaaactatgatcagaaaaaaaaatcagttcgtccttgc

SEQ ID NO: 4069 - protein, 155 aa, Zea mays subsp. mays
  peptide (1)..(155): Ceres Seq. ID no. 12565934
  misc_feature (1)..(155): Homolog of NCBI NO: 21536547 NR Description: farnesylated protein (ATFP6) [Arabidopsis
  misc_feature (1)..(155): Homolog of NCBI NO: 15233937 NR Description: copper chaperone (CCH)-related
  misc_feature (1)..(155): Homolog of NCBI NO: 21397273 NR Description: Putative atfp6-like protein
  misc_feature (1)..(155): Homolog of NCBI NO: 23304411 NR Description: farnesylated protein 1 [Hordeum vulgare subsp.
  misc_feature (1)..(155): Homolog of NCBI NO: 38346843 NR Description: OSJNBa0091C12.3 [Oryza sativa (japonica
MGIVDVVSEFCSLPRTRRHLKKRKQFQTVEMKVRIDCEGCERKVKKAMEGMKGVSSVEVAAKQNKVTVTGYVDAAKVMRRVAYKTGKRVEPWPYVPYEMVQHPYAPGAYDKKAPAGYVRNVVADPTAAPLARASSTEVRYTAAFSDENPNACSVM

SEQ ID NO: 4070 - protein, 125 aa, Zea mays subsp. mays
  peptide (1)..(125): Ceres Seq. ID no. 12565935
  misc_feature (1)..(125): Homolog of NCBI NO: 21536547 NR Description: farnesylated protein (ATFP6) [Arabidopsis
  misc_feature (1)..(125): Homolog of NCBI NO: 15233937 NR Description: copper chaperone (CCH)-related
  misc_feature (1)..(125): Homolog of NCBI NO: 21397273 NR Description: Putative atfp6-like protein
  misc_feature (1)..(125): Homolog of NCBI NO: 23304411 NR Description: farnesylated protein 1 [Hordeum vulgare subsp.
  misc_feature (1)..(125): Homolog of NCBI NO: 38346843 NR Description: OSJNBa0091C12.3 [Oryza sativa (japonica
MKVRIDCEGCERKVKKAMEGMKGVSSVEVAAKQNKVTVTGYVDAAKVMRRVAYKTGKRVEPWPYVPYEMVQHPYAPGAYDKKAPAGYVRNVVADPTAAPLARASSTEVRYTAAFSDENPNACSVM

SEQ ID NO: 4071 - protein, 108 aa, Zea mays subsp. mays
  peptide (1)..(108): Ceres Seq. ID no. 12565936
  misc_feature (1)..(108): Homolog of NCBI NO: 21536547 NR Description: farnesylated protein (ATFP6) [Arabidopsis
  misc_feature (1)..(108): Homolog of NCBI NO: 15233937 NR Description: copper chaperone (CCH)-related
  misc_feature (1)..(108): Homolog of NCBI NO: 21397273 NR Description: Putative atfp6-like protein
  misc_feature (1)..(108): Homolog of NCBI NO: 23304411 NR Description: farnesylated protein 1 [Hordeum vulgare subsp.
  misc_feature (1)..(108): Homolog of NCBI NO: 38346843 NR Description: OSJNBa0091C12.3 [Oryza sativa (japonica
MEGMKGVSSVEVAAKQNKVTVTGYVDAAKVMRRVAYKTGKRVEPWPYVPYEMVQHPYAPGAYDKKAPAGYVRNVVADPTAAPLARASSTEVRYTAAFSDENPNACSVM

SEQ ID NO: 4072 - DNA, 661 bp, Zea mays subsp. mays
  misc_feature (1)..(661): Ceres Seq. ID no. 12358602
  misc_feature: MA Experiment ID: 108535 Result: Up-regulated in Transcription
  misc_feature: MA Experiment 108535 PARAMETER Experiment Name: Zm_Meristem_P Parameter: Age (day) Value: 8
  misc_feature: MA Experiment 108535 PARAMETER Experiment Name: Zm_Meristem_P Parameter: Organism Value: Zea mays
  misc_feature: MA Experiment 108535 PARAMETER Experiment Name: Zm_Meristem_P Parameter: Plant Line Value: 35A19
  misc_feature: MA Experiment 108535 PARAMETER Experiment Name: Zm_Meristem_P Parameter: Tissue Value: Root Meristem vs. Above Root Meristem
  misc_feature: MA Experiment ID: 108556 Result: Down-regulated in Transcription
  misc_feature: MA Experiment 108556 PARAMETER Experiment Name: Zm_Drought_P Parameter: Age (day) Value: 9
  misc_feature: MA Experiment 108556 PARAMETER Experiment Name: Zm_Drought_P Parameter: Organism Value: Zea mays
  misc_feature: MA Experiment 108556 PARAMETER Experiment Name: Zm_Drought_P Parameter: Plant Line Value: 35A19
  misc_feature: MA Experiment 108556 PARAMETER Experiment Name: Zm_Drought_P Parameter: Timepoint (hr) Value: 24
  misc_feature: MA Experiment 108556 PARAMETER Experiment Name: Zm_Drought_P Parameter: Tissue Value: Aerial
  misc_feature: MA Experiment 108556 PARAMETER Experiment Name: Zm_Drought_P Parameter: Treatment Value: Drought vs. No Drought
  misc_feature: MA Experiment ID: 20000488 Result: Up-regulated in Transcription
  misc_feature: MA Experiment 20000488 PARAMETER Experiment Name: Zm_50mM_NH4NO3_L_to_H_P Parameter: Organism Value: Zea mays
  misc_feature: MA Experiment 20000488 PARAMETER Experiment Name: Zm_50mM_NH4NO3_L_to_H_P Parameter: Timepoint (hr) Value: 8
  misc_feature: MA Experiment 20000488 PARAMETER Experiment Name: Zm_50mM_NH4NO3_L_to_H_P Parameter: Tissue Value: Leaves
  misc_feature: MA Experiment 20000488 PARAMETER Experiment Name: Zm_50mM_NH4NO3_L_to_H_P Parameter: Treatment Value: 50mM NH4NO3 vs. 100mM Mannitol
ctagactgcacccccatcccgcagcagccaaaacctacctagccgccgccgcaggcggccccccatcgccgccaagatgcagatctttgtgaagactctgacggggaagaccatcactttggaggtggagtcctcggacaccattgacaatgtgaaggccaagatccaggacaaggagggcatccccccggaccagcagcggctcatcttcgccggcaagcagctcgaggacggtcgcaccctcgccgactacaacattcagaaggagtccaccctccacctggtgctccgcctccgcggtggcgccaagaagcgtaagaagaagacgtacaccaagcccaagaagatcaagcacaagcacaagaaggtgaagctctccgtgctgcagttctataaggtggacgacgccactggcaaggtgacccgcctccgcaaggagtgccccaacacagagtgcggcgcgggcgtcttcatggccaaccacttcgaccgccactactgcggcaagtgcggcctcacctatgtctacaaccagaaggcgtaattgcttgccccgatttgctttatccgccaacctatcaagcattcagatgttggttactcaaattgtatctcatttagatctgtctgaggttgaaacttaaatggagcagtagtatct

SEQ ID NO: 4073 - protein, 155 aa, Zea mays subsp. mays
  peptide (1)..(155): Ceres Seq. ID no. 12358603
  misc_feature (1)..(74): Pfam Name: Ubiquitin family Pfam Description: Ubiquitin family
  misc_feature (1)..(155): Homolog of NCBI NO: 541954 NR Description: ubiquitin/ribosomal protein S27a fusion protein -
  misc_feature (1)..(153): Homolog of NCBI NO: 279636 NR Description: ubiquitin / ribosomal protein S27a - tomato
  misc_feature (1)..(155): Homolog of NCBI NO: 541953 NR Description: ubiquitin/ribosomal protein S27a fusion protein -
  misc_feature (1)..(153): Homolog of NCBI NO: 34581769 NR Description: ubiquitin extension protein [Cucumis sativus]
  misc_feature (1)..(155): Homolog of NCBI NO: 1044940 NR Description: fusion gene [Zea mays]
  misc_feature (1)..(155): Homolog of NCBI NO: 100599 NR Description: ubiquitin / ribosomal protein S27a.2 - barley
  misc_feature (1)..(155): Homolog of NCBI NO: 34894792 NR Description: ubiquitin / ribosomal protein S27a
  misc_feature (1)..(155): Homolog of NCBI NO: 100598 NR Description: ubiquitin / ribosomal protein S27a.1 - barley
  misc_feature (1)..(155): Homolog of NCBI NO: 902525 NR Description: ubiquitin fusion protein
  misc_feature (1)..(155): Homolog of NCBI NO: 82733 NR Description: ubiquitin / ribosomal protein S27a - maize
MQIFVKTLTGKTITLEVESSDTIDNVKAKIQDKEGIPPDQQRLIFAGKQLEDGRTLADYNIQKESTLHLVLRLRGGAKKRKKKTYTKPKKIKHKHKKVKLSVLQFYKVDDATGKVTRLRKECPNTECGAGVFMANHFDRHYCGKCGLTYVYNQKA

SEQ ID NO: 4074 - DNA, 984 bp, Zea mays subsp. mays
  misc_feature (1)..(984): Ceres Seq. ID no. 12347902
  misc_feature: MA Experiment ID: 108544 Result: Up-regulated in Transcription
aactcccgcaggccgcagcccagcaccggccgctctacgcctccacgccggcacgtcctcgtttctgtccgaggtcatcgcctccgcaacttcgtggccggtgaggtcgcaccaccatggcgtcgctcctagcccggcaggcagcgcaggcgctccgcgcgaggcaaacggcgcagctcgggccggccgcgtcggcgatgcaagggcacctccgtacctacatgaacgcggggattcccaagcggttcaaagaggatgaggagaaagaacagcttgcaaaagatgtcgcaaaagattggaatgctgttttgaaaggagcatcaatacattgtttttgactgaaatggtccgtggcttgatgctaactctcaagtacttctttgatagaaatgtcacaattaactatccgtttgagaagggtcctctgagcccccgcttccgtggtgagcatgctctcagacgttatgaatctggggangagcgctgcattgcttgtaaactatgcgaagctatatgcccagcgcaggcaattacaattgaggctgaagaacgtgaagatggcagtcgccgaaccacaagatatgatattgacatgaccaaatgcatttactgtgggttctgtcaagaggcttgcccagtcgatgctattgttgaggggcctaactttgagtttgccactgagacacacgaggaactactgtacgacaaggagaaattgcttgaaaatggtgatcgctgggagactgagattgctgagaacttgagatctgagagcctctatcgctgaatctgtcttccattatggttgataaactgggttcttccattttccatattttgctcaactagctgatgaataagcaaacgatgtatcataacttaggtacgatgtttttgtaccttggcaccatctgtgtgttttgttcattgccttgctaaaggtggcaccagatgttctttgatgggaaaattccttctgtagct

SEQ ID NO: 4075 - protein, 147 aa, Zea mays subsp. mays
  peptide (1)..(147): Ceres Seq. ID no. 12347903
  misc_feature (80)..(103): Pfam Name: 4Fe-4S binding domain Pfam Description: 4Fe-4S binding domain
  misc_feature (1)..(147): Homolog of NCBI NO: 17864306 NR Description: NADH:ubiquinone reductase 23kD subunit precursor
  misc_feature (1)..(147): Homolog of NCBI NO: 27807359 NR Description: NADH dehydrogenase (ubiquinone) Fe-S protein 8,
  misc_feature (1)..(147): Homolog of NCBI NO: 34328786 NR Description: NADH:ubiquinone oxidoreductase subunit 8;
  misc_feature (1)..(147): Homolog of NCBI NO: 11466496 NR Description: NADH dehydrogenase, subunit 8 [Reclinomonas
  misc_feature (1)..(147): Homolog of NCBI NO: 3929358 NR Description: NADH-ubiquinone oxidoreductase 23 kDa subunit, precursor (Complex I-23KD) (CI-23KD) (Complex I-28.5KD)
  misc_feature (1)..(147): Homolog of NCBI NO: 15219311 NR Description: NADH:ubiquinone oxidoreductase, putative
  misc_feature (1)..(147): Homolog of NCBI NO: 15219265 NR Description: NADH dehydrogenase, putative
  misc_feature (1)..(147): Homolog of NCBI NO: 1076669 NR Description: NADH2 dehydrogenase (ubiquinone) (EC 1.6.5.3)
  misc_feature (1)..(147): Homolog of NCBI NO: 6226880 NR Description: NADH-ubiquinone oxidoreductase 23 kDa subunit, precursor (Complex I-23KD) (CI-23KD) (Complex I-28.5KD)
  misc_feature (1)..(147): Homolog of NCBI NO: 34915206 NR Description: putative  NADH dehydrogenase
  misc_feature (45)..(45): Xaa is any aa, unknown or other
MVRGLMLTLKYFFDRNVTINYPFEKGPLSPRFRGEHALRRYESGXERCIACKLCEAICPAQAITIEAEEREDGSRRTTRYDIDMTKCIYCGFCQEACPVDAIVEGPNFEFATETHEELLYDKEKLLENGDRWETEIAENLRSESLYR

SEQ ID NO: 4076 - protein, 142 aa, Zea mays subsp. mays
  peptide (1)..(142): Ceres Seq. ID no. 12347904
  misc_feature (75)..(98): Pfam Name: 4Fe-4S binding domain Pfam Description: 4Fe-4S binding domain
  misc_feature (1)..(142): Homolog of NCBI NO: 17864306 NR Description: NADH:ubiquinone reductase 23kD subunit precursor
  misc_feature (1)..(142): Homolog of NCBI NO: 27807359 NR Description: NADH dehydrogenase (ubiquinone) Fe-S protein 8,
  misc_feature (1)..(142): Homolog of NCBI NO: 34328786 NR Description: NADH:ubiquinone oxidoreductase subunit 8;
  misc_feature (1)..(142): Homolog of NCBI NO: 11466496 NR Description: NADH dehydrogenase, subunit 8 [Reclinomonas
  misc_feature (1)..(142): Homolog of NCBI NO: 3929358 NR Description: NADH-ubiquinone oxidoreductase 23 kDa subunit, precursor (Complex I-23KD) (CI-23KD) (Complex I-28.5KD)
  misc_feature (1)..(142): Homolog of NCBI NO: 15219311 NR Description: NADH:ubiquinone oxidoreductase, putative
  misc_feature (1)..(142): Homolog of NCBI NO: 15219265 NR Description: NADH dehydrogenase, putative
  misc_feature (1)..(142): Homolog of NCBI NO: 1076669 NR Description: NADH2 dehydrogenase (ubiquinone) (EC 1.6.5.3)
  misc_feature (1)..(142): Homolog of NCBI NO: 6226880 NR Description: NADH-ubiquinone oxidoreductase 23 kDa subunit, precursor (Complex I-23KD) (CI-23KD) (Complex I-28.5KD)
  misc_feature (1)..(142): Homolog of NCBI NO: 34915206 NR Description: putative  NADH dehydrogenase
  misc_feature (40)..(40): Xaa is any aa, unknown or other
MLTLKYFFDRNVTINYPFEKGPLSPRFRGEHALRRYESGXERCIACKLCEAICPAQAITIEAEEREDGSRRTTRYDIDMTKCIYCGFCQEACPVDAIVEGPNFEFATETHEELLYDKEKLLENGDRWETEIAENLRSESLYR

SEQ ID NO: 4077 - protein, 85 aa, Zea mays subsp. mays
  peptide (1)..(85): Ceres Seq. ID no. 12347905
  misc_feature (67)..(85): Homolog of NCBI NO: 15219311 NR Description: NADH:ubiquinone oxidoreductase, putative
  misc_feature (73)..(85): Homolog of NCBI NO: 15219265 NR Description: NADH dehydrogenase, putative
TPAGRSPAPAALRLHAGTSSFLSEVIASATSWPVRSHHHGVAPSPAGSAGAPREANGAARAGRVGDARAPPYLHERGDSQAVQRG

SEQ ID NO: 4078 - DNA, 998 bp, Zea mays subsp. mays
  misc_feature (1)..(998): Ceres Seq. ID no. 12343213
  misc_feature: MA Experiment ID: 108523 Result: Down-regulated in Transcription
  misc_feature: MA Experiment 108523 PARAMETER Experiment Name: Zm_42deg_Heat_P Parameter: Age (day) Value: 8
  misc_feature: MA Experiment 108523 PARAMETER Experiment Name: Zm_42deg_Heat_P Parameter: Organism Value: Zea mays
  misc_feature: MA Experiment 108523 PARAMETER Experiment Name: Zm_42deg_Heat_P Parameter: Plant Line Value: 35A19
  misc_feature: MA Experiment 108523 PARAMETER Experiment Name: Zm_42deg_Heat_P Parameter: Temperature (deg C) Value: 42 vs. 22
  misc_feature: MA Experiment 108523 PARAMETER Experiment Name: Zm_42deg_Heat_P Parameter: Timepoint (hr) Value: 6
  misc_feature: MA Experiment 108523 PARAMETER Experiment Name: Zm_42deg_Heat_P Parameter: Tissue Value: Aerial
  misc_feature: MA Experiment ID: 108528 Result: Up-regulated in Transcription
  misc_feature: MA Experiment 108528 PARAMETER Experiment Name: Zm_Imbibed_Seeds_P Parameter: Age (day) Value: 5 vs. 2
  misc_feature: MA Experiment 108528 PARAMETER Experiment Name: Zm_Imbibed_Seeds_P Parameter: Organism Value: Zea mays
  misc_feature: MA Experiment 108528 PARAMETER Experiment Name: Zm_Imbibed_Seeds_P Parameter: Plant Line Value: 35A19
  misc_feature: MA Experiment 108528 PARAMETER Experiment Name: Zm_Imbibed_Seeds_P Parameter: Tissue Value: Aerial vs. Embryo
  misc_feature: MA Experiment ID: 108530 Result: Up-regulated in Transcription
  misc_feature: MA Experiment 108530 PARAMETER Experiment Name: Zm_Imbibed_Seeds_P Parameter: Age (day) Value: 6 vs. 2
  misc_feature: MA Experiment 108530 PARAMETER Experiment Name: Zm_Imbibed_Seeds_P Parameter: Organism Value: Zea mays
  misc_feature: MA Experiment 108530 PARAMETER Experiment Name: Zm_Imbibed_Seeds_P Parameter: Plant Line Value: 35A19
  misc_feature: MA Experiment 108530 PARAMETER Experiment Name: Zm_Imbibed_Seeds_P Parameter: Tissue Value: Aerial vs. Embryo
  misc_feature: MA Experiment ID: 108545 Result: Up-regulated in Transcription
  misc_feature: MA Experiment 108545 PARAMETER Experiment Name: Zm_Imbibed_Seeds_P Parameter: Age (day) Value: 3 vs. 2
  misc_feature: MA Experiment 108545 PARAMETER Experiment Name: Zm_Imbibed_Seeds_P Parameter: Organism Value: Zea mays
  misc_feature: MA Experiment 108545 PARAMETER Experiment Name: Zm_Imbibed_Seeds_P Parameter: Plant Line Value: 35A19
  misc_feature: MA Experiment 108545 PARAMETER Experiment Name: Zm_Imbibed_Seeds_P Parameter: Tissue Value: Aerial vs. Embryo
  misc_feature: MA Experiment ID: 108547 Result: Up-regulated in Transcription
  misc_feature: MA Experiment 108547 PARAMETER Experiment Name: Zm_Imbibed_Seeds_P Parameter: Age (day) Value: 4 vs. 2
  misc_feature: MA Experiment 108547 PARAMETER Experiment Name: Zm_Imbibed_Seeds_P Parameter: Organism Value: Zea mays
  misc_feature: MA Experiment 108547 PARAMETER Experiment Name: Zm_Imbibed_Seeds_P Parameter: Plant Line Value: 35A19
  misc_feature: MA Experiment 108547 PARAMETER Experiment Name: Zm_Imbibed_Seeds_P Parameter: Tissue Value: Aerial vs. Embryo
  misc_feature: MA Experiment ID: 20000108 Result: Up-regulated in Transcription
  misc_feature: MA Experiment 20000108 PARAMETER Experiment Name: Zm_Root-Tips_P Parameter: Age (day) Value: 12
  misc_feature: MA Experiment 20000108 PARAMETER Experiment Name: Zm_Root-Tips_P Parameter: Organism Value: Zea mays
  misc_feature: MA Experiment 20000108 PARAMETER Experiment Name: Zm_Root-Tips_P Parameter: Tissue Value: Root tips vs. Root mid region    35
  misc_feature: MA Experiment 20000108 PARAMETER Experiment Name: Zm_Root-Tips_P Parameter: Tissue Value: Root tips vs. Root mid region   Sequence Listing-Misc Features (4)
  misc_feature: MA Experiment ID: 20000478 Result: Down-regulated in Transcription
  misc_feature: MA Experiment 20000478 PARAMETER Experiment Name: Zm_5mM_SA_P Parameter: Age (day) Value: 11
  misc_feature: MA Experiment 20000478 PARAMETER Experiment Name: Zm_5mM_SA_P Parameter: Organism Value: Zea mays
  misc_feature: MA Experiment 20000478 PARAMETER Experiment Name: Zm_5mM_SA_P Parameter: Plant Line Value: 35A19
  misc_feature: MA Experiment 20000478 PARAMETER Experiment Name: Zm_5mM_SA_P Parameter: Timepoint (hr) Value: 72
  misc_feature: MA Experiment 20000478 PARAMETER Experiment Name: Zm_5mM_SA_P Parameter: Tissue Value: Aerial
  misc_feature: MA Experiment 20000478 PARAMETER Experiment Name: Zm_5mM_SA_P Parameter: Treatment Value: 5mM SA vs. No Treatment
  misc_feature: MA Experiment ID: 20000626 Result: Down-regulated in Transcription
  misc_feature: MA Experiment 20000626 PARAMETER Experiment Name: Zm_Herbicide-Treatments_P Parameter: Timepoint (hr) Value: 12
  misc_feature: MA Experiment 20000626 PARAMETER Experiment Name: Zm_Herbicide-Treatments_P Parameter: Tissue Value: Aerial
  misc_feature: MA Experiment 20000626 PARAMETER Experiment Name: Zm_Herbicide-Treatments_P Parameter: Treatment Value: Roundup vs. No Treatment
aacagtgaaccaaacaaaagcctcgagccagtgtggtgtggggtcgcgtgctctcttctatcctgctctgctagtgtcaggattccgccctatccatcccatcaacctcagctaaggtccccagcggcggcgaggcgatggcggcgcctgtgacggtgtacggaccgatgctctcaccagctgtggcccgcgtggcggcctgcctcctggagaaggacgtgccgttccagatcgagccggtggacatgtccaagggcgagcacaagtcgccgtccttcctcaagctccagcccttcggacaggtccctgccttcaaggaccacctcacaaccgtctttgagtcaagggctatttgccgttacatatgcgaccagtatgcggactctggtaatcaggccctcttcggcaagaaagaagacggcgcggttggccgcgctgccattgaacagtggatagagtctgaaggccagagctttaacccaccgagcttggctattatcttccagctcgcatttgcaccgatgatgggccggaccactgacctggctgtggttgagcagaatgaagcgaagcttgcgaaggtgcttgatgtgtatgaccaacggctgggggagagccagtattttgctggtgatgatttctcccctggccgaccttgtgcacttgcccaatgcagatttccttgtgaacagaaccagcaaggctggcttgatcaccgagagaaagaatcttgctagatggtgggatgatgtctcgtcccgacctgcatggaaaaaggtcactgagatgcagagcacgccgaggccctcttagagcttttttttgggtttctttgagcagcttctgatggcaattagttgcattctccttgttttgtcatcaagtccttgtctgtaccgtttcctgttctcttatttatcggtcttaattcttgatctatgtatggtttggatctgttcttctggtcctttagtttatataagtacctacaattcttc

SEQ ID NO: 4079 - protein, 199 aa, Zea mays subsp. mays
  peptide (1)..(199): Ceres Seq. ID no. 12343214
  misc_feature (7)..(169): Homolog of NCBI NO: 21217741 NR Description: putative glutathione S-transferase [Phaseolus
  misc_feature (1)..(169): Homolog of NCBI NO: 11177845 NR Description: putative glutathione S-transferase OsGSTF3
  misc_feature (1)..(169): Homolog of NCBI NO: 22758267 NR Description: Putative glutathione S-transferase
  misc_feature (1)..(199): Homolog of NCBI NO: 11385471 NR Description: glutathione S-transferase GST 10 [Zea mays]
MAAPVTVYGPMLSPAVARVAACLLEKDVPFQIEPVDMSKGEHKSPSFLKLQPFGQVPAFKDHLTTVFESRAICRYICDQYADSGNQALFGKKEDGAVGRAAIEQWIESEGQSFNPPSLAIIFQLAFAPMMGRTTDLAVVEQNEAKLAKVLDVYDQRLGESQYFAGDDFSPGRPCALAQCRFPCEQNQQGWLDHREKESC

SEQ ID NO: 4080 - protein, 189 aa, Zea mays subsp. mays
  peptide (1)..(189): Ceres Seq. ID no. 12343215
  misc_feature (1)..(159): Homolog of NCBI NO: 11177845 NR Description: putative glutathione S-transferase OsGSTF3
  misc_feature (1)..(159): Homolog of NCBI NO: 22758267 NR Description: Putative glutathione S-transferase
  misc_feature (1)..(189): Homolog of NCBI NO: 11385471 NR Description: glutathione S-transferase GST 10 [Zea mays]
  misc_feature (1)..(159): Homolog of NCBI NO: 21217741 NR Description: putative glutathione S-transferase [Phaseolus
MLSPAVARVAACLLEKDVPFQIEPVDMSKGEHKSPSFLKLQPFGQVPAFKDHLTTVFESRAICRYICDQYADSGNQALFGKKEDGAVGRAAIEQWIESEGQSFNPPSLAIIFQLAFAPMMGRTTDLAVVEQNEAKLAKVLDVYDQRLGESQYFAGDDFSPGRPCALAQCRFPCEQNQQGWLDHREKESC

SEQ ID NO: 4081 - protein, 163 aa, Zea mays subsp. mays
  peptide (1)..(163): Ceres Seq. ID no. 12343216
  misc_feature (1)..(163): Homolog of NCBI NO: 11385471 NR Description: glutathione S-transferase GST 10 [Zea mays]
  misc_feature (1)..(133): Homolog of NCBI NO: 21217741 NR Description: putative glutathione S-transferase [Phaseolus
  misc_feature (1)..(133): Homolog of NCBI NO: 11177845 NR Description: putative glutathione S-transferase OsGSTF3
  misc_feature (1)..(133): Homolog of NCBI NO: 22758267 NR Description: Putative glutathione S-transferase
MSKGEHKSPSFLKLQPFGQVPAFKDHLTTVFESRAICRYICDQYADSGNQALFGKKEDGAVGRAAIEQWIESEGQSFNPPSLAIIFQLAFAPMMGRTTDLAVVEQNEAKLAKVLDVYDQRLGESQYFAGDDFSPGRPCALAQCRFPCEQNQQGWLDHREKESC

SEQ ID NO: 4082 - DNA, 757 bp, Zea mays subsp. mays
  misc_feature (1)..(757): Ceres Seq. ID no. 12579198
  misc_feature: MA Experiment ID: 108527 Result: Up-regulated in Transcription
  misc_feature: MA Experiment 108527 PARAMETER Experiment Name: Zm_5mM_NO_P Parameter: Age (day) Value: 8
  misc_feature: MA Experiment 108527 PARAMETER Experiment Name: Zm_5mM_NO_P Parameter: Organism Value: Zea mays
  misc_feature: MA Experiment 108527 PARAMETER Experiment Name: Zm_5mM_NO_P Parameter: Plant Line Value: 35A19
  misc_feature: MA Experiment 108527 PARAMETER Experiment Name: Zm_5mM_NO_P Parameter: Timepoint (hr) Value: 6
  misc_feature: MA Experiment 108527 PARAMETER Experiment Name: Zm_5mM_NO_P Parameter: Tissue Value: Aerial
  misc_feature: MA Experiment 108527 PARAMETER Experiment Name: Zm_5mM_NO_P Parameter: Treatment Value: 5mM NO vs. No Treatment
  misc_feature: MA Experiment ID: 108543 Result: Down-regulated in Transcription
  misc_feature: MA Experiment ID: 108559 Result: Up-regulated in Transcription
  misc_feature: MA Experiment 108559 PARAMETER Experiment Name: Zm_5mM_NO_P Parameter: Age (day) Value: 8
  misc_feature: MA Experiment 108559 PARAMETER Experiment Name: Zm_5mM_NO_P Parameter: Organism Value: Zea mays
  misc_feature: MA Experiment 108559 PARAMETER Experiment Name: Zm_5mM_NO_P Parameter: Plant Line Value: 35A19
  misc_feature: MA Experiment 108559 PARAMETER Experiment Name: Zm_5mM_NO_P Parameter: Timepoint (hr) Value: 12
  misc_feature: MA Experiment 108559 PARAMETER Experiment Name: Zm_5mM_NO_P Parameter: Tissue Value: Aerial
  misc_feature: MA Experiment 108559 PARAMETER Experiment Name: Zm_5mM_NO_P Parameter: Treatment Value: 5mM NO vs. No Treatment
aattccgtttgtttccgacggcacaaggaaaaaaaaagaccagactgagggctcctctcccgttccgatcgccaattcgccttccaccgcctgcaaccctttcttcccttctcggtcatcgtgacggcatcacgcgcgcgctctcctcttccacgagtccgtcagcctgctaagtcttaagatggcgtcaagcaatggtcagacagaagctccagcaccatctgtccccaaaaatcctgctatggcatcatgccggaagaagaaaacagatgatgctaccttccttgaagatctgaaagaccacatggatgagttcattcacgcctccatggatgagcacaagagctgctttaagaagacaattcagaagatgtttgggatgtcgaaggctgttgcagagagatccgcggcggaagcaaacaaagctgaagttgaaagtgctttgccacttcagaccagtgtctcgcagtagaatttcatgcagtagaatttcatgttggtagtttcttgctcgtgccaatagttttatataagggtttttgttgctgtgttttctgaaacgcataagcgtgtcagtagcatgttttcataaccggattgtagtgcttcattatctatagttttctgtacgtgtaaaatagaccagcgtaacagcgtagtttgcttcattctccgaagtattgtatggctgtacacccaggcatctgggcatcatgaacccaactgattggctaaatgaaataaatctcctccatcc

SEQ ID NO: 4083 - protein, 96 aa, Zea mays subsp. mays
  peptide (1)..(96): Ceres Seq. ID no. 12579199
  misc_feature (1)..(58): Homolog of NCBI NO: 14626302 NR Description: hypothetical protein [Oryza sativa (japonica
  misc_feature (1)..(96): Homolog of NCBI NO: 15226603 NR Description: unknown protein; protein id: At2g21640.1
  misc_feature (7)..(95): Homolog of NCBI NO: 15230009 NR Description: unknown protein; protein id: At3g05570.1
  misc_feature (19)..(96): Homolog of NCBI NO: 21553485 NR Description: unknown [Arabidopsis thaliana]
  misc_feature (16)..(96): Homolog of NCBI NO: 18420404 NR Description: Expressed protein
  misc_feature (1)..(96): Homolog of NCBI NO: 40253393 NR Description: hypothetical protein [Oryza sativa (japonica
MASSNGQTEAPAPSVPKNPAMASCRKKKTDDATFLEDLKDHMDEFIHASMDEHKSCFKKTIQKMFGMSKAVAERSAAEANKAEVESALPLQTSVSQ

SEQ ID NO: 4084 - protein, 76 aa, Zea mays subsp. mays
  peptide (1)..(76): Ceres Seq. ID no. 12579200
  misc_feature (1)..(38): Homolog of NCBI NO: 14626302 NR Description: hypothetical protein [Oryza sativa (japonica
  misc_feature (1)..(76): Homolog of NCBI NO: 15226603 NR Description: unknown protein; protein id: At2g21640.1
  misc_feature (1)..(75): Homolog of NCBI NO: 15230009 NR Description: unknown protein; protein id: At3g05570.1
  misc_feature (1)..(76): Homolog of NCBI NO: 21553485 NR Description: unknown [Arabidopsis thaliana]
  misc_feature (1)..(76): Homolog of NCBI NO: 18420404 NR Description: Expressed protein
  misc_feature (1)..(76): Homolog of NCBI NO: 40253393 NR Description: hypothetical protein [Oryza sativa (japonica
MASCRKKKTDDATFLEDLKDHMDEFIHASMDEHKSCFKKTIQKMFGMSKAVAERSAAEANKAEVESALPLQTSVSQ

SEQ ID NO: 4085 - protein, 64 aa, Zea mays subsp. mays
  peptide (1)..(64): Ceres Seq. ID no. 12579201
MSSFTPPWMSTRAALRRQFRRCLGCRRLLQRDPRRKQTKLKLKVLCHFRPVSRSRISCSRISCW

SEQ ID NO: 4086 - DNA, 980 bp, Zea mays subsp. mays
  misc_feature (1)..(980): Ceres Seq. ID no. 12348303
  misc_feature: MA Experiment ID: 20000535 Result: Down-regulated in Transcription
  misc_feature: MA Experiment 20000535 PARAMETER Experiment Name: Zm_Hybrid_Seed_Dev_P Parameter: DAP Value: 30 vs. 12
  misc_feature: MA Experiment 20000535 PARAMETER Experiment Name: Zm_Hybrid_Seed_Dev_P Parameter: Organism Value: Zea mays
  misc_feature: MA Experiment 20000535 PARAMETER Experiment Name: Zm_Hybrid_Seed_Dev_P Parameter: Plant Line Value: 35A19
  misc_feature: MA Experiment 20000535 PARAMETER Experiment Name: Zm_Hybrid_Seed_Dev_P Parameter: Tissue Value: Embryo vs. Unfert Floret
aaccccccaactccgttcattgcggcaggccggcagccaaatcgagatctcgcccgtgctgaatcccaccactctcgccgacccggccgcagcaagcgcagcgcatcgacaggagccgaagaaccgaagaggagatggcgtcggcgctgtcctccctgcgctacggcgacagcctctcggtggtgggcatctccgccgcgacggccgtgctctgcgaggccatgtcctggctcctcatctaccgcaccgccacctacaactccctccgcgcctccatcgagcgccactcccgcaagctagacgccatgaagtccggctccacctccgcctcctccggcaccgccgcctcctccgcgcagcccgcatcgtcgcgggctaagaagatggaccgcgtcgagaccagcctcaaggacgctgcgcgggagctctcgctcgccaagctcaagtcgggcgccgtcgtcgctgtcatgctcttcgtcgtcttcggcctgctcaactccctcttcgagggccgcaccgtcgccaagctgcccttcgcgcccatcccgctcgtccagcggatgagccaccgcggactgcccgggaacgatcccaccgactgctccatggttttcctctacttcctctgctccatgagcatccgaaccaacctgcagaaactgcttggcttnncgccgccacgcgcggctgctgcagccggcggtggcctcttccccatgcccgatccgaaagttaattgaggctgatttccaagacgagtgaatccgaaccaaagatagcaatagtcgcccgggaaagactctgtgcgactgcaccgatatccgtacccaattcattttccacagctcaccggtttgttgttgcgcaccggtgattgcaaacctgaaggttggcttatttattgcattgactgaaacaacgaacatgaattacctgctgggaggcagagaaatgtgcagcctaatttttttcggcctctg

SEQ ID NO: 4087 - protein, 201 aa, Zea mays subsp. mays
  peptide (1)..(201): Ceres Seq. ID no. 12348304
  misc_feature (10)..(196): Homolog of NCBI NO: 3170241 NR Description: TU37B2 [Anopheles gambiae]
  misc_feature (10)..(196): Homolog of NCBI NO: 24585112 NR Description: CG10470-PA [Drosophila melanogaster]
  misc_feature (16)..(198): Homolog of NCBI NO: 33328806 NR Description: meg-2-like protein [Rattus norvegicus]
  misc_feature (1)..(196): Homolog of NCBI NO: 31238723 NR Description: ENSANGP00000016559 [Anopheles gambiae]
  misc_feature (7)..(198): Homolog of NCBI NO: 23956188 NR Description: RIKEN cDNA 1190006A08 [Mus musculus]
  misc_feature (7)..(198): Homolog of NCBI NO: 3283893 NR Description: unknown [Homo sapiens]
  misc_feature (1)..(201): Homolog of NCBI NO: 15240119 NR Description: putative protein
  misc_feature (6)..(201): Homolog of NCBI NO: 21553820 NR Description: unknown [Arabidopsis thaliana]
  misc_feature (1)..(201): Homolog of NCBI NO: 21554161 NR Description: unknown [Arabidopsis thaliana]
  misc_feature (6)..(201): Homolog of NCBI NO: 18399454 NR Description: expressed protein
  misc_feature (179)..(179): Xaa is any aa, unknown or other
  misc_feature (180)..(180): Xaa is any aa, unknown or other
MASALSSLRYGDSLSVVGISAATAVLCEAMSWLLIYRTATYNSLRASIERHSRKLDAMKSGSTSASSGTAASSAQPASSRAKKMDRVETSLKDAARELSLAKLKSGAVVAVMLFVVFGLLNSLFEGRTVAKLPFAPIPLVQRMSHRGLPGNDPTDCSMVFLYFLCSMSIRTNLQKLLGXXPPRAAAAAGGGLFPMPDPKVN

SEQ ID NO: 4088 - protein, 172 aa, Zea mays subsp. mays
  peptide (1)..(172): Ceres Seq. ID no. 12348305
  misc_feature (1)..(167): Homolog of NCBI NO: 3170241 NR Description: TU37B2 [Anopheles gambiae]
  misc_feature (1)..(167): Homolog of NCBI NO: 24585112 NR Description: CG10470-PA [Drosophila melanogaster]
  misc_feature (1)..(169): Homolog of NCBI NO: 33328806 NR Description: meg-2-like protein [Rattus norvegicus]
  misc_feature (1)..(167): Homolog of NCBI NO: 31238723 NR Description: ENSANGP00000016559 [Anopheles gambiae]
  misc_feature (1)..(169): Homolog of NCBI NO: 23956188 NR Description: RIKEN cDNA 1190006A08 [Mus musculus]
  misc_feature (1)..(169): Homolog of NCBI NO: 3283893 NR Description: unknown [Homo sapiens]
  misc_feature (1)..(172): Homolog of NCBI NO: 15240119 NR Description: putative protein
  misc_feature (1)..(172): Homolog of NCBI NO: 21553820 NR Description: unknown [Arabidopsis thaliana]
  misc_feature (1)..(172): Homolog of NCBI NO: 21554161 NR Description: unknown [Arabidopsis thaliana]
  misc_feature (1)..(172): Homolog of NCBI NO: 18399454 NR Description: expressed protein
  misc_feature (150)..(150): Xaa is any aa, unknown or other
  misc_feature (151)..(151): Xaa is any aa, unknown or other
MSWLLIYRTATYNSLRASIERHSRKLDAMKSGSTSASSGTAASSAQPASSRAKKMDRVETSLKDAARELSLAKLKSGAVVAVMLFVVFGLLNSLFEGRTVAKLPFAPIPLVQRMSHRGLPGNDPTDCSMVFLYFLCSMSIRTNLQKLLGXXPPRAAAAAGGGLFPMPDPKVN

SEQ ID NO: 4089 - protein, 144 aa, Zea mays subsp. mays
  peptide (1)..(144): Ceres Seq. ID no. 12348306
  misc_feature (1)..(139): Homolog of NCBI NO: 3170241 NR Description: TU37B2 [Anopheles gambiae]
  misc_feature (1)..(139): Homolog of NCBI NO: 24585112 NR Description: CG10470-PA [Drosophila melanogaster]
  misc_feature (1)..(141): Homolog of NCBI NO: 33328806 NR Description: meg-2-like protein [Rattus norvegicus]
  misc_feature (1)..(139): Homolog of NCBI NO: 31238723 NR Description: ENSANGP00000016559 [Anopheles gambiae]
  misc_feature (1)..(141): Homolog of NCBI NO: 23956188 NR Description: RIKEN cDNA 1190006A08 [Mus musculus]
  misc_feature (1)..(141): Homolog of NCBI NO: 3283893 NR Description: unknown [Homo sapiens]
  misc_feature (1)..(144): Homolog of NCBI NO: 15240119 NR Description: putative protein
  misc_feature (1)..(144): Homolog of NCBI NO: 21553820 NR Description: unknown [Arabidopsis thaliana]
  misc_feature (1)..(144): Homolog of NCBI NO: 21554161 NR Description: unknown [Arabidopsis thaliana]
  misc_feature (1)..(144): Homolog of NCBI NO: 18399454 NR Description: expressed protein
  misc_feature (122)..(122): Xaa is any aa, unknown or other
  misc_feature (123)..(123): Xaa is any aa, unknown or other
MKSGSTSASSGTAASSAQPASSRAKKMDRVETSLKDAARELSLAKLKSGAVVAVMLFVVFGLLNSLFEGRTVAKLPFAPIPLVQRMSHRGLPGNDPTDCSMVFLYFLCSMSIRTNLQKLLGXXPPRAAAAAGGGLFPMPDPKVN

SEQ ID NO: 4090 - DNA, 1062 bp, Zea mays subsp. mays
  misc_feature (1)..(1062): Ceres Seq. ID no. 12340757
  misc_feature: MA Experiment ID: 108543 Result: Up-regulated in Transcription
  misc_feature: MA Experiment ID: 108544 Result: Up-regulated in Transcription
  misc_feature: MA Experiment ID: 20000477 Result: Up-regulated in Transcription
  misc_feature: MA Experiment 20000477 PARAMETER Experiment Name: Zm_5mM_SA_P Parameter: Age (day) Value: 10
  misc_feature: MA Experiment 20000477 PARAMETER Experiment Name: Zm_5mM_SA_P Parameter: Organism Value: Zea mays
  misc_feature: MA Experiment 20000477 PARAMETER Experiment Name: Zm_5mM_SA_P Parameter: Plant Line Value: 35A19
  misc_feature: MA Experiment 20000477 PARAMETER Experiment Name: Zm_5mM_SA_P Parameter: Timepoint (hr) Value: 48
  misc_feature: MA Experiment 20000477 PARAMETER Experiment Name: Zm_5mM_SA_P Parameter: Tissue Value: Aerial
  misc_feature: MA Experiment 20000477 PARAMETER Experiment Name: Zm_5mM_SA_P Parameter: Treatment Value: 5mM SA vs. No Treatment
  misc_feature: MA Experiment ID: 20000492 Result: Down-regulated in Transcription
  misc_feature: MA Experiment 20000492 PARAMETER Experiment Name: Zm_Hybrid_Seed_Dev_P Parameter: DAP Value: 12
  misc_feature: MA Experiment 20000492 PARAMETER Experiment Name: Zm_Hybrid_Seed_Dev_P Parameter: Organism Value: Zea mays
  misc_feature: MA Experiment 20000492 PARAMETER Experiment Name: Zm_Hybrid_Seed_Dev_P Parameter: Plant Line Value: 35A19
  misc_feature: MA Experiment 20000492 PARAMETER Experiment Name: Zm_Hybrid_Seed_Dev_P Parameter: Tissue Value: Fert Kernel vs. Unfert Floret
acacactactttccctcgtgcggccgccgccctacaacaggtgccccaggtcttcgctgcgccattcgccagcgacgagcacccaacaggctcagaaacatcgctgacatccacatgcaccacagtagttcagtagagtagctgttggaacccacacaccggcgatggcaactgctcctgtgacatcctccatggctacgaactccacctgtgtgcggctgcctagcatgcccctgaggcgtgcacccgccatcgtctcctttgcctctcgtccatggtcaaccgcaatgacctcatgtactggattgtcgcggcactctgatgtggttgccgccgcggggcaccagaagttgatggggtctttgaacaacaacgagggactcatgtttggggtggttgtggcacggttcaacgaggtcgtgacaaatttgttactacagggtgccctggaaactttcgagcgatactctgttaaagcagaaaatataacagttgttagtgttcctggaagctttgaagttcctataacggcacaaaagcttgggaaatctggaaaatttgatgcaattctgtgcattggagctgtgattagaggtgacacaacccactatgatgccgttgcaaactcagctgcatcaggtgtactcaatgctggattatctgctggtgttccttgtgtatttggtgttctaacctgtgaagacatggatcaggcactgaaccgtgctggtggcaaggctggaaacaaaggagctgaagctgctcttactgccattgagatggcctcgctgttccggcatcacttaggctgacaccttgtgtattctgattttctatacacgaggcgtcagcatttcctcctatcaagagttttggctaatagagagcttttctgccgcggctagtataatttatttccaagtttgttggttcggtgcggattggttgctttccttctgagacctgaaaagctcacaagacatgtctgtaaacctgacatcgtgaataattgtctccacgaacgaaatatggtcatgaataaagctgcacaagtgttttgtc

SEQ ID NO: 4091 - protein, 215 aa, Zea mays subsp. mays
  peptide (1)..(215): Ceres Seq. ID no. 12340758
  misc_feature (71)..(213): Pfam Name: 6,7-dimethyl-8-ribityllumazine synthase Pfam Description: 6,7-dimethyl-8-ribityllumazine synthase
  misc_feature (72)..(212): Homolog of NCBI NO: 21402167 NR Description: DMRL_synthase, 6,7-dimethyl-8-ribityllumazine
  misc_feature (62)..(211): Homolog of NCBI NO: 33152277 NR Description: 6,7-dimethyl-8-ribityllumazine synthase
  misc_feature (62)..(211): Homolog of NCBI NO: 32034734 NR Description: hypothetical protein
  misc_feature (63)..(211): Homolog of NCBI NO: 2497762 NR Description: 6,7-dimethyl-8-ribityllumazine synthase (DMRL
  misc_feature (62)..(211): Homolog of NCBI NO: 1710405 NR Description: 6,7-dimethyl-8-ribityllumazine synthase (DMRL
  misc_feature (62)..(214): Homolog of NCBI NO: 9954974 NR Description: Chain A, Crystal Structures Of A Pentameric And An Icosahedral Plant Lumazine Synthase Reveals The Structural
  misc_feature (21)..(214): Homolog of NCBI NO: 5532608 NR Description: 6,7-dimethyl-8-ribityllumazine synthase precursor
  misc_feature (1)..(214): Homolog of NCBI NO: 20139859 NR Description: 6,7-dimethyl-8-ribityllumazine synthase,
  misc_feature (31)..(214): Homolog of NCBI NO: 15224809 NR Description: 6,7-dimethyl-8-ribityllumazine synthase precursor
  misc_feature (2)..(214): Homolog of NCBI NO: 38345388 NR Description: OSJNBa0067K08.17 [Oryza sativa (japonica
MATAPVTSSMATNSTCVRLPSMPLRRAPAIVSFASRPWSTAMTSCTGLSRHSDVVAAAGHQKLMGSLNNNEGLMFGVVVARFNEVVTNLLLQGALETFERYSVKAENITVVSVPGSFEVPITAQKLGKSGKFDAILCIGAVIRGDTTHYDAVANSAASGVLNAGLSAGVPCVFGVLTCEDMDQALNRAGGKAGNKGAEAALTAIEMASLFRHHLG

SEQ ID NO: 4092 - protein, 206 aa, Zea mays subsp. mays
  peptide (1)..(206): Ceres Seq. ID no. 12340759
  misc_feature (62)..(204): Pfam Name: 6,7-dimethyl-8-ribityllumazine synthase Pfam Description: 6,7-dimethyl-8-ribityllumazine synthase
  misc_feature (63)..(203): Homolog of NCBI NO: 21402167 NR Description: DMRL_synthase, 6,7-dimethyl-8-ribityllumazine
  misc_feature (53)..(202): Homolog of NCBI NO: 33152277 NR Description: 6,7-dimethyl-8-ribityllumazine synthase
  misc_feature (53)..(202): Homolog of NCBI NO: 32034734 NR Description: hypothetical protein
  misc_feature (54)..(202): Homolog of NCBI NO: 2497762 NR Description: 6,7-dimethyl-8-ribityllumazine synthase (DMRL
  misc_feature (53)..(202): Homolog of NCBI NO: 1710405 NR Description: 6,7-dimethyl-8-ribityllumazine synthase (DMRL
  misc_feature (53)..(205): Homolog of NCBI NO: 9954974 NR Description: Chain A, Crystal Structures Of A Pentameric And An Icosahedral Plant Lumazine Synthase Reveals The Structural
  misc_feature (12)..(205): Homolog of NCBI NO: 5532608 NR Description: 6,7-dimethyl-8-ribityllumazine synthase precursor
  misc_feature (1)..(205): Homolog of NCBI NO: 20139859 NR Description: 6,7-dimethyl-8-ribityllumazine synthase,
  misc_feature (22)..(205): Homolog of NCBI NO: 15224809 NR Description: 6,7-dimethyl-8-ribityllumazine synthase precursor
  misc_feature (1)..(205): Homolog of NCBI NO: 38345388 NR Description: OSJNBa0067K08.17 [Oryza sativa (japonica
MATNSTCVRLPSMPLRRAPAIVSFASRPWSTAMTSCTGLSRHSDVVAAAGHQKLMGSLNNNEGLMFGVVVARFNEVVTNLLLQGALETFERYSVKAENITVVSVPGSFEVPITAQKLGKSGKFDAILCIGAVIRGDTTHYDAVANSAASGVLNAGLSAGVPCVFGVLTCEDMDQALNRAGGKAGNKGAEAALTAIEMASLFRHHLG

SEQ ID NO: 4093 - protein, 194 aa, Zea mays subsp. mays
  peptide (1)..(194): Ceres Seq. ID no. 12340760
  misc_feature (50)..(192): Pfam Name: 6,7-dimethyl-8-ribityllumazine synthase Pfam Description: 6,7-dimethyl-8-ribityllumazine synthase
  misc_feature (51)..(191): Homolog of NCBI NO: 21402167 NR Description: DMRL_synthase, 6,7-dimethyl-8-ribityllumazine
  misc_feature (41)..(190): Homolog of NCBI NO: 33152277 NR Description: 6,7-dimethyl-8-ribityllumazine synthase
  misc_feature (41)..(190): Homolog of NCBI NO: 32034734 NR Description: hypothetical protein
  misc_feature (42)..(190): Homolog of NCBI NO: 2497762 NR Description: 6,7-dimethyl-8-ribityllumazine synthase (DMRL
  misc_feature (41)..(190): Homolog of NCBI NO: 1710405 NR Description: 6,7-dimethyl-8-ribityllumazine synthase (DMRL
  misc_feature (41)..(193): Homolog of NCBI NO: 9954974 NR Description: Chain A, Crystal Structures Of A Pentameric And An Icosahedral Plant Lumazine Synthase Reveals The Structural
  misc_feature (1)..(193): Homolog of NCBI NO: 5532608 NR Description: 6,7-dimethyl-8-ribityllumazine synthase precursor
  misc_feature (1)..(193): Homolog of NCBI NO: 20139859 NR Description: 6,7-dimethyl-8-ribityllumazine synthase,
  misc_feature (10)..(193): Homolog of NCBI NO: 15224809 NR Description: 6,7-dimethyl-8-ribityllumazine synthase precursor
  misc_feature (1)..(193): Homolog of NCBI NO: 38345388 NR Description: OSJNBa0067K08.17 [Oryza sativa (japonica
MPLRRAPAIVSFASRPWSTAMTSCTGLSRHSDVVAAAGHQKLMGSLNNNEGLMFGVVVARFNEVVTNLLLQGALETFERYSVKAENITVVSVPGSFEVPITAQKLGKSGKFDAILCIGAVIRGDTTHYDAVANSAASGVLNAGLSAGVPCVFGVLTCEDMDQALNRAGGKAGNKGAEAALTAIEMASLFRHHLG

SEQ ID NO: 4094 - DNA, 786 bp, Zea mays subsp. mays
  misc_feature (1)..(786): Ceres Seq. ID no. 12365367
  misc_feature: MA Experiment ID: 108515 Result: Up-regulated in Transcription
  misc_feature: MA Experiment 108515 PARAMETER Experiment Name: Zm_2mM_SA_P Parameter: Age (day) Value: 8
  misc_feature: MA Experiment 108515 PARAMETER Experiment Name: Zm_2mM_SA_P Parameter: Organism Value: Zea mays
  misc_feature: MA Experiment 108515 PARAMETER Experiment Name: Zm_2mM_SA_P Parameter: Plant Line Value: 35A19
  misc_feature: MA Experiment 108515 PARAMETER Experiment Name: Zm_2mM_SA_P Parameter: Timepoint (hr) Value: 12
  misc_feature: MA Experiment 108515 PARAMETER Experiment Name: Zm_2mM_SA_P Parameter: Tissue Value: Aerial
  misc_feature: MA Experiment 108515 PARAMETER Experiment Name: Zm_2mM_SA_P Parameter: Treatment Value: 2mM SA vs. No Treatment
  misc_feature: MA Experiment ID: 108527 Result: Up-regulated in Transcription
  misc_feature: MA Experiment 108527 PARAMETER Experiment Name: Zm_5mM_NO_P Parameter: Age (day) Value: 8
  misc_feature: MA Experiment 108527 PARAMETER Experiment Name: Zm_5mM_NO_P Parameter: Organism Value: Zea mays
  misc_feature: MA Experiment 108527 PARAMETER Experiment Name: Zm_5mM_NO_P Parameter: Plant Line Value: 35A19
  misc_feature: MA Experiment 108527 PARAMETER Experiment Name: Zm_5mM_NO_P Parameter: Timepoint (hr) Value: 6
  misc_feature: MA Experiment 108527 PARAMETER Experiment Name: Zm_5mM_NO_P Parameter: Tissue Value: Aerial
  misc_feature: MA Experiment 108527 PARAMETER Experiment Name: Zm_5mM_NO_P Parameter: Treatment Value: 5mM NO vs. No Treatment
  misc_feature: MA Experiment ID: 108530 Result: Down-regulated in Transcription
  misc_feature: MA Experiment 108530 PARAMETER Experiment Name: Zm_Imbibed_Seeds_P Parameter: Age (day) Value: 6 vs. 2
  misc_feature: MA Experiment 108530 PARAMETER Experiment Name: Zm_Imbibed_Seeds_P Parameter: Organism Value: Zea mays
  misc_feature: MA Experiment 108530 PARAMETER Experiment Name: Zm_Imbibed_Seeds_P Parameter: Plant Line Value: 35A19
  misc_feature: MA Experiment 108530 PARAMETER Experiment Name: Zm_Imbibed_Seeds_P Parameter: Tissue Value: Aerial vs. Embryo
  misc_feature: MA Experiment ID: 108544 Result: Down-regulated in Transcription
  misc_feature: MA Experiment ID: 108559 Result: Up-regulated in Transcription
  misc_feature: MA Experiment 108559 PARAMETER Experiment Name: Zm_5mM_NO_P Parameter: Age (day) Value: 8
  misc_feature: MA Experiment 108559 PARAMETER Experiment Name: Zm_5mM_NO_P Parameter: Organism Value: Zea mays
  misc_feature: MA Experiment 108559 PARAMETER Experiment Name: Zm_5mM_NO_P Parameter: Plant Line Value: 35A19
  misc_feature: MA Experiment 108559 PARAMETER Experiment Name: Zm_5mM_NO_P Parameter: Timepoint (hr) Value: 12
  misc_feature: MA Experiment 108559 PARAMETER Experiment Name: Zm_5mM_NO_P Parameter: Tissue Value: Aerial
  misc_feature: MA Experiment 108559 PARAMETER Experiment Name: Zm_5mM_NO_P Parameter: Treatment Value: 5mM NO vs. No Treatment
  misc_feature: MA Experiment ID: 20000477 Result: Up-regulated in Transcription
  misc_feature: MA Experiment 20000477 PARAMETER Experiment Name: Zm_5mM_SA_P Parameter: Age (day) Value: 10
  misc_feature: MA Experiment 20000477 PARAMETER Experiment Name: Zm_5mM_SA_P Parameter: Organism Value: Zea mays
  misc_feature: MA Experiment 20000477 PARAMETER Experiment Name: Zm_5mM_SA_P Parameter: Plant Line Value: 35A19
  misc_feature: MA Experiment 20000477 PARAMETER Experiment Name: Zm_5mM_SA_P Parameter: Timepoint (hr) Value: 48
  misc_feature: MA Experiment 20000477 PARAMETER Experiment Name: Zm_5mM_SA_P Parameter: Tissue Value: Aerial
  misc_feature: MA Experiment 20000477 PARAMETER Experiment Name: Zm_5mM_SA_P Parameter: Treatment Value: 5mM SA vs. No Treatment
  misc_feature: MA Experiment ID: 20000478 Result: Up-regulated in Transcription
  misc_feature: MA Experiment 20000478 PARAMETER Experiment Name: Zm_5mM_SA_P Parameter: Age (day) Value: 11
  misc_feature: MA Experiment 20000478 PARAMETER Experiment Name: Zm_5mM_SA_P Parameter: Organism Value: Zea mays
  misc_feature: MA Experiment 20000478 PARAMETER Experiment Name: Zm_5mM_SA_P Parameter: Plant Line Value: 35A19
  misc_feature: MA Experiment 20000478 PARAMETER Experiment Name: Zm_5mM_SA_P Parameter: Timepoint (hr) Value: 72
  misc_feature: MA Experiment 20000478 PARAMETER Experiment Name: Zm_5mM_SA_P Parameter: Tissue Value: Aerial
  misc_feature: MA Experiment 20000478 PARAMETER Experiment Name: Zm_5mM_SA_P Parameter: Treatment Value: 5mM SA vs. No Treatment
  misc_feature: MA Experiment ID: 20000626 Result: Up-regulated in Transcription
  misc_feature: MA Experiment 20000626 PARAMETER Experiment Name: Zm_Herbicide-Treatments_P Parameter: Timepoint (hr) Value: 12
  misc_feature: MA Experiment 20000626 PARAMETER Experiment Name: Zm_Herbicide-Treatments_P Parameter: Tissue Value: Aerial
  misc_feature: MA Experiment 20000626 PARAMETER Experiment Name: Zm_Herbicide-Treatments_P Parameter: Treatment Value: Roundup vs. No Treatment
  misc_feature: MA Experiment ID: 20000627 Result: Up-regulated in Transcription
  misc_feature: MA Experiment 20000627 PARAMETER Experiment Name: Zm_Herbicide-Treatments_P Parameter: Timepoint (hr) Value: 12
  misc_feature: MA Experiment 20000627 PARAMETER Experiment Name: Zm_Herbicide-Treatments_P Parameter: Tissue Value: Aerial
  misc_feature: MA Experiment 20000627 PARAMETER Experiment Name: Zm_Herbicide-Treatments_P Parameter: Treatment Value: Finale vs. No Treatment
gtcaactgatcaagccaaagccgaacaccaccacaaggcagcagccgaacaccaaggcagcagccgccaccacttcattgcgcgaatcggagcccgtggccgtcgcctccgccctcgcgattcgccgccgttgcccacgagcgaggcttcctcctcttcgtcgccgccgtcgcaggaggggaaagaggataaactgccatggcgggcaggctcctcgcgaatctaatcgtcatgggcggaaccgtggttggcagggccatgctccaggcctaccgccaggccatcgtcaatgcaaacaaaactggagctgcccaagaagctataaatggtattagacgggctagcaaggccatgactgagcaagaagcccggcaaattcttggtatcagtgaaaattcgacgtgggaagagattgtccagaagtacgacacaatgtttgagaggaataacaagaacggcagcttctatctccagtcaaaggttcatagagcgaaagaatgcctggaacctttatatcaaaagcctgatgtactgaactgagattttgcagacgccctagcttctgtttgaagcggtatgcctaattgatcgatttattagtgtgcccagagatcaacgttcagtttattgatcggtttgccaatgcgcccagagatcaacgttcagttttgagttatgtgttgggcgcatcaggttggttcgttgtaatgccagaataatgtttaacaaacatactgaattttggctgtttctcattggcaacgcctcagtcactggttttaattc

SEQ ID NO: 4095 - protein, 113 aa, Zea mays subsp. mays
  peptide (1)..(113): Ceres Seq. ID no. 12365368
  misc_feature (2)..(111): Pfam Name: Uncharacterised protein family (UPF0108) Pfam Description: Uncharacterised protein family (UPF0108)
  misc_feature (12)..(108): Homolog of NCBI NO: 10176880 NR Description: gene_id:MAC9.20~unknown protein [Arabidopsis
  misc_feature (1)..(108): Homolog of NCBI NO: 18424521 NR Description: auxin-regulated protein
  misc_feature (12)..(108): Homolog of NCBI NO: 37535410 NR Description: putative pol polyprotein [Oryza sativa (japonica
  misc_feature (2)..(107): Homolog of NCBI NO: 11357639 NR Description: hypothetical protein F25L23.140 - Arabidopsis
  misc_feature (1)..(107): Homolog of NCBI NO: 18411133 NR Description: putative protein
  misc_feature (2)..(111): Homolog of NCBI NO: 34905796 NR Description: P0401G10.24 [Oryza sativa (japonica
MAGRLLANLIVMGGTVVGRAMLQAYRQAIVNANKTGAAQEAINGIRRASKAMTEQEARQILGISENSTWEEIVQKYDTMFERNNKNGSFYLQSKVHRAKECLEPLYQKPDVLN

SEQ ID NO: 4096 - protein, 110 aa, Zea mays subsp. mays
  peptide (1)..(110): Ceres Seq. ID no. 12365369
QLIKPKPNTTTRQQPNTKAAAATTSLRESEPVAVASALAIRRRCPRARLPPLRRRRRRRGKRINCHGGQAPRESNRHGRNRGWQGHAPGLPPGHRQCKQNWSCPRSYKWY

SEQ ID NO: 4097 - protein, 102 aa, Zea mays subsp. mays
  peptide (1)..(102): Ceres Seq. ID no. 12365370
  misc_feature (1)..(100): Pfam Name: Uncharacterised protein family (UPF0108) Pfam Description: Uncharacterised protein family (UPF0108)
  misc_feature (1)..(96): Homolog of NCBI NO: 11357639 NR Description: hypothetical protein F25L23.140 - Arabidopsis
  misc_feature (1)..(96): Homolog of NCBI NO: 18411133 NR Description: putative protein
  misc_feature (1)..(97): Homolog of NCBI NO: 18424521 NR Description: auxin-regulated protein
  misc_feature (1)..(97): Homolog of NCBI NO: 37535410 NR Description: putative pol polyprotein [Oryza sativa (japonica
  misc_feature (1)..(97): Homolog of NCBI NO: 10176880 NR Description: gene_id:MAC9.20~unknown protein [Arabidopsis
  misc_feature (1)..(100): Homolog of NCBI NO: 34905796 NR Description: P0401G10.24 [Oryza sativa (japonica
MGGTVVGRAMLQAYRQAIVNANKTGAAQEAINGIRRASKAMTEQEARQILGISENSTWEEIVQKYDTMFERNNKNGSFYLQSKVHRAKECLEPLYQKPDVLN

SEQ ID NO: 4098 - DNA, 449 bp, Zea mays subsp. mays
  misc_feature (1)..(449): Ceres Seq. ID no. 12595631
  misc_feature: MA Experiment ID: 108530 Result: Down-regulated in Transcription
  misc_feature: MA Experiment 108530 PARAMETER Experiment Name: Zm_Imbibed_Seeds_P Parameter: Age (day) Value: 6 vs. 2
  misc_feature: MA Experiment 108530 PARAMETER Experiment Name: Zm_Imbibed_Seeds_P Parameter: Organism Value: Zea mays
  misc_feature: MA Experiment 108530 PARAMETER Experiment Name: Zm_Imbibed_Seeds_P Parameter: Plant Line Value: 35A19
  misc_feature: MA Experiment 108530 PARAMETER Experiment Name: Zm_Imbibed_Seeds_P Parameter: Tissue Value: Aerial vs. Embryo
  misc_feature: MA Experiment ID: 108535 Result: Up-regulated in Transcription
  misc_feature: MA Experiment 108535 PARAMETER Experiment Name: Zm_Meristem_P Parameter: Age (day) Value: 8
  misc_feature: MA Experiment 108535 PARAMETER Experiment Name: Zm_Meristem_P Parameter: Organism Value: Zea mays
  misc_feature: MA Experiment 108535 PARAMETER Experiment Name: Zm_Meristem_P Parameter: Plant Line Value: 35A19
  misc_feature: MA Experiment 108535 PARAMETER Experiment Name: Zm_Meristem_P Parameter: Tissue Value: Root Meristem vs. Above Root Meristem
  misc_feature: MA Experiment ID: 20000108 Result: Up-regulated in Transcription
  misc_feature: MA Experiment 20000108 PARAMETER Experiment Name: Zm_Root-Tips_P Parameter: Age (day) Value: 12
  misc_feature: MA Experiment 20000108 PARAMETER Experiment Name: Zm_Root-Tips_P Parameter: Organism Value: Zea mays
  misc_feature: MA Experiment 20000108 PARAMETER Experiment Name: Zm_Root-Tips_P Parameter: Tissue Value: Root tips vs. Root mid region    35
  misc_feature: MA Experiment 20000108 PARAMETER Experiment Name: Zm_Root-Tips_P Parameter: Tissue Value: Root tips vs. Root mid region   Sequence Listing-Misc Features (4)
  misc_feature: MA Experiment ID: 20000478 Result: Down-regulated in Transcription
  misc_feature: MA Experiment 20000478 PARAMETER Experiment Name: Zm_5mM_SA_P Parameter: Age (day) Value: 11
  misc_feature: MA Experiment 20000478 PARAMETER Experiment Name: Zm_5mM_SA_P Parameter: Organism Value: Zea mays
  misc_feature: MA Experiment 20000478 PARAMETER Experiment Name: Zm_5mM_SA_P Parameter: Plant Line Value: 35A19
  misc_feature: MA Experiment 20000478 PARAMETER Experiment Name: Zm_5mM_SA_P Parameter: Timepoint (hr) Value: 72
  misc_feature: MA Experiment 20000478 PARAMETER Experiment Name: Zm_5mM_SA_P Parameter: Tissue Value: Aerial
  misc_feature: MA Experiment 20000478 PARAMETER Experiment Name: Zm_5mM_SA_P Parameter: Treatment Value: 5mM SA vs. No Treatment
  misc_feature: MA Experiment ID: 20000479 Result: Down-regulated in Transcription
  misc_feature: MA Experiment 20000479 PARAMETER Experiment Name: Zm_Drought_P Parameter: Age (day) Value: 10
  misc_feature: MA Experiment 20000479 PARAMETER Experiment Name: Zm_Drought_P Parameter: Organism Value: Zea mays
  misc_feature: MA Experiment 20000479 PARAMETER Experiment Name: Zm_Drought_P Parameter: Plant Line Value: 35A19
  misc_feature: MA Experiment 20000479 PARAMETER Experiment Name: Zm_Drought_P Parameter: Timepoint (hr) Value: 48
  misc_feature: MA Experiment 20000479 PARAMETER Experiment Name: Zm_Drought_P Parameter: Tissue Value: Aerial
  misc_feature: MA Experiment 20000479 PARAMETER Experiment Name: Zm_Drought_P Parameter: Treatment Value: Drought vs. No Drought
  misc_feature: MA Experiment ID: 20000488 Result: Up-regulated in Transcription
  misc_feature: MA Experiment 20000488 PARAMETER Experiment Name: Zm_50mM_NH4NO3_L_to_H_P Parameter: Organism Value: Zea mays
  misc_feature: MA Experiment 20000488 PARAMETER Experiment Name: Zm_50mM_NH4NO3_L_to_H_P Parameter: Timepoint (hr) Value: 8
  misc_feature: MA Experiment 20000488 PARAMETER Experiment Name: Zm_50mM_NH4NO3_L_to_H_P Parameter: Tissue Value: Leaves
  misc_feature: MA Experiment 20000488 PARAMETER Experiment Name: Zm_50mM_NH4NO3_L_to_H_P Parameter: Treatment Value: 50mM NH4NO3 vs. 100mM Mannitol
aaaaagcggcgtgatgcagttcctccgaggcagcggcggcggggcgggggcggtgggttcccgggggtggcgtgggaggtgttgcggcggcacttctctaagaagcggtccgttgcacgtgaggcggatcaaccccaaggtgcccaaggaggaggccgtcgccatttccggccgactcctccagatcctctccgaccatgggcccctcaccgtcggcaacacctggaaccacgccaaggatgctggcatcgctggtctgaacagcaagacgcacatgaagatcctgctgaaatggatnacggggaaaatgtcgtnaagctgaccctgcgtgcacgtgggcaacgcgaanaagttcctctactccccgtccactgaaagcagcagcagcgccggcgcatcaccgtcatccacatcggcctcgcagtgacggtcaatcgccgttaagcctt

SEQ ID NO: 4099 - protein, 124 aa, Zea mays subsp. mays
  peptide (1)..(124): Ceres Seq. ID no. 12595632
  misc_feature (100)..(100): Xaa is any aa, unknown or other
  misc_feature (105)..(105): Xaa is any aa, unknown or other
  misc_feature (117)..(117): Xaa is any aa, unknown or other
KKRRDAVPPRQRRRGGGGGFPGVAWEVLRRHFSKKRSVAREADQPQGAQGGGRRHFRPTPPDPLRPWAPHRRQHLEPRQGCWHRWSEQQDAHEDPAEMDXGENVXKLTLRARGQREXVPLLPVH

SEQ ID NO: 4100 - protein, 106 aa, Zea mays subsp. mays
  peptide (1)..(106): Ceres Seq. ID no. 12595633
  misc_feature (5)..(106): Homolog of NCBI NO: 27573361 NR Description: unknown protein [Oryza sativa (japonica
  misc_feature (34)..(106): Homolog of NCBI NO: 18410491 NR Description: expressed protein; protein id: At1g73940.1, by cDNA: 32565., supported by cDNA: gi_16323092 [Arabidopsis
  misc_feature (40)..(106): Homolog of NCBI NO: 15239880 NR Description: putative protein; protein id: At5g49410.1, by cDNA: 6602. [Arabidopsis thaliana] >gi|9759424|dbj|BAB09911.1|
  misc_feature (40)..(106): Homolog of NCBI NO: 21594042 NR Description: unknown [Arabidopsis thaliana]
  misc_feature (34)..(106): Homolog of NCBI NO: 38637563 NR Description: unknown protein [Oryza sativa (japonica
  misc_feature (99)..(99): Xaa is any aa, unknown or other
  misc_feature (105)..(105): Xaa is any aa, unknown or other
KSGVMQFLRGSGGGAGAVGSRGWRGRCCGGTSLRSGPLHVRRINPKVPKEEAVAISGRLLQILSDHGPLTVGNTWNHAKDAGIAGLNSKTHMKILLKWXTGKMSXS

SEQ ID NO: 4101 - protein, 102 aa, Zea mays subsp. mays
  peptide (1)..(102): Ceres Seq. ID no. 12595634
  misc_feature (1)..(102): Homolog of NCBI NO: 27573361 NR Description: unknown protein [Oryza sativa (japonica
  misc_feature (30)..(102): Homolog of NCBI NO: 18410491 NR Description: expressed protein; protein id: At1g73940.1, by cDNA: 32565., supported by cDNA: gi_16323092 [Arabidopsis
  misc_feature (36)..(102): Homolog of NCBI NO: 15239880 NR Description: putative protein; protein id: At5g49410.1, by cDNA: 6602. [Arabidopsis thaliana] >gi|9759424|dbj|BAB09911.1|
  misc_feature (36)..(102): Homolog of NCBI NO: 21594042 NR Description: unknown [Arabidopsis thaliana]
  misc_feature (30)..(102): Homolog of NCBI NO: 38637563 NR Description: unknown protein [Oryza sativa (japonica
  misc_feature (95)..(95): Xaa is any aa, unknown or other
  misc_feature (101)..(101): Xaa is any aa, unknown or other
MQFLRGSGGGAGAVGSRGWRGRCCGGTSLRSGPLHVRRINPKVPKEEAVAISGRLLQILSDHGPLTVGNTWNHAKDAGIAGLNSKTHMKILLKWXTGKMSXS

SEQ ID NO: 4102 - DNA, 666 bp, Zea mays subsp. mays
  misc_feature (1)..(666): Ceres Seq. ID no. 12401661
  misc_feature: MA Experiment ID: 108527 Result: Up-regulated in Transcription
  misc_feature: MA Experiment 108527 PARAMETER Experiment Name: Zm_5mM_NO_P Parameter: Age (day) Value: 8
  misc_feature: MA Experiment 108527 PARAMETER Experiment Name: Zm_5mM_NO_P Parameter: Organism Value: Zea mays
  misc_feature: MA Experiment 108527 PARAMETER Experiment Name: Zm_5mM_NO_P Parameter: Plant Line Value: 35A19
  misc_feature: MA Experiment 108527 PARAMETER Experiment Name: Zm_5mM_NO_P Parameter: Timepoint (hr) Value: 6
  misc_feature: MA Experiment 108527 PARAMETER Experiment Name: Zm_5mM_NO_P Parameter: Tissue Value: Aerial
  misc_feature: MA Experiment 108527 PARAMETER Experiment Name: Zm_5mM_NO_P Parameter: Treatment Value: 5mM NO vs. No Treatment
  misc_feature: MA Experiment ID: 20000535 Result: Down-regulated in Transcription
  misc_feature: MA Experiment 20000535 PARAMETER Experiment Name: Zm_Hybrid_Seed_Dev_P Parameter: DAP Value: 30 vs. 12
  misc_feature: MA Experiment 20000535 PARAMETER Experiment Name: Zm_Hybrid_Seed_Dev_P Parameter: Organism Value: Zea mays
  misc_feature: MA Experiment 20000535 PARAMETER Experiment Name: Zm_Hybrid_Seed_Dev_P Parameter: Plant Line Value: 35A19
  misc_feature: MA Experiment 20000535 PARAMETER Experiment Name: Zm_Hybrid_Seed_Dev_P Parameter: Tissue Value: Embryo vs. Unfert Floret
cgggccacctcgagctgcgcaaccgcgaccccgacgacaacccgctggtgacgttcaactacttctcgcaccccgaggacctccgccgctgcgtggccggcttgtcggtcatcgagcgcgtcatccactcccaggccttcaagaacttcacgtaccccgacttctccatggagacgctgctcaacatgtcgacggggttccccgtcaacctgctgccccggcacgacaacgactccacgtcgcttgagatgttctgcaaggacaccgtcatgaccatctggcactaccacggtggctgccaggtcggcagggtcgtcgacgctgaataccgagtgctcggcatcgacgcgctgcgcgtcattgacggctccactttcaacgcctcgccaggaaccaacccgcaggcaaccgtcatgatgctcggcaggtatatgggagtcagaatcacaaacgaaaggttggcagctgaaggattagagggaacaaaaccgtgatgatcctataatccaagacagtaggcgaggcgtattaagaatctctattgaactatgtaatgctggattcaatattgttggtgtgattctgatattgataggttgcacatattgtcggagttgtatcatgttgtttgttgttactatgtggactattatgagtgaaatctgc

SEQ ID NO: 4103 - protein, 163 aa, Zea mays subsp. mays
  peptide (1)..(163): Ceres Seq. ID no. 12401662
  misc_feature (1)..(144): Pfam Name: GMC oxidoreductase Pfam Description: GMC oxidoreductase
  misc_feature (1)..(153): Homolog of NCBI NO: 9502391 NR Description: T12C24.11 [Arabidopsis thaliana]
  misc_feature (1)..(153): Homolog of NCBI NO: 17978954 NR Description: At1g12570/T12C24_9 [Arabidopsis thaliana]
  misc_feature (1)..(153): Homolog of NCBI NO: 22329512 NR Description: hypothetical protein
  misc_feature (1)..(153): Homolog of NCBI NO: 8778640 NR Description: F5O11.31 [Arabidopsis thaliana]
  misc_feature (1)..(159): Homolog of NCBI NO: 24417440 NR Description: unknown [Arabidopsis thaliana]
  misc_feature (1)..(159): Homolog of NCBI NO: 18410417 NR Description: mandelonitrile lyase-like protein
  misc_feature (1)..(152): Homolog of NCBI NO: 15242236 NR Description: mandelonitrile lyase-like protein
  misc_feature (1)..(152): Homolog of NCBI NO: 11358959 NR Description: probable mandelonitrile lyase (EC 4.1.2.10)
  misc_feature (1)..(152): Homolog of NCBI NO: 37536228 NR Description: putative mandelonitrile lyase
  misc_feature (1)..(158): Homolog of NCBI NO: 38605946 NR Description: OSJNBa0019K04.7 [Oryza sativa (japonica
GHLELRNRDPDDNPLVTFNYFSHPEDLRRCVAGLSVIERVIHSQAFKNFTYPDFSMETLLNMSTGFPVNLLPRHDNDSTSLEMFCKDTVMTIWHYHGGCQVGRVVDAEYRVLGIDALRVIDGSTFNASPGTNPQATVMMLGRYMGVRITNERLAAEGLEGTKP

SEQ ID NO: 4104 - protein, 108 aa, Zea mays subsp. mays
  peptide (1)..(108): Ceres Seq. ID no. 12401663
  misc_feature (1)..(89): Pfam Name: GMC oxidoreductase Pfam Description: GMC oxidoreductase
  misc_feature (1)..(98): Homolog of NCBI NO: 17978954 NR Description: At1g12570/T12C24_9 [Arabidopsis thaliana]
  misc_feature (1)..(98): Homolog of NCBI NO: 22329512 NR Description: hypothetical protein
  misc_feature (1)..(98): Homolog of NCBI NO: 9502391 NR Description: T12C24.11 [Arabidopsis thaliana]
  misc_feature (1)..(98): Homolog of NCBI NO: 8778640 NR Description: F5O11.31 [Arabidopsis thaliana]
  misc_feature (1)..(104): Homolog of NCBI NO: 24417440 NR Description: unknown [Arabidopsis thaliana]
  misc_feature (1)..(104): Homolog of NCBI NO: 18410417 NR Description: mandelonitrile lyase-like protein
  misc_feature (1)..(97): Homolog of NCBI NO: 15242236 NR Description: mandelonitrile lyase-like protein
  misc_feature (1)..(97): Homolog of NCBI NO: 11358959 NR Description: probable mandelonitrile lyase (EC 4.1.2.10)
  misc_feature (1)..(97): Homolog of NCBI NO: 37536228 NR Description: putative mandelonitrile lyase
  misc_feature (1)..(103): Homolog of NCBI NO: 38605946 NR Description: OSJNBa0019K04.7 [Oryza sativa (japonica
METLLNMSTGFPVNLLPRHDNDSTSLEMFCKDTVMTIWHYHGGCQVGRVVDAEYRVLGIDALRVIDGSTFNASPGTNPQATVMMLGRYMGVRITNERLAAEGLEGTKP

SEQ ID NO: 4105 - protein, 102 aa, Zea mays subsp. mays
  peptide (1)..(102): Ceres Seq. ID no. 12401664
  misc_feature (1)..(83): Pfam Name: GMC oxidoreductase Pfam Description: GMC oxidoreductase
  misc_feature (1)..(92): Homolog of NCBI NO: 22329512 NR Description: hypothetical protein
  misc_feature (1)..(92): Homolog of NCBI NO: 9502391 NR Description: T12C24.11 [Arabidopsis thaliana]
  misc_feature (1)..(92): Homolog of NCBI NO: 17978954 NR Description: At1g12570/T12C24_9 [Arabidopsis thaliana]
  misc_feature (1)..(92): Homolog of NCBI NO: 8778640 NR Description: F5O11.31 [Arabidopsis thaliana]
  misc_feature (1)..(98): Homolog of NCBI NO: 24417440 NR Description: unknown [Arabidopsis thaliana]
  misc_feature (1)..(98): Homolog of NCBI NO: 18410417 NR Description: mandelonitrile lyase-like protein
  misc_feature (1)..(91): Homolog of NCBI NO: 15242236 NR Description: mandelonitrile lyase-like protein
  misc_feature (1)..(91): Homolog of NCBI NO: 11358959 NR Description: probable mandelonitrile lyase (EC 4.1.2.10)
  misc_feature (1)..(91): Homolog of NCBI NO: 37536228 NR Description: putative mandelonitrile lyase
  misc_feature (1)..(97): Homolog of NCBI NO: 38605946 NR Description: OSJNBa0019K04.7 [Oryza sativa (japonica
MSTGFPVNLLPRHDNDSTSLEMFCKDTVMTIWHYHGGCQVGRVVDAEYRVLGIDALRVIDGSTFNASPGTNPQATVMMLGRYMGVRITNERLAAEGLEGTKP

SEQ ID NO: 4106 - DNA, 1316 bp, Zea mays subsp. mays
  misc_feature (1)..(1316): Ceres Seq. ID no. 12358113
  misc_feature: MA Experiment ID: 108523 Result: Up-regulated in Transcription
  misc_feature: MA Experiment 108523 PARAMETER Experiment Name: Zm_42deg_Heat_P Parameter: Age (day) Value: 8
  misc_feature: MA Experiment 108523 PARAMETER Experiment Name: Zm_42deg_Heat_P Parameter: Organism Value: Zea mays
  misc_feature: MA Experiment 108523 PARAMETER Experiment Name: Zm_42deg_Heat_P Parameter: Plant Line Value: 35A19
  misc_feature: MA Experiment 108523 PARAMETER Experiment Name: Zm_42deg_Heat_P Parameter: Temperature (deg C) Value: 42 vs. 22
  misc_feature: MA Experiment 108523 PARAMETER Experiment Name: Zm_42deg_Heat_P Parameter: Timepoint (hr) Value: 6
  misc_feature: MA Experiment 108523 PARAMETER Experiment Name: Zm_42deg_Heat_P Parameter: Tissue Value: Aerial
  misc_feature: MA Experiment ID: 108527 Result: Up-regulated in Transcription
  misc_feature: MA Experiment 108527 PARAMETER Experiment Name: Zm_5mM_NO_P Parameter: Age (day) Value: 8
  misc_feature: MA Experiment 108527 PARAMETER Experiment Name: Zm_5mM_NO_P Parameter: Organism Value: Zea mays
  misc_feature: MA Experiment 108527 PARAMETER Experiment Name: Zm_5mM_NO_P Parameter: Plant Line Value: 35A19
  misc_feature: MA Experiment 108527 PARAMETER Experiment Name: Zm_5mM_NO_P Parameter: Timepoint (hr) Value: 6
  misc_feature: MA Experiment 108527 PARAMETER Experiment Name: Zm_5mM_NO_P Parameter: Tissue Value: Aerial
  misc_feature: MA Experiment 108527 PARAMETER Experiment Name: Zm_5mM_NO_P Parameter: Treatment Value: 5mM NO vs. No Treatment
  misc_feature: MA Experiment ID: 108530 Result: Up-regulated in Transcription
  misc_feature: MA Experiment 108530 PARAMETER Experiment Name: Zm_Imbibed_Seeds_P Parameter: Age (day) Value: 6 vs. 2
  misc_feature: MA Experiment 108530 PARAMETER Experiment Name: Zm_Imbibed_Seeds_P Parameter: Organism Value: Zea mays
  misc_feature: MA Experiment 108530 PARAMETER Experiment Name: Zm_Imbibed_Seeds_P Parameter: Plant Line Value: 35A19
  misc_feature: MA Experiment 108530 PARAMETER Experiment Name: Zm_Imbibed_Seeds_P Parameter: Tissue Value: Aerial vs. Embryo
  misc_feature: MA Experiment ID: 108534 Result: Down-regulated in Transcription
  misc_feature: MA Experiment 108534 PARAMETER Experiment Name: Zm_4deg_Cold_P Parameter: Age (hr) Value: 8
  misc_feature: MA Experiment 108534 PARAMETER Experiment Name: Zm_4deg_Cold_P Parameter: Organism Value: Zea mays
  misc_feature: MA Experiment 108534 PARAMETER Experiment Name: Zm_4deg_Cold_P Parameter: Plant Line Value: 35A19
  misc_feature: MA Experiment 108534 PARAMETER Experiment Name: Zm_4deg_Cold_P Parameter: Temperature (deg C) Value: 4 vs. 22
  misc_feature: MA Experiment 108534 PARAMETER Experiment Name: Zm_4deg_Cold_P Parameter: Timepoint (hr) Value: 6
  misc_feature: MA Experiment 108534 PARAMETER Experiment Name: Zm_4deg_Cold_P Parameter: Tissue Value: Aerial
  misc_feature: MA Experiment ID: 108535 Result: Down-regulated in Transcription
  misc_feature: MA Experiment 108535 PARAMETER Experiment Name: Zm_Meristem_P Parameter: Age (day) Value: 8
  misc_feature: MA Experiment 108535 PARAMETER Experiment Name: Zm_Meristem_P Parameter: Organism Value: Zea mays
  misc_feature: MA Experiment 108535 PARAMETER Experiment Name: Zm_Meristem_P Parameter: Plant Line Value: 35A19
  misc_feature: MA Experiment 108535 PARAMETER Experiment Name: Zm_Meristem_P Parameter: Tissue Value: Root Meristem vs. Above Root Meristem
  misc_feature: MA Experiment ID: 108536 Result: Up-regulated in Transcription
  misc_feature: MA Experiment 108536 PARAMETER Experiment Name: Zm_Meristem_P Parameter: Age (day) Value: 8
  misc_feature: MA Experiment 108536 PARAMETER Experiment Name: Zm_Meristem_P Parameter: Organism Value: Zea mays
  misc_feature: MA Experiment 108536 PARAMETER Experiment Name: Zm_Meristem_P Parameter: Plant Line Value: 35A19
  misc_feature: MA Experiment 108536 PARAMETER Experiment Name: Zm_Meristem_P Parameter: Tissue Value: Shoot Meristem vs. Above Shoot Meristem
  misc_feature: MA Experiment ID: 20000108 Result: Down-regulated in Transcription
  misc_feature: MA Experiment 20000108 PARAMETER Experiment Name: Zm_Root-Tips_P Parameter: Age (day) Value: 12
  misc_feature: MA Experiment 20000108 PARAMETER Experiment Name: Zm_Root-Tips_P Parameter: Organism Value: Zea mays
  misc_feature: MA Experiment 20000108 PARAMETER Experiment Name: Zm_Root-Tips_P Parameter: Tissue Value: Root tips vs. Root mid region    35
  misc_feature: MA Experiment 20000108 PARAMETER Experiment Name: Zm_Root-Tips_P Parameter: Tissue Value: Root tips vs. Root mid region   Sequence Listing-Misc Features (4)
  misc_feature: MA Experiment ID: 20000477 Result: Up-regulated in Transcription
  misc_feature: MA Experiment 20000477 PARAMETER Experiment Name: Zm_5mM_SA_P Parameter: Age (day) Value: 10
  misc_feature: MA Experiment 20000477 PARAMETER Experiment Name: Zm_5mM_SA_P Parameter: Organism Value: Zea mays
  misc_feature: MA Experiment 20000477 PARAMETER Experiment Name: Zm_5mM_SA_P Parameter: Plant Line Value: 35A19
  misc_feature: MA Experiment 20000477 PARAMETER Experiment Name: Zm_5mM_SA_P Parameter: Timepoint (hr) Value: 48
  misc_feature: MA Experiment 20000477 PARAMETER Experiment Name: Zm_5mM_SA_P Parameter: Tissue Value: Aerial
  misc_feature: MA Experiment 20000477 PARAMETER Experiment Name: Zm_5mM_SA_P Parameter: Treatment Value: 5mM SA vs. No Treatment
  misc_feature: MA Experiment ID: 20000478 Result: Up-regulated in Transcription
  misc_feature: MA Experiment 20000478 PARAMETER Experiment Name: Zm_5mM_SA_P Parameter: Age (day) Value: 11
  misc_feature: MA Experiment 20000478 PARAMETER Experiment Name: Zm_5mM_SA_P Parameter: Organism Value: Zea mays
  misc_feature: MA Experiment 20000478 PARAMETER Experiment Name: Zm_5mM_SA_P Parameter: Plant Line Value: 35A19
  misc_feature: MA Experiment 20000478 PARAMETER Experiment Name: Zm_5mM_SA_P Parameter: Timepoint (hr) Value: 72
  misc_feature: MA Experiment 20000478 PARAMETER Experiment Name: Zm_5mM_SA_P Parameter: Tissue Value: Aerial
  misc_feature: MA Experiment 20000478 PARAMETER Experiment Name: Zm_5mM_SA_P Parameter: Treatment Value: 5mM SA vs. No Treatment
  misc_feature: MA Experiment ID: 20000479 Result: Up-regulated in Transcription
  misc_feature: MA Experiment 20000479 PARAMETER Experiment Name: Zm_Drought_P Parameter: Age (day) Value: 10
  misc_feature: MA Experiment 20000479 PARAMETER Experiment Name: Zm_Drought_P Parameter: Organism Value: Zea mays
  misc_feature: MA Experiment 20000479 PARAMETER Experiment Name: Zm_Drought_P Parameter: Plant Line Value: 35A19
  misc_feature: MA Experiment 20000479 PARAMETER Experiment Name: Zm_Drought_P Parameter: Timepoint (hr) Value: 48
  misc_feature: MA Experiment 20000479 PARAMETER Experiment Name: Zm_Drought_P Parameter: Tissue Value: Aerial
  misc_feature: MA Experiment 20000479 PARAMETER Experiment Name: Zm_Drought_P Parameter: Treatment Value: Drought vs. No Drought
  misc_feature: MA Experiment ID: 20000480 Result: Up-regulated in Transcription
  misc_feature: MA Experiment 20000480 PARAMETER Experiment Name: Zm_Drought_P Parameter: Age (day) Value: 11
  misc_feature: MA Experiment 20000480 PARAMETER Experiment Name: Zm_Drought_P Parameter: Organism Value: Zea mays
  misc_feature: MA Experiment 20000480 PARAMETER Experiment Name: Zm_Drought_P Parameter: Plant Line Value: 35A19
  misc_feature: MA Experiment 20000480 PARAMETER Experiment Name: Zm_Drought_P Parameter: Timepoint (hr) Value: 72
  misc_feature: MA Experiment 20000480 PARAMETER Experiment Name: Zm_Drought_P Parameter: Tissue Value: Aerial
  misc_feature: MA Experiment 20000480 PARAMETER Experiment Name: Zm_Drought_P Parameter: Treatment Value: Drought vs. No Drought
  misc_feature: MA Experiment ID: 20000535 Result: Down-regulated in Transcription
  misc_feature: MA Experiment 20000535 PARAMETER Experiment Name: Zm_Hybrid_Seed_Dev_P Parameter: DAP Value: 30 vs. 12
  misc_feature: MA Experiment 20000535 PARAMETER Experiment Name: Zm_Hybrid_Seed_Dev_P Parameter: Organism Value: Zea mays
  misc_feature: MA Experiment 20000535 PARAMETER Experiment Name: Zm_Hybrid_Seed_Dev_P Parameter: Plant Line Value: 35A19
  misc_feature: MA Experiment 20000535 PARAMETER Experiment Name: Zm_Hybrid_Seed_Dev_P Parameter: Tissue Value: Embryo vs. Unfert Floret
gtgtgccccgtctcggaacagcgcggaccaccagagcgtgcgcgtccgtgccccacccctccctctctatccatggcggtcccccgcgggtgcctcgggctccccctggtcgccgtgctcctcgcgtccctctgccgcggccaggcggcggtgagggagctcaaggtcgggtactacgccgagacgtgcccggaggccgaggacatcgtccgtgagaccatggcgcgcgcgcgcgcacgcgaggcccgcagcgtcgcctccgtcatgcgcctccagttccacgactgcttcgtcaacgggtgcgacggctcggtgctgatggacgccacgccgacgatgcccggcgagaaggatgcgctctccaacatcaactccctgcgctcgttcgaggtcgtcgacgagatcaaggacgcgctggaggagcgctgccccggagtggtctcctgcgccgacatcgtcatcattgccgcccgcgacgccgtcgtcctgaccggtgggcctaactgggaggtgcggctcgggcgcgaggacagcatgacggcgagccaggaggacgcggacaacatcatgccgagcccgcgcgcaaacgcgagcgctctcatccggctcttcgcggggctcaacctcagcgtcaccgacctggtcgcgctctcgggctcgcactccatcggcgaggcccgctgcttctccatcgtcttccgcctctacaaccagtctggatccggccgccccgacccgcacatggacaccgcctaccgccgctcgctcgacgcactctgccccaagggcggcgacgaggaggtcacgggaggcctggacgccaccccacgcatcttcgacaaccagtacttcgaggacctcgtcgcgctccgcggcttcctcaactccgaccagacgctcttctctgacaacaccaggacccgtcgggtcgtcgagcggctcagcaaggaccaggacgccttcttcagggccttcatcgaggggatgataaagatgggggagctccaaaaccccaggaaaggggagatacggcgcaactgtcgcgttgctaacaactcgccgtggcaaccaaggacggggatggcgtccggacagtcgacatctgagctccggtgatgaggttggtgtttcagaagaaatcgagccctgatatggtactaatatgttgacatgcattgttgtttttttggtcgtgtgtaagttttgcacctacctatggctgtggtgcccgagctgcgctcattgctgacgtggggaataattgagacattgtgccttagctccaataacgttcaatatatttatcctttatatcg

SEQ ID NO: 4107 - protein, 371 aa, Zea mays subsp. mays
  peptide (1)..(371): Ceres Seq. ID no. 12358114
  misc_feature (70)..(317): Pfam Name: Peroxidase Pfam Description: Peroxidase
  misc_feature (35)..(354): Homolog of NCBI NO: 19698448 NR Description: gaiacol peroxidase [Gossypium hirsutum]
  misc_feature (34)..(354): Homolog of NCBI NO: 15227200 NR Description: putative peroxidase; protein id: At2g22420.1, by cDNA: 113695. [Arabidopsis thaliana] Peroxidase 17 precursor (Atperox P17) (ATP25a)
  misc_feature (34)..(352): Homolog of NCBI NO: 15234394 NR Description: peroxidase, putative; protein id: At4g36430.1, by cDNA: gi_17530561, supported by cDNA: gi_18377685 [Arabidopsis
  misc_feature (57)..(353): Homolog of NCBI NO: 15224116 NR Description: peroxidase, putative; protein id: At2g18150.1, by cDNA: 126030., supported by cDNA: gi_19698902 [Arabidopsis >gi|25453215|sp|Q9SI16|PE15_ARATH Peroxidase 15 precursor
  misc_feature (57)..(353): Homolog of NCBI NO: 21537275 NR Description: putative peroxidase [Arabidopsis thaliana]
  misc_feature (36)..(352): Homolog of NCBI NO: 1403134 NR Description: peroxidase [Arabidopsis thaliana]
  misc_feature (36)..(352): Homolog of NCBI NO: 21593604 NR Description: peroxidase ATP N [Arabidopsis thaliana]
  misc_feature (36)..(352): Homolog of NCBI NO: 18420061 NR Description: peroxidase, putative; protein id: At5g19890.1, by cDNA: 40493. [Arabidopsis thaliana] Peroxidase 59 precursor (Atperox P59) (Peroxidase N) (ATPN)
  misc_feature (52)..(353): Homolog of NCBI NO: 15224114 NR Description: peroxidase, putative; protein id: At2g18140.1 thaliana] >gi|25453216|sp|Q9SI17|PE14_ARATH Peroxidase 14 (Atperox P14) >gi|25285614|pir||G84560 probable peroxidase
  misc_feature (53)..(352): Homolog of NCBI NO: 7245406 NR Description: Chain A, Arabidopsis Thaliana Peroxidase N
VCPVSEQRGPPERARPCPTPPSLSMAVPRGCLGLPLVAVLLASLCRGQAAVRELKVGYYAETCPEAEDIVRETMARARAREARSVASVMRLQFHDCFVNGCDGSVLMDATPTMPGEKDALSNINSLRSFEVVDEIKDALEERCPGVVSCADIVIIAARDAVVLTGGPNWEVRLGREDSMTASQEDADNIMPSPRANASALIRLFAGLNLSVTDLVALSGSHSIGEARCFSIVFRLYNQSGSGRPDPHMDTAYRRSLDALCPKGGDEEVTGGLDATPRIFDNQYFEDLVALRGFLNSDQTLFSDNTRTRRVVERLSKDQDAFFRAFIEGMIKMGELQNPRKGEIRRNCRVANNSPWQPRTGMASGQSTSELR

SEQ ID NO: 4108 - protein, 347 aa, Zea mays subsp. mays
  peptide (1)..(347): Ceres Seq. ID no. 12358115
  misc_feature (46)..(293): Pfam Name: Peroxidase Pfam Description: Peroxidase
  misc_feature (11)..(330): Homolog of NCBI NO: 19698448 NR Description: gaiacol peroxidase [Gossypium hirsutum]
  misc_feature (10)..(330): Homolog of NCBI NO: 15227200 NR Description: putative peroxidase; protein id: At2g22420.1, by cDNA: 113695. [Arabidopsis thaliana] Peroxidase 17 precursor (Atperox P17) (ATP25a)
  misc_feature (10)..(328): Homolog of NCBI NO: 15234394 NR Description: peroxidase, putative; protein id: At4g36430.1, by cDNA: gi_17530561, supported by cDNA: gi_18377685 [Arabidopsis
  misc_feature (33)..(329): Homolog of NCBI NO: 15224116 NR Description: peroxidase, putative; protein id: At2g18150.1, by cDNA: 126030., supported by cDNA: gi_19698902 [Arabidopsis >gi|25453215|sp|Q9SI16|PE15_ARATH Peroxidase 15 precursor
  misc_feature (33)..(329): Homolog of NCBI NO: 21537275 NR Description: putative peroxidase [Arabidopsis thaliana]
  misc_feature (12)..(328): Homolog of NCBI NO: 1403134 NR Description: peroxidase [Arabidopsis thaliana]
  misc_feature (12)..(328): Homolog of NCBI NO: 21593604 NR Description: peroxidase ATP N [Arabidopsis thaliana]
  misc_feature (12)..(328): Homolog of NCBI NO: 18420061 NR Description: peroxidase, putative; protein id: At5g19890.1, by cDNA: 40493. [Arabidopsis thaliana] Peroxidase 59 precursor (Atperox P59) (Peroxidase N) (ATPN)
  misc_feature (28)..(329): Homolog of NCBI NO: 15224114 NR Description: peroxidase, putative; protein id: At2g18140.1 thaliana] >gi|25453216|sp|Q9SI17|PE14_ARATH Peroxidase 14 (Atperox P14) >gi|25285614|pir||G84560 probable peroxidase
  misc_feature (29)..(328): Homolog of NCBI NO: 7245406 NR Description: Chain A, Arabidopsis Thaliana Peroxidase N
MAVPRGCLGLPLVAVLLASLCRGQAAVRELKVGYYAETCPEAEDIVRETMARARAREARSVASVMRLQFHDCFVNGCDGSVLMDATPTMPGEKDALSNINSLRSFEVVDEIKDALEERCPGVVSCADIVIIAARDAVVLTGGPNWEVRLGREDSMTASQEDADNIMPSPRANASALIRLFAGLNLSVTDLVALSGSHSIGEARCFSIVFRLYNQSGSGRPDPHMDTAYRRSLDALCPKGGDEEVTGGLDATPRIFDNQYFEDLVALRGFLNSDQTLFSDNTRTRRVVERLSKDQDAFFRAFIEGMIKMGELQNPRKGEIRRNCRVANNSPWQPRTGMASGQSTSELR

SEQ ID NO: 4109 - protein, 298 aa, Zea mays subsp. mays
  peptide (1)..(298): Ceres Seq. ID no. 12358116
  misc_feature (1)..(244): Pfam Name: Peroxidase Pfam Description: Peroxidase
  misc_feature (1)..(281): Homolog of NCBI NO: 19698448 NR Description: gaiacol peroxidase [Gossypium hirsutum]
  misc_feature (1)..(281): Homolog of NCBI NO: 15227200 NR Description: putative peroxidase; protein id: At2g22420.1, by cDNA: 113695. [Arabidopsis thaliana] Peroxidase 17 precursor (Atperox P17) (ATP25a)
  misc_feature (1)..(279): Homolog of NCBI NO: 15234394 NR Description: peroxidase, putative; protein id: At4g36430.1, by cDNA: gi_17530561, supported by cDNA: gi_18377685 [Arabidopsis
  misc_feature (1)..(280): Homolog of NCBI NO: 15224116 NR Description: peroxidase, putative; protein id: At2g18150.1, by cDNA: 126030., supported by cDNA: gi_19698902 [Arabidopsis >gi|25453215|sp|Q9SI16|PE15_ARATH Peroxidase 15 precursor
  misc_feature (1)..(280): Homolog of NCBI NO: 21537275 NR Description: putative peroxidase [Arabidopsis thaliana]
  misc_feature (1)..(279): Homolog of NCBI NO: 1403134 NR Description: peroxidase [Arabidopsis thaliana]
  misc_feature (1)..(279): Homolog of NCBI NO: 21593604 NR Description: peroxidase ATP N [Arabidopsis thaliana]
  misc_feature (1)..(279): Homolog of NCBI NO: 18420061 NR Description: peroxidase, putative; protein id: At5g19890.1, by cDNA: 40493. [Arabidopsis thaliana] Peroxidase 59 precursor (Atperox P59) (Peroxidase N) (ATPN)
  misc_feature (1)..(280): Homolog of NCBI NO: 15224114 NR Description: peroxidase, putative; protein id: At2g18140.1 thaliana] >gi|25453216|sp|Q9SI17|PE14_ARATH Peroxidase 14 (Atperox P14) >gi|25285614|pir||G84560 probable peroxidase
  misc_feature (1)..(279): Homolog of NCBI NO: 7245406 NR Description: Chain A, Arabidopsis Thaliana Peroxidase N
MARARAREARSVASVMRLQFHDCFVNGCDGSVLMDATPTMPGEKDALSNINSLRSFEVVDEIKDALEERCPGVVSCADIVIIAARDAVVLTGGPNWEVRLGREDSMTASQEDADNIMPSPRANASALIRLFAGLNLSVTDLVALSGSHSIGEARCFSIVFRLYNQSGSGRPDPHMDTAYRRSLDALCPKGGDEEVTGGLDATPRIFDNQYFEDLVALRGFLNSDQTLFSDNTRTRRVVERLSKDQDAFFRAFIEGMIKMGELQNPRKGEIRRNCRVANNSPWQPRTGMASGQSTSELR

SEQ ID NO: 4110 - DNA, 1144 bp, Zea mays subsp. mays
  misc_feature (1)..(1144): Ceres Seq. ID no. 12340765
  misc_feature: MA Experiment ID: 108544 Result: Up-regulated in Transcription
aaatcgagctcggaggcgaatctctcgctaactgtcatcaatggcggccgagcccaagatcctagagctctccaacggcaagatcaccgcgaggatctccaactggggcgccaccatcacctccctcctcgtccccgacgcccaggggagtgtcgctgatgtggtgctcggattcgatggcttggatccgtacgtgaaaggcatgtcaccttattttggctgcatagttggccgtgtcgcgaataggatcaaggatgggaagtttacactaaacggacttgagtattcattacctgtcaacaatggacctaacagccttcatggtgggttgaagggatttgataaggtcgtgtgggatgtcgtggagcacaaagatggcgaatgcccttcaataacttttcagtatcacagcaaggacggggaagaaggctatccaggcgatgtaaccattcgagcaacatactctcttcctgaagctactactctaaggcttgacatggaagctacaccagagaacaaagcaactcctataagcctggcgcagcacacctactggaacctcgcaggtcacgcctgcggcgacatcttaaaccactcgctgcagatctggggcaagcacatcactccggtcgacgagaacacaattcccaccggcgagataatgcccgtcgatggcaccccttttgacttcacgacggagcgcaggattggcgagcgcatcgacggtgttcctggagggtatgatcataactacgtgctggactgtggcgacgagaaggacggcctgaagcgtgcggccaggctgaaagatccgtcgagcttgcggaccctggacctgtggactgacgcacccggcatgcagctgtacactgccaactacgtggatggcatcggtggcaaggcgggcgctgtctacgcgaagcatgctggagtgtgcttggaaacccaggggttcccgaatgccatcaaccagcctgagtttccctctgtggttgttcggcccggtgagaagtataagcatactatgctgtttgagttctcgggatgttgaatagtgactggacagcataaattgatgtaaaacatgttgaatgaataaacaagcagaaggataagctgtgataataatgcactagtttgctcc

SEQ ID NO: 4111 - protein, 336 aa, Zea mays subsp. mays
  peptide (1)..(336): Ceres Seq. ID no. 12340766
  misc_feature (6)..(332): Pfam Name: Aldose 1-epimerase Pfam Description: Aldose 1-epimerase
  misc_feature (7)..(334): Homolog of NCBI NO: 15242223 NR Description: putative aldose 1-epimerase - like protein
  misc_feature (9)..(334): Homolog of NCBI NO: 40882679 NR Description: putative aldose 1-epimerase
  misc_feature (7)..(334): Homolog of NCBI NO: 15824565 NR Description: non-cell-autonomous protein pathway1;
  misc_feature (1)..(334): Homolog of NCBI NO: 21537069 NR Description: aldose 1-epimerase-like protein [Arabidopsis
  misc_feature (1)..(334): Homolog of NCBI NO: 15228261 NR Description: aldose 1-epimerase - like protein
  misc_feature (7)..(334): Homolog of NCBI NO: 7430313 NR Description: probable aldose 1-epimerase (EC 5.1.3.3) - common
  misc_feature (7)..(334): Homolog of NCBI NO: 15824567 NR Description: non-cell-autonomous protein pathway2;
  misc_feature (18)..(334): Homolog of NCBI NO: 14532616 NR Description: putative aldose 1-epimerase [Arabidopsis
  misc_feature (5)..(334): Homolog of NCBI NO: 30684727 NR Description: aldose 1-epimerase family [Arabidopsis thaliana]
  misc_feature (1)..(334): Homolog of NCBI NO: 37531218 NR Description: putative aldose 1-epimerase - like protein
MAAEPKILELSNGKITARISNWGATITSLLVPDAQGSVADVVLGFDGLDPYVKGMSPYFGCIVGRVANRIKDGKFTLNGLEYSLPVNNGPNSLHGGLKGFDKVVWDVVEHKDGECPSITFQYHSKDGEEGYPGDVTIRATYSLPEATTLRLDMEATPENKATPISLAQHTYWNLAGHACGDILNHSLQIWGKHITPVDENTIPTGEIMPVDGTPFDFTTERRIGERIDGVPGGYDHNYVLDCGDEKDGLKRAARLKDPSSLRTLDLWTDAPGMQLYTANYVDGIGGKAGAVYAKHAGVCLETQGFPNAINQPEFPSVVVRPGEKYKHTMLFEFSGC

SEQ ID NO: 4112 - protein, 282 aa, Zea mays subsp. mays
  peptide (1)..(282): Ceres Seq. ID no. 12340767
  misc_feature (1)..(278): Pfam Name: Aldose 1-epimerase Pfam Description: Aldose 1-epimerase
  misc_feature (1)..(280): Homolog of NCBI NO: 14532616 NR Description: putative aldose 1-epimerase [Arabidopsis
  misc_feature (1)..(280): Homolog of NCBI NO: 30684727 NR Description: aldose 1-epimerase family [Arabidopsis thaliana]
  misc_feature (1)..(280): Homolog of NCBI NO: 15824567 NR Description: non-cell-autonomous protein pathway2;
  misc_feature (1)..(280): Homolog of NCBI NO: 40882679 NR Description: putative aldose 1-epimerase
  misc_feature (1)..(280): Homolog of NCBI NO: 21537069 NR Description: aldose 1-epimerase-like protein [Arabidopsis
  misc_feature (1)..(280): Homolog of NCBI NO: 15228261 NR Description: aldose 1-epimerase - like protein
  misc_feature (1)..(280): Homolog of NCBI NO: 15824565 NR Description: non-cell-autonomous protein pathway1;
  misc_feature (1)..(280): Homolog of NCBI NO: 15242223 NR Description: putative aldose 1-epimerase - like protein
  misc_feature (1)..(280): Homolog of NCBI NO: 7430313 NR Description: probable aldose 1-epimerase (EC 5.1.3.3) - common
  misc_feature (1)..(280): Homolog of NCBI NO: 37531218 NR Description: putative aldose 1-epimerase - like protein
MSPYFGCIVGRVANRIKDGKFTLNGLEYSLPVNNGPNSLHGGLKGFDKVVWDVVEHKDGECPSITFQYHSKDGEEGYPGDVTIRATYSLPEATTLRLDMEATPENKATPISLAQHTYWNLAGHACGDILNHSLQIWGKHITPVDENTIPTGEIMPVDGTPFDFTTERRIGERIDGVPGGYDHNYVLDCGDEKDGLKRAARLKDPSSLRTLDLWTDAPGMQLYTANYVDGIGGKAGAVYAKHAGVCLETQGFPNAINQPEFPSVVVRPGEKYKHTMLFEFSGC

SEQ ID NO: 4113 - protein, 184 aa, Zea mays subsp. mays
  peptide (1)..(184): Ceres Seq. ID no. 12340768
  misc_feature (1)..(180): Pfam Name: Aldose 1-epimerase Pfam Description: Aldose 1-epimerase
  misc_feature (1)..(182): Homolog of NCBI NO: 15242223 NR Description: putative aldose 1-epimerase - like protein
  misc_feature (1)..(182): Homolog of NCBI NO: 40882679 NR Description: putative aldose 1-epimerase
  misc_feature (1)..(182): Homolog of NCBI NO: 15824565 NR Description: non-cell-autonomous protein pathway1;
  misc_feature (1)..(182): Homolog of NCBI NO: 21537069 NR Description: aldose 1-epimerase-like protein [Arabidopsis
  misc_feature (1)..(182): Homolog of NCBI NO: 15228261 NR Description: aldose 1-epimerase - like protein
  misc_feature (1)..(182): Homolog of NCBI NO: 7430313 NR Description: probable aldose 1-epimerase (EC 5.1.3.3) - common
  misc_feature (1)..(182): Homolog of NCBI NO: 15824567 NR Description: non-cell-autonomous protein pathway2;
  misc_feature (1)..(182): Homolog of NCBI NO: 14532616 NR Description: putative aldose 1-epimerase [Arabidopsis
  misc_feature (1)..(182): Homolog of NCBI NO: 30684727 NR Description: aldose 1-epimerase family [Arabidopsis thaliana]
  misc_feature (1)..(182): Homolog of NCBI NO: 37531218 NR Description: putative aldose 1-epimerase - like protein
MEATPENKATPISLAQHTYWNLAGHACGDILNHSLQIWGKHITPVDENTIPTGEIMPVDGTPFDFTTERRIGERIDGVPGGYDHNYVLDCGDEKDGLKRAARLKDPSSLRTLDLWTDAPGMQLYTANYVDGIGGKAGAVYAKHAGVCLETQGFPNAINQPEFPSVVVRPGEKYKHTMLFEFSGC

SEQ ID NO: 4114 - DNA, 838 bp, Zea mays subsp. mays
  misc_feature (1)..(838): Ceres Seq. ID no. 12401478
  misc_feature: MA Experiment ID: 108535 Result: Up-regulated in Transcription
  misc_feature: MA Experiment 108535 PARAMETER Experiment Name: Zm_Meristem_P Parameter: Age (day) Value: 8
  misc_feature: MA Experiment 108535 PARAMETER Experiment Name: Zm_Meristem_P Parameter: Organism Value: Zea mays
  misc_feature: MA Experiment 108535 PARAMETER Experiment Name: Zm_Meristem_P Parameter: Plant Line Value: 35A19
  misc_feature: MA Experiment 108535 PARAMETER Experiment Name: Zm_Meristem_P Parameter: Tissue Value: Root Meristem vs. Above Root Meristem
  misc_feature: MA Experiment ID: 20000108 Result: Up-regulated in Transcription
  misc_feature: MA Experiment 20000108 PARAMETER Experiment Name: Zm_Root-Tips_P Parameter: Age (day) Value: 12
  misc_feature: MA Experiment 20000108 PARAMETER Experiment Name: Zm_Root-Tips_P Parameter: Organism Value: Zea mays
  misc_feature: MA Experiment 20000108 PARAMETER Experiment Name: Zm_Root-Tips_P Parameter: Tissue Value: Root tips vs. Root mid region    35
  misc_feature: MA Experiment 20000108 PARAMETER Experiment Name: Zm_Root-Tips_P Parameter: Tissue Value: Root tips vs. Root mid region   Sequence Listing-Misc Features (4)
  misc_feature: MA Experiment ID: 20000633 Result: Down-regulated in Transcription
  misc_feature: MA Experiment 20000633 PARAMETER Experiment Name: Zm_Herbicide-Treatments_P Parameter: Timepoint (hr) Value: 4
  misc_feature: MA Experiment 20000633 PARAMETER Experiment Name: Zm_Herbicide-Treatments_P Parameter: Tissue Value: Aerial
  misc_feature: MA Experiment 20000633 PARAMETER Experiment Name: Zm_Herbicide-Treatments_P Parameter: Treatment Value: Trimec vs. No Treatment
accctctccacttccgtttccggatcccgtttccagctccgatccaacccagcatctgtaccgcgccgcgcgagcacgtccggcgccggtgcggcaggcgaaatccgagagcactcctcccccgctacgccgcaccgcccatggccgcagctagccgcagatagagagaggcgcaggcgagggcgtgcagatccagatccggtgggcgggaaggacttgatcgcccccaccaccatggccggcccggtgtcggcgctcttcctgctggacatgaagggccgcgttctcgtctggcgcgactaccgcggcgatgtctccgcgctccaggccgagcgcttcttcaccaagctcctcgacaaggagggcgattcggaagtgcactcgcctgtggtctacgacgacgctggcgtcacttacatgttcatccagcacaacaatgtcttcctcctcaccgccgctcgccagaactgtaacgcggcccagcatcctcctcttcctccaccgtgtaatagatgtgtttaagcactacttcgaggagctggaggaggagtcgctcagagataacttcgtcgttgtgtatgagttgctcgatgagatgatggattttgggtacccacaatacacggaggcgaagatattgagtgagttcatcaagacagatgcatacaggatggaggtcacacagcgtccacccatggccgtgacaaatgctgtgtcatggaggagcgaggggatccggtacaagaagaatgaagtcttcttggatgtagtggagagtgttaacattctagttaacagcaatggccagattgtgagatcagatgtggttggggcactg

SEQ ID NO: 4115 - protein, 176 aa, Zea mays subsp. mays
  peptide (1)..(176): Ceres Seq. ID no. 12401479
  misc_feature (58)..(175): Pfam Name: Adaptor complexes medium subunit family Pfam Description: Adaptor complexes medium subunit family
  misc_feature (59)..(175): Homolog of NCBI NO: 39580729 NR Description: Hypothetical protein CBG08724 [Caenorhabditis
  misc_feature (59)..(175): Homolog of NCBI NO: 6671557 NR Description: adaptor-related protein complex AP-1, mu subunit
  misc_feature (59)..(175): Homolog of NCBI NO: 14210504 NR Description: adaptor-related protein complex 1, mu 1 subunit
  misc_feature (59)..(175): Homolog of NCBI NO: 38174108 NR Description: Unknown (protein for MGC:75970) [Silurana
  misc_feature (52)..(175): Homolog of NCBI NO: 12000357 NR Description: clathrin-adaptor medium chain apm 1
  misc_feature (52)..(175): Homolog of NCBI NO: 28949965 NR Description: probable clathrin assembly protein AP47
  misc_feature (87)..(175): Homolog of NCBI NO: 6573741 NR Description: F20B24.16 [Arabidopsis thaliana]
  misc_feature (58)..(175): Homolog of NCBI NO: 15220202 NR Description: putative clathrin-coat assembly protein; protein
  misc_feature (58)..(175): Homolog of NCBI NO: 15219810 NR Description: clathrin adaptor medium chain protein MU1B,
  misc_feature (58)..(175): Homolog of NCBI NO: 34910334 NR Description: putative clathrin-associated protein
MSPRSRPSASSPSSSTRRAIRKCTRLWSTTTLASLTCSSSTTMSSSSPPLARTVTRPSILLFLHRVIDVFKHYFEELEEESLRDNFVVVYELLDEMMDFGYPQYTEAKILSEFIKTDAYRMEVTQRPPMAVTNAVSWRSEGIRYKKNEVFLDVVESVNILVNSNGQIVRSDVVGAL

SEQ ID NO: 4116 - protein, 173 aa, Zea mays subsp. mays
  peptide (1)..(173): Ceres Seq. ID no. 12401480
  misc_feature (86)..(160): Pfam Name: Adaptor complexes medium subunit family Pfam Description: Adaptor complexes medium subunit family
  misc_feature (84)..(158): Homolog of NCBI NO: 39580729 NR Description: Hypothetical protein CBG08724 [Caenorhabditis
  misc_feature (84)..(156): Homolog of NCBI NO: 6671557 NR Description: adaptor-related protein complex AP-1, mu subunit
  misc_feature (84)..(156): Homolog of NCBI NO: 14210504 NR Description: adaptor-related protein complex 1, mu 1 subunit
  misc_feature (84)..(156): Homolog of NCBI NO: 38174108 NR Description: Unknown (protein for MGC:75970) [Silurana
  misc_feature (84)..(160): Homolog of NCBI NO: 12000357 NR Description: clathrin-adaptor medium chain apm 1
  misc_feature (84)..(161): Homolog of NCBI NO: 28949965 NR Description: probable clathrin assembly protein AP47
  misc_feature (79)..(160): Homolog of NCBI NO: 6573741 NR Description: F20B24.16 [Arabidopsis thaliana]
  misc_feature (79)..(160): Homolog of NCBI NO: 15220202 NR Description: putative clathrin-coat assembly protein; protein
  misc_feature (79)..(160): Homolog of NCBI NO: 15219810 NR Description: clathrin adaptor medium chain protein MU1B,
  misc_feature (79)..(160): Homolog of NCBI NO: 34910334 NR Description: putative clathrin-associated protein
TLSTSVSGSRFQLRSNPASVPRRASTSGAGAAGEIREHSSPATPHRPWPQLAADRERRRRGRADPDPVGGKDLIAPTTMAGPVSALFLLDMKGRVLVWRDYRGDVSALQAERFFTKLLDKEGDSEVHSPVVYDDAGVTYMFIQHNNVFLLTAARQNCNAAQHPPLPPPCNRCV

SEQ ID NO: 4117 - protein, 134 aa, Zea mays subsp. mays
  peptide (1)..(134): Ceres Seq. ID no. 12401481
  misc_feature (16)..(133): Pfam Name: Adaptor complexes medium subunit family Pfam Description: Adaptor complexes medium subunit family
  misc_feature (17)..(133): Homolog of NCBI NO: 39580729 NR Description: Hypothetical protein CBG08724 [Caenorhabditis
  misc_feature (17)..(133): Homolog of NCBI NO: 6671557 NR Description: adaptor-related protein complex AP-1, mu subunit
  misc_feature (17)..(133): Homolog of NCBI NO: 14210504 NR Description: adaptor-related protein complex 1, mu 1 subunit
  misc_feature (17)..(133): Homolog of NCBI NO: 38174108 NR Description: Unknown (protein for MGC:75970) [Silurana
  misc_feature (10)..(133): Homolog of NCBI NO: 12000357 NR Description: clathrin-adaptor medium chain apm 1
  misc_feature (10)..(133): Homolog of NCBI NO: 28949965 NR Description: probable clathrin assembly protein AP47
  misc_feature (45)..(133): Homolog of NCBI NO: 6573741 NR Description: F20B24.16 [Arabidopsis thaliana]
  misc_feature (16)..(133): Homolog of NCBI NO: 15220202 NR Description: putative clathrin-coat assembly protein; protein
  misc_feature (16)..(133): Homolog of NCBI NO: 15219810 NR Description: clathrin adaptor medium chain protein MU1B,
  misc_feature (16)..(133): Homolog of NCBI NO: 34910334 NR Description: putative clathrin-associated protein
MSSSSPPLARTVTRPSILLFLHRVIDVFKHYFEELEEESLRDNFVVVYELLDEMMDFGYPQYTEAKILSEFIKTDAYRMEVTQRPPMAVTNAVSWRSEGIRYKKNEVFLDVVESVNILVNSNGQIVRSDVVGAL

SEQ ID NO: 4118 - DNA, 787 bp, Zea mays subsp. mays
  misc_feature (1)..(787): Ceres Seq. ID no. 13498073
  misc_feature: MA Experiment ID: 108535 Result: Up-regulated in Transcription
  misc_feature: MA Experiment 108535 PARAMETER Experiment Name: Zm_Meristem_P Parameter: Age (day) Value: 8
  misc_feature: MA Experiment 108535 PARAMETER Experiment Name: Zm_Meristem_P Parameter: Organism Value: Zea mays
  misc_feature: MA Experiment 108535 PARAMETER Experiment Name: Zm_Meristem_P Parameter: Plant Line Value: 35A19
  misc_feature: MA Experiment 108535 PARAMETER Experiment Name: Zm_Meristem_P Parameter: Tissue Value: Root Meristem vs. Above Root Meristem
cttgggttaagctctagtgctagatcgttcgttttggtctgcactctgcacagtgcacagacccttcccccgtgttcccgaatcccgaatcgcgacccaaacagagaggccaggagcggaggactatggccgtagccagacatggcgnccgcngctaccgcctcctcctgcgggcccgttggcagcccgccggctcgggggcgcggtgcatccacgagggcccggacaccatcgaggagctgctggaccggcacctcgtgaagaagcccgcggngngcccggacgaggagtcggcggaggcgcggcggcggctgacgagctcccggcgggaggcgctggccctgtaccgggacatcctccgggcggcgcggctcttcgcgtggaccgacgaccgcggggtgccgtggcgggaggtntgcgcgccaacgccaggcgcgagttcgaggatgcccgcggggagcgcgacccggaggtggtggcgcgcctcctcatcggcggccgcgacgccgtgcaacaggcgctcgaccgccttgccgacgcctcacgccgcgcgatcgagaccgaggaggccaagcgccgtggcggagcgtagatttggagtcgggtattccaaacttacgcgtcatgtgctagcatttgcttaatcttgttgtaagcgacgatctctaattctcaatgtctggtataaaaatggtttcaaggattaggctagctcaagcagtactactatgcatgtttgatttttcacttcacaagaatctgagagagaaacacttcaatttcttgc

SEQ ID NO: 4119 - protein, 172 aa, Zea mays subsp. mays
  peptide (1)..(172): Ceres Seq. ID no. 13498074
  misc_feature (22)..(97): Homolog of NCBI NO: 27754395 NR Description: unknown protein [Arabidopsis thaliana]
  misc_feature (22)..(97): Homolog of NCBI NO: 30699138 NR Description: expressed protein [Arabidopsis thaliana]
  misc_feature (22)..(97): Homolog of NCBI NO: 25373205 NR Description: protein T4O12.26 [imported] - Arabidopsis
  misc_feature (8)..(8): Xaa is any aa, unknown or other
  misc_feature (10)..(10): Xaa is any aa, unknown or other
  misc_feature (50)..(50): Xaa is any aa, unknown or other
  misc_feature (51)..(51): Xaa is any aa, unknown or other
  misc_feature (97)..(97): Xaa is any aa, unknown or other
MAVARHGXRXYRLLLRARWQPAGSGARCIHEGPDTIEELLDRHLVKKPAXXPDEESAEARRRLTSSRREALALYRDILRAARLFAWTDDRGVPWREXCAPTPGASSRMPAGSATRRWWRASSSAAATPCNRRSTALPTPHAARSRPRRPSAVAERRFGVGYSKLTRHVLAFA

SEQ ID NO: 4120 - DNA, 1441 bp, Zea mays subsp. mays
  misc_feature (1)..(1441): Ceres Seq. ID no. 12636899
  misc_feature: MA Experiment ID: 108559 Result: Up-regulated in Transcription
  misc_feature: MA Experiment 108559 PARAMETER Experiment Name: Zm_5mM_NO_P Parameter: Age (day) Value: 8
  misc_feature: MA Experiment 108559 PARAMETER Experiment Name: Zm_5mM_NO_P Parameter: Organism Value: Zea mays
  misc_feature: MA Experiment 108559 PARAMETER Experiment Name: Zm_5mM_NO_P Parameter: Plant Line Value: 35A19
  misc_feature: MA Experiment 108559 PARAMETER Experiment Name: Zm_5mM_NO_P Parameter: Timepoint (hr) Value: 12
  misc_feature: MA Experiment 108559 PARAMETER Experiment Name: Zm_5mM_NO_P Parameter: Tissue Value: Aerial
  misc_feature: MA Experiment 108559 PARAMETER Experiment Name: Zm_5mM_NO_P Parameter: Treatment Value: 5mM NO vs. No Treatment
gaacacgggcacacggatcgtcggctcacggcctcgtcacgcccaccctctccctcttcgggttccaggcttccaaagttgtcagagacggcgagagtagggggtttccaggaagcttcgccagggcgccggtaagttgactggatttgctgctagcagtcaggcaagctcgagttttgccatttgagaaggagagggaaaatgatgacctcgtggcttctgggccgccggggcccctccggcttctcctggagttccaccgccgaccaagtcacgcagggcatctccgccgccggcctcaccgccatcgtcactggggcgtccagcggcatcggcgcggagacggcgcgaacgctggcgctgcgcggggcccacgtcatcatggccgtcaggagccttcccgctgcccaggccgtcaaggacgccgtcctcgcccaggcgccgggggccaagctcgacgtcatggagctcgacctctcgtccatggcctctgtccgcgctttcgcgtcccaattcatcgacaggggtctccccctcaacatccttatcaacaatgcaggagtaatggcaataccttttgcgctttcaaaggatggaattgagatgcagtttgcaactaatcatgttgggcatttcctgctcacacaccttctattggataccatgaagaggacctctcatgaatcaaatttggaaggaagaattgtcaacgtgtcatcagaggggcacagacttgcatatcgggaaggaatccgttttgacaagatcaacgatgaatcagtgtatagtagcattggtgcatatgggcaatcaaagcttgcaaacatattgcatgctaatgaacttgccaggcgatttgaggaagataatgtcaacataactgcaaattctcttcatcctggttccattatcacgaaccttcttcgctaccacagtatcctagatgttctccatcggacgctgggtaaattggtgctgaaaaatgctgagcagggtgcggcaactacatgctatttggcactccacccgcatgtgaagggcgtgtccgggaagtacttctgcgactgtaacctgtacgagccaagcgcgaacgccaaggacatggagttggccaagaggctctgggacttcggcgtcgagctcatcacctagctcatgcttcttgttgttagcgacttgttttcagacatggatgtaatgtaaatcccttgacagatggtaaattctgtaggccctcgaggagctcctgtgtggtaaactcattcacctcaatctatctacgtgtattaaggtggattagggtgtaaattaaattaatttacactccaatcgccctcgaggagctccggtgtggataatgctttggttggatattttagtattcacctgaatttacgtgtattaagatgaattagggtgtaaattaaattaattacactcc

SEQ ID NO: 4121 - protein, 316 aa, Zea mays subsp. mays
  peptide (1)..(316): Ceres Seq. ID no. 12636900
  misc_feature (6)..(315): Homolog of NCBI NO: 15224306 NR Description: putative oxidoreductase
  misc_feature (4)..(315): Homolog of NCBI NO: 34895876 NR Description: P0009G03.18 [Oryza sativa (japonica
  misc_feature (9)..(316): Homolog of NCBI NO: 37536622 NR Description: putative WW-domain oxidoreductase
  misc_feature (4)..(315): Homolog of NCBI NO: 21554820 NR Description: putativepod-specific dehydrogenase SAC25
  misc_feature (4)..(315): Homolog of NCBI NO: 20260302 NR Description: putative protein [Arabidopsis thaliana]
  misc_feature (4)..(315): Homolog of NCBI NO: 18413950 NR Description: putative protein
  misc_feature (5)..(314): Homolog of NCBI NO: 18416145 NR Description: putative protein
  misc_feature (5)..(314): Homolog of NCBI NO: 30686197 NR Description: short-chain dehydrogenase/reductase family
  misc_feature (5)..(314): Homolog of NCBI NO: 23297050 NR Description: unknown protein [Arabidopsis thaliana]
  misc_feature (5)..(314): Homolog of NCBI NO: 15233359 NR Description: putative protein; protein id: At4g11410.1
MMTSWLLGRRGPSGFSWSSTADQVTQGISAAGLTAIVTGASSGIGAETARTLALRGAHVIMAVRSLPAAQAVKDAVLAQAPGAKLDVMELDLSSMASVRAFASQFIDRGLPLNILINNAGVMAIPFALSKDGIEMQFATNHVGHFLLTHLLLDTMKRTSHESNLEGRIVNVSSEGHRLAYREGIRFDKINDESVYSSIGAYGQSKLANILHANELARRFEEDNVNITANSLHPGSIITNLLRYHSILDVLHRTLGKLVLKNAEQGAATTCYLALHPHVKGVSGKYFCDCNLYEPSANAKDMELAKRLWDFGVELIT

SEQ ID NO: 4122 - protein, 315 aa, Zea mays subsp. mays
  peptide (1)..(315): Ceres Seq. ID no. 12636901
  misc_feature (5)..(314): Homolog of NCBI NO: 15224306 NR Description: putative oxidoreductase
  misc_feature (3)..(314): Homolog of NCBI NO: 34895876 NR Description: P0009G03.18 [Oryza sativa (japonica
  misc_feature (8)..(315): Homolog of NCBI NO: 37536622 NR Description: putative WW-domain oxidoreductase
  misc_feature (3)..(314): Homolog of NCBI NO: 21554820 NR Description: putativepod-specific dehydrogenase SAC25
  misc_feature (3)..(314): Homolog of NCBI NO: 20260302 NR Description: putative protein [Arabidopsis thaliana]
  misc_feature (3)..(314): Homolog of NCBI NO: 18413950 NR Description: putative protein
  misc_feature (4)..(313): Homolog of NCBI NO: 18416145 NR Description: putative protein
  misc_feature (4)..(313): Homolog of NCBI NO: 30686197 NR Description: short-chain dehydrogenase/reductase family
  misc_feature (4)..(313): Homolog of NCBI NO: 23297050 NR Description: unknown protein [Arabidopsis thaliana]
  misc_feature (4)..(313): Homolog of NCBI NO: 15233359 NR Description: putative protein; protein id: At4g11410.1
MTSWLLGRRGPSGFSWSSTADQVTQGISAAGLTAIVTGASSGIGAETARTLALRGAHVIMAVRSLPAAQAVKDAVLAQAPGAKLDVMELDLSSMASVRAFASQFIDRGLPLNILINNAGVMAIPFALSKDGIEMQFATNHVGHFLLTHLLLDTMKRTSHESNLEGRIVNVSSEGHRLAYREGIRFDKINDESVYSSIGAYGQSKLANILHANELARRFEEDNVNITANSLHPGSIITNLLRYHSILDVLHRTLGKLVLKNAEQGAATTCYLALHPHVKGVSGKYFCDCNLYEPSANAKDMELAKRLWDFGVELIT

SEQ ID NO: 4123 - protein, 256 aa, Zea mays subsp. mays
  peptide (1)..(256): Ceres Seq. ID no. 12636902
  misc_feature (1)..(255): Homolog of NCBI NO: 34895876 NR Description: P0009G03.18 [Oryza sativa (japonica
  misc_feature (1)..(256): Homolog of NCBI NO: 37536622 NR Description: putative WW-domain oxidoreductase
  misc_feature (1)..(255): Homolog of NCBI NO: 21554820 NR Description: putativepod-specific dehydrogenase SAC25
  misc_feature (1)..(255): Homolog of NCBI NO: 20260302 NR Description: putative protein [Arabidopsis thaliana]
  misc_feature (1)..(255): Homolog of NCBI NO: 18413950 NR Description: putative protein
  misc_feature (1)..(254): Homolog of NCBI NO: 18416145 NR Description: putative protein
  misc_feature (1)..(254): Homolog of NCBI NO: 30686197 NR Description: short-chain dehydrogenase/reductase family
  misc_feature (1)..(254): Homolog of NCBI NO: 23297050 NR Description: unknown protein [Arabidopsis thaliana]
  misc_feature (1)..(254): Homolog of NCBI NO: 15233359 NR Description: putative protein; protein id: At4g11410.1
  misc_feature (1)..(255): Homolog of NCBI NO: 15224306 NR Description: putative oxidoreductase
MAVRSLPAAQAVKDAVLAQAPGAKLDVMELDLSSMASVRAFASQFIDRGLPLNILINNAGVMAIPFALSKDGIEMQFATNHVGHFLLTHLLLDTMKRTSHESNLEGRIVNVSSEGHRLAYREGIRFDKINDESVYSSIGAYGQSKLANILHANELARRFEEDNVNITANSLHPGSIITNLLRYHSILDVLHRTLGKLVLKNAEQGAATTCYLALHPHVKGVSGKYFCDCNLYEPSANAKDMELAKRLWDFGVELIT

SEQ ID NO: 4124 - DNA, 1245 bp, Zea mays subsp. mays
  misc_feature (1)..(1245): Ceres Seq. ID no. 12344687
  misc_feature: MA Experiment ID: 20000535 Result: Up-regulated in Transcription
  misc_feature: MA Experiment 20000535 PARAMETER Experiment Name: Zm_Hybrid_Seed_Dev_P Parameter: DAP Value: 30 vs. 12
  misc_feature: MA Experiment 20000535 PARAMETER Experiment Name: Zm_Hybrid_Seed_Dev_P Parameter: Organism Value: Zea mays
  misc_feature: MA Experiment 20000535 PARAMETER Experiment Name: Zm_Hybrid_Seed_Dev_P Parameter: Plant Line Value: 35A19
  misc_feature: MA Experiment 20000535 PARAMETER Experiment Name: Zm_Hybrid_Seed_Dev_P Parameter: Tissue Value: Embryo vs. Unfert Floret
cttccttcacttctctgcttccgacctcgtagcgaatcggaccggggggctagggttccggtgcgcctctgcaatcggacgcgaggctaggctgggcatggagggaaccgctgcggcccggaagaggtcccggccggagacggcgaacggggctgccgccgccgggaagcgctccaaagacacggagtcatttcaaactggtctatcaagcaaatcgaagccttgcaccaagtttttcagtacgattgggtgcccgtttggcgagggatgtcattttctgcactttgtccctggtggttacccggcagttgcaaaaatgctgaatctaagtagctctgctgtatctgcgccatcaagaactcatgtggatcatgccgctcttaccggtgcctctcatccagcttctacggtcaagacacgcatgtgcaccaagtacaacactacagaaggctgcaagttcggtgataagtgccatttcgctcatagcgaaagagagcttgcgaagccagcctacatgtctcaagaaggacctcctatgggtggtcgatatggacgagctgaacctatgcaaccagctgccatgggccctccagcaggaaactttggtgcctcggcgactgccaagatcagtgtggacgcctctctggccggtggcataatcggcaagggtggggtcaacactaagcagataagtagaattacaggcgtcaagctctccatccgcgaccacgagtctaaccccaacctaaagaacatcgagctggaaggcaattttgaccagatcaagcaagccagcgacttggtgcgtgatctcatcgcaaccatcagcgcaagcatgccagcgaaaaatccatctgctgccgcggcaccagcaggaggaggccgaggcggtggtccagggggcaagagcagcaactacaagacgaagctgtgcgagaacttcttgaagggtgcctgtacttttggtgaccggtgccacttcgcccatggcgagacggagcagcggagaggtgctgcatgagagtcgaggtgctctaggcaatgagatgccatgtgctccctccttttgctactgtgaattttcgccttgcagcgctaggcggttggactgttgtgttgtgttgcgacgtcaatggattaaactctagatttcagctttctttttttaacatataagttcgagaaaacgttaaactgtcgtgcagcttgcattttgttggtcggtaagctagcagctggcctccc

SEQ ID NO: 4125 - protein, 339 aa, Zea mays subsp. mays
  peptide (1)..(339): Ceres Seq. ID no. 12344688
  misc_feature (208)..(254): Pfam Name: KH domain Pfam Description: KH domain
  misc_feature (53)..(109): Homolog of NCBI NO: 9294110 NR Description: contains similarity to unknown
  misc_feature (40)..(109): Homolog of NCBI NO: 18399496 NR Description: KH domain/zinc finger protein; protein id:
  misc_feature (39)..(119): Homolog of NCBI NO: 21555233 NR Description: unknown [Arabidopsis thaliana]
  misc_feature (39)..(119): Homolog of NCBI NO: 15240145 NR Description: KH domain/zinc finger protein
  misc_feature (138)..(336): Homolog of NCBI NO: 15240145 NR Description: KH domain/zinc finger protein
  misc_feature (138)..(336): Homolog of NCBI NO: 21555233 NR Description: unknown [Arabidopsis thaliana]
  misc_feature (138)..(336): Homolog of NCBI NO: 18399496 NR Description: KH domain/zinc finger protein; protein id:
  misc_feature (138)..(336): Homolog of NCBI NO: 9294110 NR Description: contains similarity to unknown
  misc_feature (40)..(339): Homolog of NCBI NO: 5441893 NR Description: ESTs C99174(E10437),D22295(C10709) correspond to region of the predicted gene.~Similar to Arabidopsis thaliana BAC
  misc_feature (33)..(339): Homolog of NCBI NO: 32488659 NR Description: OSJNBa0087O24.9 [Oryza sativa (japonica
FLHFSASDLVANRTGGLGFRCASAIGREARLGMEGTAAARKRSRPETANGAAAAGKRSKDTESFQTGLSSKSKPCTKFFSTIGCPFGEGCHFLHFVPGGYPAVAKMLNLSSSAVSAPSRTHVDHAALTGASHPASTVKTRMCTKYNTTEGCKFGDKCHFAHSERELAKPAYMSQEGPPMGGRYGRAEPMQPAAMGPPAGNFGASATAKISVDASLAGGIIGKGGVNTKQISRITGVKLSIRDHESNPNLKNIELEGNFDQIKQASDLVRDLIATISASMPAKNPSAAAAPAGGGRGGGPGGKSSNYKTKLCENFLKGACTFGDRCHFAHGETEQRRGAA

SEQ ID NO: 4126 - protein, 307 aa, Zea mays subsp. mays
  peptide (1)..(307): Ceres Seq. ID no. 12344689
  misc_feature (176)..(222): Pfam Name: KH domain Pfam Description: KH domain
  misc_feature (21)..(77): Homolog of NCBI NO: 9294110 NR Description: contains similarity to unknown
  misc_feature (8)..(77): Homolog of NCBI NO: 18399496 NR Description: KH domain/zinc finger protein; protein id:
  misc_feature (7)..(87): Homolog of NCBI NO: 21555233 NR Description: unknown [Arabidopsis thaliana]
  misc_feature (7)..(87): Homolog of NCBI NO: 15240145 NR Description: KH domain/zinc finger protein
  misc_feature (106)..(304): Homolog of NCBI NO: 15240145 NR Description: KH domain/zinc finger protein
  misc_feature (106)..(304): Homolog of NCBI NO: 21555233 NR Description: unknown [Arabidopsis thaliana]
  misc_feature (106)..(304): Homolog of NCBI NO: 18399496 NR Description: KH domain/zinc finger protein; protein id:
  misc_feature (106)..(304): Homolog of NCBI NO: 9294110 NR Description: contains similarity to unknown
  misc_feature (8)..(307): Homolog of NCBI NO: 5441893 NR Description: ESTs C99174(E10437),D22295(C10709) correspond to region of the predicted gene.~Similar to Arabidopsis thaliana BAC
  misc_feature (1)..(307): Homolog of NCBI NO: 32488659 NR Description: OSJNBa0087O24.9 [Oryza sativa (japonica
MEGTAAARKRSRPETANGAAAAGKRSKDTESFQTGLSSKSKPCTKFFSTIGCPFGEGCHFLHFVPGGYPAVAKMLNLSSSAVSAPSRTHVDHAALTGASHPASTVKTRMCTKYNTTEGCKFGDKCHFAHSERELAKPAYMSQEGPPMGGRYGRAEPMQPAAMGPPAGNFGASATAKISVDASLAGGIIGKGGVNTKQISRITGVKLSIRDHESNPNLKNIELEGNFDQIKQASDLVRDLIATISASMPAKNPSAAAAPAGGGRGGGPGGKSSNYKTKLCENFLKGACTFGDRCHFAHGETEQRRGAA

SEQ ID NO: 4127 - protein, 234 aa, Zea mays subsp. mays
  peptide (1)..(234): Ceres Seq. ID no. 12344690
  misc_feature (103)..(149): Pfam Name: KH domain Pfam Description: KH domain
  misc_feature (1)..(56): Homolog of NCBI NO: 15226988 NR Description: hypothetical protein; protein id: At2g35430.1
  misc_feature (1)..(63): Homolog of NCBI NO: 34905220 NR Description: P0672D01.12 [Oryza sativa (japonica
  misc_feature (1)..(14): Homolog of NCBI NO: 21555233 NR Description: unknown [Arabidopsis thaliana]
  misc_feature (1)..(14): Homolog of NCBI NO: 15240145 NR Description: KH domain/zinc finger protein
  misc_feature (33)..(231): Homolog of NCBI NO: 15240145 NR Description: KH domain/zinc finger protein
  misc_feature (33)..(231): Homolog of NCBI NO: 21555233 NR Description: unknown [Arabidopsis thaliana]
  misc_feature (33)..(231): Homolog of NCBI NO: 18399496 NR Description: KH domain/zinc finger protein; protein id:
  misc_feature (33)..(231): Homolog of NCBI NO: 9294110 NR Description: contains similarity to unknown
  misc_feature (1)..(234): Homolog of NCBI NO: 5441893 NR Description: ESTs C99174(E10437),D22295(C10709) correspond to region of the predicted gene.~Similar to Arabidopsis thaliana BAC
  misc_feature (1)..(234): Homolog of NCBI NO: 32488659 NR Description: OSJNBa0087O24.9 [Oryza sativa (japonica
MLNLSSSAVSAPSRTHVDHAALTGASHPASTVKTRMCTKYNTTEGCKFGDKCHFAHSERELAKPAYMSQEGPPMGGRYGRAEPMQPAAMGPPAGNFGASATAKISVDASLAGGIIGKGGVNTKQISRITGVKLSIRDHESNPNLKNIELEGNFDQIKQASDLVRDLIATISASMPAKNPSAAAAPAGGGRGGGPGGKSSNYKTKLCENFLKGACTFGDRCHFAHGETEQRRGAA

SEQ ID NO: 4128 - DNA, 989 bp, Zea mays subsp. mays
  misc_feature (1)..(989): Ceres Seq. ID no. 12414145
  misc_feature: MA Experiment ID: 108523 Result: Down-regulated in Transcription
  misc_feature: MA Experiment 108523 PARAMETER Experiment Name: Zm_42deg_Heat_P Parameter: Age (day) Value: 8
  misc_feature: MA Experiment 108523 PARAMETER Experiment Name: Zm_42deg_Heat_P Parameter: Organism Value: Zea mays
  misc_feature: MA Experiment 108523 PARAMETER Experiment Name: Zm_42deg_Heat_P Parameter: Plant Line Value: 35A19
  misc_feature: MA Experiment 108523 PARAMETER Experiment Name: Zm_42deg_Heat_P Parameter: Temperature (deg C) Value: 42 vs. 22
  misc_feature: MA Experiment 108523 PARAMETER Experiment Name: Zm_42deg_Heat_P Parameter: Timepoint (hr) Value: 6
  misc_feature: MA Experiment 108523 PARAMETER Experiment Name: Zm_42deg_Heat_P Parameter: Tissue Value: Aerial
  misc_feature: MA Experiment ID: 108528 Result: Down-regulated in Transcription
  misc_feature: MA Experiment 108528 PARAMETER Experiment Name: Zm_Imbibed_Seeds_P Parameter: Age (day) Value: 5 vs. 2
  misc_feature: MA Experiment 108528 PARAMETER Experiment Name: Zm_Imbibed_Seeds_P Parameter: Organism Value: Zea mays
  misc_feature: MA Experiment 108528 PARAMETER Experiment Name: Zm_Imbibed_Seeds_P Parameter: Plant Line Value: 35A19
  misc_feature: MA Experiment 108528 PARAMETER Experiment Name: Zm_Imbibed_Seeds_P Parameter: Tissue Value: Aerial vs. Embryo
aacgaccatgatttggtaaagaaagcacaaagcaggaggaagccggcggtgtaggcgacccatggctccacagacgaggagagagaggttggcgggggaggcgcggccgagctcgtcggggctaacaccggcgaagccgggggcggtcgaggtgcagcgccgacgggcgggcagcggttggacgagccgtcggatctccatctacgcctcccgagtctacttcctcctcatcatgctccagatcccgctcttcagggtcccttgtagagctggcacatgcacaactcctattcaagtaacatcatctcagttggtctcaaatgatatattcccagcagctgttgtgaaggccatgctctaccctggagctaccgtgagcagcctaactaaaagcaagacatttccgagttggaatgacctgtttgacatgtacaacctgacagaagcaaaaaatgcttctgcagtagttgatctccagcgtctagagatacttgccggaagctacttctgtgttgctggagcgctcattggcatcataaatcctgggaggatgactttgtttggtacccttttgattatctggggtatggtgaaagaagcactatttgggaagccagtgaacagtgatctgactcaatcaactcatgtctacccaaccattttgattgcacttatctgtgcattcatgtcgataacttacaacgtaaagaagacagcaacaagtagtactcctgtttctatcgctaagccactgataagttctgccaagtcaaaactgaagtagacttacaagtttaatccttgtaactcttttgaaatatttatttatgtgcaaaaaaacaggtttgaggatgacctgatgatgcttttggtgtatatctgactttcaatactgtaacattcagttttctttattgtattaacaattcgcaaggtcacaccgtctgtaatgtttacaaaaaaaaacagataaatcttggttttctctc

SEQ ID NO: 4129 - protein, 240 aa, Zea mays subsp. mays
  peptide (1)..(240): Ceres Seq. ID no. 12414146
  misc_feature (66)..(229): Homolog of NCBI NO: 15220078 NR Description: hypothetical protein; protein id: At1g80200.1
  misc_feature (87)..(240): Homolog of NCBI NO: 8953390 NR Description: putative protein [Arabidopsis thaliana]
  misc_feature (39)..(240): Homolog of NCBI NO: 17064978 NR Description: putative protein [Arabidopsis thaliana]
  misc_feature (39)..(240): Homolog of NCBI NO: 18416514 NR Description: putative protein
  misc_feature (1)..(240): Homolog of NCBI NO: 34913974 NR Description: B1110C07.25 [Oryza sativa (japonica
MAPQTRRERLAGEARPSSSGLTPAKPGAVEVQRRRAGSGWTSRRISIYASRVYFLLIMLQIPLFRVPCRAGTCTTPIQVTSSQLVSNDIFPAAVVKAMLYPGATVSSLTKSKTFPSWNDLFDMYNLTEAKNASAVVDLQRLEILAGSYFCVAGALIGIINPGRMTLFGTLLIIWGMVKEALFGKPVNSDLTQSTHVYPTILIALICAFMSITYNVKKTATSSTPVSIAKPLISSAKSKLK

SEQ ID NO: 4130 - protein, 183 aa, Zea mays subsp. mays
  peptide (1)..(183): Ceres Seq. ID no. 12414147
  misc_feature (9)..(172): Homolog of NCBI NO: 15220078 NR Description: hypothetical protein; protein id: At1g80200.1
  misc_feature (30)..(183): Homolog of NCBI NO: 8953390 NR Description: putative protein [Arabidopsis thaliana]
  misc_feature (1)..(183): Homolog of NCBI NO: 17064978 NR Description: putative protein [Arabidopsis thaliana]
  misc_feature (1)..(183): Homolog of NCBI NO: 18416514 NR Description: putative protein
  misc_feature (1)..(183): Homolog of NCBI NO: 34913974 NR Description: B1110C07.25 [Oryza sativa (japonica
MLQIPLFRVPCRAGTCTTPIQVTSSQLVSNDIFPAAVVKAMLYPGATVSSLTKSKTFPSWNDLFDMYNLTEAKNASAVVDLQRLEILAGSYFCVAGALIGIINPGRMTLFGTLLIIWGMVKEALFGKPVNSDLTQSTHVYPTILIALICAFMSITYNVKKTATSSTPVSIAKPLISSAKSKLK

SEQ ID NO: 4131 - protein, 143 aa, Zea mays subsp. mays
  peptide (1)..(143): Ceres Seq. ID no. 12414148
  misc_feature (1)..(132): Homolog of NCBI NO: 15220078 NR Description: hypothetical protein; protein id: At1g80200.1
  misc_feature (1)..(143): Homolog of NCBI NO: 8953390 NR Description: putative protein [Arabidopsis thaliana]
  misc_feature (1)..(143): Homolog of NCBI NO: 17064978 NR Description: putative protein [Arabidopsis thaliana]
  misc_feature (1)..(143): Homolog of NCBI NO: 18416514 NR Description: putative protein
  misc_feature (1)..(143): Homolog of NCBI NO: 34913974 NR Description: B1110C07.25 [Oryza sativa (japonica
MLYPGATVSSLTKSKTFPSWNDLFDMYNLTEAKNASAVVDLQRLEILAGSYFCVAGALIGIINPGRMTLFGTLLIIWGMVKEALFGKPVNSDLTQSTHVYPTILIALICAFMSITYNVKKTATSSTPVSIAKPLISSAKSKLK

SEQ ID NO: 4132 - DNA, 993 bp, Zea mays subsp. mays
  misc_feature (1)..(993): Ceres Seq. ID no. 12455252
  misc_feature: MA Experiment ID: 108535 Result: Up-regulated in Transcription
  misc_feature: MA Experiment 108535 PARAMETER Experiment Name: Zm_Meristem_P Parameter: Age (day) Value: 8
  misc_feature: MA Experiment 108535 PARAMETER Experiment Name: Zm_Meristem_P Parameter: Organism Value: Zea mays
  misc_feature: MA Experiment 108535 PARAMETER Experiment Name: Zm_Meristem_P Parameter: Plant Line Value: 35A19
  misc_feature: MA Experiment 108535 PARAMETER Experiment Name: Zm_Meristem_P Parameter: Tissue Value: Root Meristem vs. Above Root Meristem
  misc_feature: MA Experiment ID: 108544 Result: Down-regulated in Transcription
aaaactcatcgccctccccacagccagaaccctagcctcgtcgccatggcctcctccttgctccgctccggccaccgcctctttctccgacgccaccgcctacccgcggcattctccaccgctacggccgaggagctaatcgacgtacgcaagcttcccaccaactacgacccctccaccttcgacccgtcctccccgtcccgcccgctgccgtccgaccgcgtgtggcgcctcgtcgaggatgtctcctccctcaccctcgcggagaccgcggctctctcctctctcctcctccgccgcctcgacataccctccgcaccacccatcgccatcctcaactccgccgcggggctgggcggcgccgccacggccggcgcggcgggggagaaggcgggggcggcggcggcggcggcggccgagaagaccgtcttcgagctgcggctggagggctacgacgctgcgagcaagatcaaggtgatcaaggagatccggtcgttcaccgacctggggctgaaggaggccaaggagctggtggagaaggcgcctgcggtgatcaagggcggcctatccaaggacgaagccaaggcgatcatcgagcggatgaaggcagttggcgccaaggtcgtcatggactgatcagaacaagcctttttcaacggtgaaatcctgcaactgcgaatctatgcttcgtttcagatcaactttaagtgcaaggatggacgggtggattgtggacagttcctgtatgaacttgcggaaatttgatgtggcacagcgctaataggttttcaagcacgttaatcaaatgaacattgatcctgcaatgctatagggtattggcatcaaacgctcgtcattatgttcgaatttgtgacctttcaattgtgggaagttaaaatgacctagttagttattttgttcatcacagggtcttgtttgagactggatgtccatatggatacaataacattttgctcttgtttctgtgaattt

SEQ ID NO: 4133 - protein, 211 aa, Zea mays subsp. mays
  peptide (1)..(211): Ceres Seq. ID no. 12455253
  misc_feature (144)..(211): Pfam Name: Ribosomal protein L7/L12 C-terminal domain Pfam Description: Ribosomal protein L7/L12 C-terminal domain
  misc_feature (77)..(208): Homolog of NCBI NO: 17987031 NR Description: LSU ribosomal protein L12P (L7/L12) [Brucella
  misc_feature (40)..(211): Homolog of NCBI NO: 6321369 NR Description: Protein required for cell viability; Ygl068wp
  misc_feature (78)..(210): Homolog of NCBI NO: 730573 NR Description: 50S ribosomal protein L7/L12
  misc_feature (119)..(211): Homolog of NCBI NO: 15235649 NR Description: ribosomal - like protein
  misc_feature (59)..(211): Homolog of NCBI NO: 40745733 NR Description: hypothetical protein AN2057.2 [Aspergillus
  misc_feature (77)..(211): Homolog of NCBI NO: 34913132 NR Description: contains EST AU058363(E50673)~ribosomal-like
  misc_feature (53)..(211): Homolog of NCBI NO: 15230614 NR Description: hypothetical protein
  misc_feature (83)..(211): Homolog of NCBI NO: 15209174 NR Description: hypothetical protein [Solanum demissum]
  misc_feature (64)..(211): Homolog of NCBI NO: 15234393 NR Description: ribosomal protein
  misc_feature (8)..(211): Homolog of NCBI NO: 18409467 NR Description: expressed protein
KTHRPPHSQNPSLVAMASSLLRSGHRLFLRRHRLPAAFSTATAEELIDVRKLPTNYDPSTFDPSSPSRPLPSDRVWRLVEDVSSLTLAETAALSSLLLRRLDIPSAPPIAILNSAAGLGGAATAGAAGEKAGAAAAAAAEKTVFELRLEGYDAASKIKVIKEIRSFTDLGLKEAKELVEKAPAVIKGGLSKDEAKAIIERMKAVGAKVVMD

SEQ ID NO: 4134 - protein, 196 aa, Zea mays subsp. mays
  peptide (1)..(196): Ceres Seq. ID no. 12455254
  misc_feature (129)..(196): Pfam Name: Ribosomal protein L7/L12 C-terminal domain Pfam Description: Ribosomal protein L7/L12 C-terminal domain
  misc_feature (62)..(193): Homolog of NCBI NO: 17987031 NR Description: LSU ribosomal protein L12P (L7/L12) [Brucella
  misc_feature (25)..(196): Homolog of NCBI NO: 6321369 NR Description: Protein required for cell viability; Ygl068wp
  misc_feature (63)..(195): Homolog of NCBI NO: 730573 NR Description: 50S ribosomal protein L7/L12
  misc_feature (104)..(196): Homolog of NCBI NO: 15235649 NR Description: ribosomal - like protein
  misc_feature (44)..(196): Homolog of NCBI NO: 40745733 NR Description: hypothetical protein AN2057.2 [Aspergillus
  misc_feature (62)..(196): Homolog of NCBI NO: 34913132 NR Description: contains EST AU058363(E50673)~ribosomal-like
  misc_feature (38)..(196): Homolog of NCBI NO: 15230614 NR Description: hypothetical protein
  misc_feature (68)..(196): Homolog of NCBI NO: 15209174 NR Description: hypothetical protein [Solanum demissum]
  misc_feature (49)..(196): Homolog of NCBI NO: 15234393 NR Description: ribosomal protein
  misc_feature (1)..(196): Homolog of NCBI NO: 18409467 NR Description: expressed protein
MASSLLRSGHRLFLRRHRLPAAFSTATAEELIDVRKLPTNYDPSTFDPSSPSRPLPSDRVWRLVEDVSSLTLAETAALSSLLLRRLDIPSAPPIAILNSAAGLGGAATAGAAGEKAGAAAAAAAEKTVFELRLEGYDAASKIKVIKEIRSFTDLGLKEAKELVEKAPAVIKGGLSKDEAKAIIERMKAVGAKVVMD

SEQ ID NO: 4135 - DNA, 1753 bp, Zea mays subsp. mays
  misc_feature (1)..(1753): Ceres Seq. ID no. 12405941
  misc_feature: MA Experiment ID: 108522 Result: Down-regulated in Transcription
  misc_feature: MA Experiment 108522 PARAMETER Experiment Name: Zm_42deg_Heat_P Parameter: Age (day) Value: 8
  misc_feature: MA Experiment 108522 PARAMETER Experiment Name: Zm_42deg_Heat_P Parameter: Organism Value: Zea mays
  misc_feature: MA Experiment 108522 PARAMETER Experiment Name: Zm_42deg_Heat_P Parameter: Plant Line Value: 35A19
  misc_feature: MA Experiment 108522 PARAMETER Experiment Name: Zm_42deg_Heat_P Parameter: Temperature (deg C) Value: 42 vs. 22
  misc_feature: MA Experiment 108522 PARAMETER Experiment Name: Zm_42deg_Heat_P Parameter: Timepoint (hr) Value: 1
  misc_feature: MA Experiment 108522 PARAMETER Experiment Name: Zm_42deg_Heat_P Parameter: Tissue Value: Aerial
  misc_feature: MA Experiment ID: 108523 Result: Down-regulated in Transcription
  misc_feature: MA Experiment 108523 PARAMETER Experiment Name: Zm_42deg_Heat_P Parameter: Age (day) Value: 8
  misc_feature: MA Experiment 108523 PARAMETER Experiment Name: Zm_42deg_Heat_P Parameter: Organism Value: Zea mays
  misc_feature: MA Experiment 108523 PARAMETER Experiment Name: Zm_42deg_Heat_P Parameter: Plant Line Value: 35A19
  misc_feature: MA Experiment 108523 PARAMETER Experiment Name: Zm_42deg_Heat_P Parameter: Temperature (deg C) Value: 42 vs. 22
  misc_feature: MA Experiment 108523 PARAMETER Experiment Name: Zm_42deg_Heat_P Parameter: Timepoint (hr) Value: 6
  misc_feature: MA Experiment 108523 PARAMETER Experiment Name: Zm_42deg_Heat_P Parameter: Tissue Value: Aerial
  misc_feature: MA Experiment ID: 108526 Result: Down-regulated in Transcription
  misc_feature: MA Experiment 108526 PARAMETER Experiment Name: Zm_5mM_NO_P Parameter: Age (day) Value: 8
  misc_feature: MA Experiment 108526 PARAMETER Experiment Name: Zm_5mM_NO_P Parameter: Organism Value: Zea mays
  misc_feature: MA Experiment 108526 PARAMETER Experiment Name: Zm_5mM_NO_P Parameter: Plant Line Value: 35A19
  misc_feature: MA Experiment 108526 PARAMETER Experiment Name: Zm_5mM_NO_P Parameter: Timepoint (hr) Value: 1
  misc_feature: MA Experiment 108526 PARAMETER Experiment Name: Zm_5mM_NO_P Parameter: Tissue Value: Aerial
  misc_feature: MA Experiment 108526 PARAMETER Experiment Name: Zm_5mM_NO_P Parameter: Treatment Value: 5mM NO vs. No Treatment
  misc_feature: MA Experiment ID: 108527 Result: Down-regulated in Transcription
  misc_feature: MA Experiment 108527 PARAMETER Experiment Name: Zm_5mM_NO_P Parameter: Age (day) Value: 8
  misc_feature: MA Experiment 108527 PARAMETER Experiment Name: Zm_5mM_NO_P Parameter: Organism Value: Zea mays
  misc_feature: MA Experiment 108527 PARAMETER Experiment Name: Zm_5mM_NO_P Parameter: Plant Line Value: 35A19
  misc_feature: MA Experiment 108527 PARAMETER Experiment Name: Zm_5mM_NO_P Parameter: Timepoint (hr) Value: 6
  misc_feature: MA Experiment 108527 PARAMETER Experiment Name: Zm_5mM_NO_P Parameter: Tissue Value: Aerial
  misc_feature: MA Experiment 108527 PARAMETER Experiment Name: Zm_5mM_NO_P Parameter: Treatment Value: 5mM NO vs. No Treatment
  misc_feature: MA Experiment ID: 108528 Result: Up-regulated in Transcription
  misc_feature: MA Experiment 108528 PARAMETER Experiment Name: Zm_Imbibed_Seeds_P Parameter: Age (day) Value: 5 vs. 2
  misc_feature: MA Experiment 108528 PARAMETER Experiment Name: Zm_Imbibed_Seeds_P Parameter: Organism Value: Zea mays
  misc_feature: MA Experiment 108528 PARAMETER Experiment Name: Zm_Imbibed_Seeds_P Parameter: Plant Line Value: 35A19
  misc_feature: MA Experiment 108528 PARAMETER Experiment Name: Zm_Imbibed_Seeds_P Parameter: Tissue Value: Aerial vs. Embryo
  misc_feature: MA Experiment ID: 108529 Result: Up-regulated in Transcription
  misc_feature: MA Experiment 108529 PARAMETER Experiment Name: Zm_Imbibed_Seeds_P Parameter: Age (day) Value: 5 vs. 2
  misc_feature: MA Experiment 108529 PARAMETER Experiment Name: Zm_Imbibed_Seeds_P Parameter: Organism Value: Zea mays
  misc_feature: MA Experiment 108529 PARAMETER Experiment Name: Zm_Imbibed_Seeds_P Parameter: Plant Line Value: 35A19
  misc_feature: MA Experiment 108529 PARAMETER Experiment Name: Zm_Imbibed_Seeds_P Parameter: Tissue Value: Roots vs. Embryo
  misc_feature: MA Experiment ID: 108530 Result: Up-regulated in Transcription
  misc_feature: MA Experiment 108530 PARAMETER Experiment Name: Zm_Imbibed_Seeds_P Parameter: Age (day) Value: 6 vs. 2
  misc_feature: MA Experiment 108530 PARAMETER Experiment Name: Zm_Imbibed_Seeds_P Parameter: Organism Value: Zea mays
  misc_feature: MA Experiment 108530 PARAMETER Experiment Name: Zm_Imbibed_Seeds_P Parameter: Plant Line Value: 35A19
  misc_feature: MA Experiment 108530 PARAMETER Experiment Name: Zm_Imbibed_Seeds_P Parameter: Tissue Value: Aerial vs. Embryo
  misc_feature: MA Experiment ID: 108535 Result: Down-regulated in Transcription
  misc_feature: MA Experiment 108535 PARAMETER Experiment Name: Zm_Meristem_P Parameter: Age (day) Value: 8
  misc_feature: MA Experiment 108535 PARAMETER Experiment Name: Zm_Meristem_P Parameter: Organism Value: Zea mays
  misc_feature: MA Experiment 108535 PARAMETER Experiment Name: Zm_Meristem_P Parameter: Plant Line Value: 35A19
  misc_feature: MA Experiment 108535 PARAMETER Experiment Name: Zm_Meristem_P Parameter: Tissue Value: Root Meristem vs. Above Root Meristem
  misc_feature: MA Experiment ID: 108536 Result: Up-regulated in Transcription
  misc_feature: MA Experiment 108536 PARAMETER Experiment Name: Zm_Meristem_P Parameter: Age (day) Value: 8
  misc_feature: MA Experiment 108536 PARAMETER Experiment Name: Zm_Meristem_P Parameter: Organism Value: Zea mays
  misc_feature: MA Experiment 108536 PARAMETER Experiment Name: Zm_Meristem_P Parameter: Plant Line Value: 35A19
  misc_feature: MA Experiment 108536 PARAMETER Experiment Name: Zm_Meristem_P Parameter: Tissue Value: Shoot Meristem vs. Above Shoot Meristem
  misc_feature: MA Experiment ID: 108544 Result: Up-regulated in Transcription
  misc_feature: MA Experiment ID: 108687 Result: Down-regulated in Transcription
  misc_feature: MA Experiment 108687 PARAMETER Experiment Name: Zm_Embryos-Flowers__P Parameter: Tissue Value: Embryo vs. Aerial+
  misc_feature: MA Experiment ID: 108688 Result: Down-regulated in Transcription
  misc_feature: MA Experiment 108688 PARAMETER Experiment Name: Zm_Embryos-Flowers__P Parameter: Tissue Value: Immature Flowers vs. Aerial+
  misc_feature: MA Experiment ID: 20000488 Result: Down-regulated in Transcription
  misc_feature: MA Experiment 20000488 PARAMETER Experiment Name: Zm_50mM_NH4NO3_L_to_H_P Parameter: Organism Value: Zea mays
  misc_feature: MA Experiment 20000488 PARAMETER Experiment Name: Zm_50mM_NH4NO3_L_to_H_P Parameter: Timepoint (hr) Value: 8
  misc_feature: MA Experiment 20000488 PARAMETER Experiment Name: Zm_50mM_NH4NO3_L_to_H_P Parameter: Tissue Value: Leaves
  misc_feature: MA Experiment 20000488 PARAMETER Experiment Name: Zm_50mM_NH4NO3_L_to_H_P Parameter: Treatment Value: 50mM NH4NO3 vs. 100mM Mannitol
  misc_feature: MA Experiment ID: 20000535 Result: Down-regulated in Transcription
  misc_feature: MA Experiment 20000535 PARAMETER Experiment Name: Zm_Hybrid_Seed_Dev_P Parameter: DAP Value: 30 vs. 12
  misc_feature: MA Experiment 20000535 PARAMETER Experiment Name: Zm_Hybrid_Seed_Dev_P Parameter: Organism Value: Zea mays
  misc_feature: MA Experiment 20000535 PARAMETER Experiment Name: Zm_Hybrid_Seed_Dev_P Parameter: Plant Line Value: 35A19
  misc_feature: MA Experiment 20000535 PARAMETER Experiment Name: Zm_Hybrid_Seed_Dev_P Parameter: Tissue Value: Embryo vs. Unfert Floret
  misc_feature: MA Experiment ID: 20000626 Result: Up-regulated in Transcription
  misc_feature: MA Experiment 20000626 PARAMETER Experiment Name: Zm_Herbicide-Treatments_P Parameter: Timepoint (hr) Value: 12
  misc_feature: MA Experiment 20000626 PARAMETER Experiment Name: Zm_Herbicide-Treatments_P Parameter: Tissue Value: Aerial
  misc_feature: MA Experiment 20000626 PARAMETER Experiment Name: Zm_Herbicide-Treatments_P Parameter: Treatment Value: Roundup vs. No Treatment
agcaatagactggtcaccactcacgagagcagaaaacaaacaatgcctccttacctgctcgctgccggcgcgcttatcgtcttcctgtacatcatcaagaaccgcaggagcagaaagctcccgccatccccgccgtcgctaccgctgatcggccaccttcacctcatcggccgcgtcgcgcaccgatccttgctagagctgcaggttcgctatggcggcggcggcggtctcctcttcctgcaactcgggcgcagaccgaccttggtcgtgtccactgcggccgcggccgcggatctgttcaagaaccacgacctcgctttcgcctcccgcccacgcagcgtgggaggggataagctgatgtatgagtgcagcaacgtgtcgttcgcgccttacggcgagaactggcgccggggcaagaagatcgctgtggtccacctcctctctccacggcgcgtggaatcgttcgcgcccgtaagggccgccgaggtagccgcgctcgtcgcacggacacgccgcaccgcggaggctggggaggccgtggagttgagggagctcctgaacggctacgccaacgcggtggccacccgcgcggccaccggtgccgctggggcgacagcagagaagctgaaagagctgatggggaactccgagcccgaggcgctgatggcgggcttccaacccgaagacgtgctgccggacgcaccggcgaggttcgtgagatgggtgacgggcctcaataagaagctcgaagacttggtggagtcgtgggacaagttcctgtccgatatagtggccgcacacaaggagaaggggggtggcgacgcagaggaggatgaggacttcttggatgtcttgcttcggctgcgggaagaaggcgcagatgggctcgagctcacagacgatcgcatcaaagctaccgtcaaggacatgatagcggctgcaactgaaacatcgtcccaaacgctggaatggaccatggccgaactcattgccaacccgcgggtgatgagcaagctccaaggcgagatagcgcgagtcgtcagcgccgatcagacgaccatcgctgaaccggacctgaacaaaatggagtacctgagggcagtgttcaaagaggtgcttcggctccacccaccagcgccgctcctcgtcccgcacgaatcaacaacgcccgcggttgtgcagggctacgagatcccggccaagacggctctcttcgtcaacgtgtgggccatcgggcgggaccctgctgtgtgggacgcaccggacgagttccgcccagagcggttcgtgggcggcagtccctcggtggacttcagaggtactactaccagctcatcccgttcggcgccggccggaggatctgccccggcatcaacttcgcgctgccggtcttggagctcgcgcttgtcagccttctgcaccacttcgaatgggagctccccgccggcgtgggaaaagcggacctcgacgtgggcgaggcgccggggatgacgacgccgcggcggattccgctcgtccttgtccccaagtgcaggacgctcgttcagccagcgctgcagtagcgcgaggaatttcatgtgtctccatgcagtggcggaaccagaaatatttaagagcttgggtaaaaaataatacttatactgtaaatatgtagctttgtctaatttttacctgtgtttaactatattttactacttgttgtatgtgtataagttcactagcaataatggaggagcctatgctcttgcccccg

SEQ ID NO: 4136 - protein, 496 aa, Zea mays subsp. mays
  peptide (1)..(496): Ceres Seq. ID no. 12405942
  misc_feature (19)..(440): Homolog of NCBI NO: 117188 NR Description: CYTOCHROME P450 71A1 (CYPLXXIA1) (ARP-2)
  misc_feature (15)..(440): Homolog of NCBI NO: 40645046 NR Description: cytochrome P450 [Asparagus officinalis]
  misc_feature (19)..(440): Homolog of NCBI NO: 25282608 NR Description: cytochrome P-450LXXIA1 [similarity] - avocado
SNRLVTTHESRKQTMPPYLLAAGALIVFLYIIKNRRSRKLPPSPPSLPLIGHLHLIGRVAHRSLLELQVRYGGGGGLLFLQLGRRPTLVVSTAAAAADLFKNHDLAFASRPRSVGGDKLMYECSNVSFAPYGENWRRGKKIAVVHLLSPRRVESFAPVRAAEVAALVARTRRTAEAGEAVELRELLNGYANAVATRAATGAAGATAEKLKELMGNSEPEALMAGFQPEDVLPDAPARFVRWVTGLNKKLEDLVESWDKFLSDIVAAHKEKGGGDAEEDEDFLDVLLRLREEGADGLELTDDRIKATVKDMIAAATETSSQTLEWTMAELIANPRVMSKLQGEIARVVSADQTTIAEPDLNKMEYLRAVFKEVLRLHPPAPLLVPHESTTPAVVQGYEIPAKTALFVNVWAIGRDPAVWDAPDEFRPERFVGGSPSVDFRGTTTSSSRSAPAGGSAPASTSRCRSWSSRLSAFCTTSNGSSPPAWEKRTSTWARRRG

SEQ ID NO: 4137 - protein, 482 aa, Zea mays subsp. mays
  peptide (1)..(482): Ceres Seq. ID no. 12405943
  misc_feature (5)..(426): Homolog of NCBI NO: 117188 NR Description: CYTOCHROME P450 71A1 (CYPLXXIA1) (ARP-2)
  misc_feature (1)..(426): Homolog of NCBI NO: 40645046 NR Description: cytochrome P450 [Asparagus officinalis]
  misc_feature (5)..(426): Homolog of NCBI NO: 25282608 NR Description: cytochrome P-450LXXIA1 [similarity] - avocado
MPPYLLAAGALIVFLYIIKNRRSRKLPPSPPSLPLIGHLHLIGRVAHRSLLELQVRYGGGGGLLFLQLGRRPTLVVSTAAAAADLFKNHDLAFASRPRSVGGDKLMYECSNVSFAPYGENWRRGKKIAVVHLLSPRRVESFAPVRAAEVAALVARTRRTAEAGEAVELRELLNGYANAVATRAATGAAGATAEKLKELMGNSEPEALMAGFQPEDVLPDAPARFVRWVTGLNKKLEDLVESWDKFLSDIVAAHKEKGGGDAEEDEDFLDVLLRLREEGADGLELTDDRIKATVKDMIAAATETSSQTLEWTMAELIANPRVMSKLQGEIARVVSADQTTIAEPDLNKMEYLRAVFKEVLRLHPPAPLLVPHESTTPAVVQGYEIPAKTALFVNVWAIGRDPAVWDAPDEFRPERFVGGSPSVDFRGTTTSSSRSAPAGGSAPASTSRCRSWSSRLSAFCTTSNGSSPPAWEKRTSTWARRRG

SEQ ID NO: 4138 - protein, 377 aa, Zea mays subsp. mays
  peptide (1)..(377): Ceres Seq. ID no. 12405944
  misc_feature (1)..(321): Homolog of NCBI NO: 117188 NR Description: CYTOCHROME P450 71A1 (CYPLXXIA1) (ARP-2)
  misc_feature (1)..(321): Homolog of NCBI NO: 40645046 NR Description: cytochrome P450 [Asparagus officinalis]
  misc_feature (1)..(321): Homolog of NCBI NO: 25282608 NR Description: cytochrome P-450LXXIA1 [similarity] - avocado
MYECSNVSFAPYGENWRRGKKIAVVHLLSPRRVESFAPVRAAEVAALVARTRRTAEAGEAVELRELLNGYANAVATRAATGAAGATAEKLKELMGNSEPEALMAGFQPEDVLPDAPARFVRWVTGLNKKLEDLVESWDKFLSDIVAAHKEKGGGDAEEDEDFLDVLLRLREEGADGLELTDDRIKATVKDMIAAATETSSQTLEWTMAELIANPRVMSKLQGEIARVVSADQTTIAEPDLNKMEYLRAVFKEVLRLHPPAPLLVPHESTTPAVVQGYEIPAKTALFVNVWAIGRDPAVWDAPDEFRPERFVGGSPSVDFRGTTTSSSRSAPAGGSAPASTSRCRSWSSRLSAFCTTSNGSSPPAWEKRTSTWARRRG

SEQ ID NO: 4139 - DNA, 1657 bp, Zea mays subsp. mays
  misc_feature (1)..(1657): Ceres Seq. ID no. 12356149
  misc_feature: MA Experiment ID: 108528 Result: Up-regulated in Transcription
  misc_feature: MA Experiment 108528 PARAMETER Experiment Name: Zm_Imbibed_Seeds_P Parameter: Age (day) Value: 5 vs. 2
  misc_feature: MA Experiment 108528 PARAMETER Experiment Name: Zm_Imbibed_Seeds_P Parameter: Organism Value: Zea mays
  misc_feature: MA Experiment 108528 PARAMETER Experiment Name: Zm_Imbibed_Seeds_P Parameter: Plant Line Value: 35A19
  misc_feature: MA Experiment 108528 PARAMETER Experiment Name: Zm_Imbibed_Seeds_P Parameter: Tissue Value: Aerial vs. Embryo
  misc_feature: MA Experiment ID: 108529 Result: Up-regulated in Transcription
  misc_feature: MA Experiment 108529 PARAMETER Experiment Name: Zm_Imbibed_Seeds_P Parameter: Age (day) Value: 5 vs. 2
  misc_feature: MA Experiment 108529 PARAMETER Experiment Name: Zm_Imbibed_Seeds_P Parameter: Organism Value: Zea mays
  misc_feature: MA Experiment 108529 PARAMETER Experiment Name: Zm_Imbibed_Seeds_P Parameter: Plant Line Value: 35A19
  misc_feature: MA Experiment 108529 PARAMETER Experiment Name: Zm_Imbibed_Seeds_P Parameter: Tissue Value: Roots vs. Embryo
  misc_feature: MA Experiment ID: 108530 Result: Up-regulated in Transcription
  misc_feature: MA Experiment 108530 PARAMETER Experiment Name: Zm_Imbibed_Seeds_P Parameter: Age (day) Value: 6 vs. 2
  misc_feature: MA Experiment 108530 PARAMETER Experiment Name: Zm_Imbibed_Seeds_P Parameter: Organism Value: Zea mays
  misc_feature: MA Experiment 108530 PARAMETER Experiment Name: Zm_Imbibed_Seeds_P Parameter: Plant Line Value: 35A19
  misc_feature: MA Experiment 108530 PARAMETER Experiment Name: Zm_Imbibed_Seeds_P Parameter: Tissue Value: Aerial vs. Embryo
  misc_feature: MA Experiment ID: 108545 Result: Up-regulated in Transcription
  misc_feature: MA Experiment 108545 PARAMETER Experiment Name: Zm_Imbibed_Seeds_P Parameter: Age (day) Value: 3 vs. 2
  misc_feature: MA Experiment 108545 PARAMETER Experiment Name: Zm_Imbibed_Seeds_P Parameter: Organism Value: Zea mays
  misc_feature: MA Experiment 108545 PARAMETER Experiment Name: Zm_Imbibed_Seeds_P Parameter: Plant Line Value: 35A19
  misc_feature: MA Experiment 108545 PARAMETER Experiment Name: Zm_Imbibed_Seeds_P Parameter: Tissue Value: Aerial vs. Embryo
  misc_feature: MA Experiment ID: 108547 Result: Up-regulated in Transcription
  misc_feature: MA Experiment 108547 PARAMETER Experiment Name: Zm_Imbibed_Seeds_P Parameter: Age (day) Value: 4 vs. 2
  misc_feature: MA Experiment 108547 PARAMETER Experiment Name: Zm_Imbibed_Seeds_P Parameter: Organism Value: Zea mays
  misc_feature: MA Experiment 108547 PARAMETER Experiment Name: Zm_Imbibed_Seeds_P Parameter: Plant Line Value: 35A19
  misc_feature: MA Experiment 108547 PARAMETER Experiment Name: Zm_Imbibed_Seeds_P Parameter: Tissue Value: Aerial vs. Embryo
  misc_feature: MA Experiment ID: 108689 Result: Up-regulated in Transcription
  misc_feature: MA Experiment 108689 PARAMETER Experiment Name: Zm_Drought_Roots_P Parameter: Age (day) Value: 9
  misc_feature: MA Experiment 108689 PARAMETER Experiment Name: Zm_Drought_Roots_P Parameter: Organism Value: Zea mays
  misc_feature: MA Experiment 108689 PARAMETER Experiment Name: Zm_Drought_Roots_P Parameter: Plant Line Value: 35A19
  misc_feature: MA Experiment 108689 PARAMETER Experiment Name: Zm_Drought_Roots_P Parameter: Timepoint (hr) Value: 24
  misc_feature: MA Experiment 108689 PARAMETER Experiment Name: Zm_Drought_Roots_P Parameter: Tissue Value: Roots
  misc_feature: MA Experiment 108689 PARAMETER Experiment Name: Zm_Drought_Roots_P Parameter: Treatment Value: Drought vs. No Drought
aattaattactttccccccaaaaaaaagccccccaccgcctcgacctcgattcctccgcccccatcgccgtcgtctcctcctccgcctccctgtctgtccgctccgcacctcccctaaaaaacccccccggccattgccgcaccgagctccccttcctcaaatgccccaggcccggacgcctcgacgcccagctccgtgctcgcatggctagcggcgtcctccatcgctccgcctccctatgtctccgcccggccgccggctcctccgccgactccggccggggccacggcgcggttatgatcggtgattcgaggacgcgcgttgctgctctgcggctgggaggatctagccggagagagttattatctgtcacaatggcctccagagatcacactggcttgacccgacaacttcttgattttcaacatgatacaatagatgaggtaggcgcaggacatgacccattcattgatttgaaagcgagattcatggactttaaacagagaaactatgtggaaaaattttcaaattaccaaacccttgctgagcagcaaacaccaaagttcatggtggttgcttgtgctgactccagggtctgccctaccgctgttttggggtttcagcctggggaagcatttacagttcgtaatgtggcaaatttggtaccaccatatgagcatggggggacagagactagtgcagcactagagtttgctgtcaataccctccaggtagaaaatgtactggtgataggccacagtaggtgtgggggcatccaggcactaatgagcatgaaagatgattcgacctccggaagcttcattaaaaactgggtttcaattgggaagagcgcaaggttaagcacgaaagctgcagctggaaatatgagttttgacatacagtgcaaacattgtgaaaaggaatcaataaatagttctctgttgaacttgttaacatacccattgattgagaagagggtgaatgaaggcactttgaatcttcatggaggctactacaacttcgtcgattgcacatttgagaaatggacattgttgtaccgtgaagggttggaaggtggaagcaagtatgccataaagaaccggtccacctggtgttgaccaacgaaggtcgtgtttacttgggtaaatttcactctgccccccgctgttcagcatggtttcgctttgccactacgttgtccatttcccattgcacctttgctccattgtggcatcgatgttctccgggtcccggtatcaaataactgtggcaaggctgttggcatgccagcttgaactgcgtgttgtagtgtcgcatacacatgcgcaggcacgtctgcatcgtagcagttatttgatacaggaactttttgatactgtagaagcacaataccacaatggagtgaggtgcaacgcgcgatggacaatatggttgcaaggtgaaagtctgtggaactgccgggggcaaagtgaattttatccaactatctgtaatatgtgtgctgttttccggttgaaactattaagaaaaaaataggaataagctgcaggatcggtcgtaatgcgtgtaattgtcgccacatttggcattaccttgctattgtaacatttgtaccatttgttgtatcattataactgagatatatacggtctcgcc

SEQ ID NO: 4140 - protein, 304 aa, Zea mays subsp. mays
  peptide (1)..(304): Ceres Seq. ID no. 12356150
  misc_feature (114)..(282): Pfam Name: Carbonic anhydrase Pfam Description: Carbonic anhydrase
  misc_feature (17)..(303): Homolog of NCBI NO: 25404198 NR Description: probable carbonic anhydrase T18I24.9
  misc_feature (17)..(303): Homolog of NCBI NO: 30696223 NR Description: carbonic anhydrase -related [Arabidopsis
  misc_feature (134)..(303): Homolog of NCBI NO: 7484832 NR Description: carbonate dehydratase homolog T16L1.70 -
  misc_feature (17)..(259): Homolog of NCBI NO: 30696219 NR Description: carbonic anhydrase -related [Arabidopsis thaliana]
  misc_feature (78)..(286): Homolog of NCBI NO: 30698715 NR Description: carbonic anhydrase -related [Arabidopsis
  misc_feature (78)..(286): Homolog of NCBI NO: 15223141 NR Description: carbonic anhydrase, putative
  misc_feature (40)..(283): Homolog of NCBI NO: 27652186 NR Description: carbonic anhydrase 3 [Flaveria bidentis]
  misc_feature (17)..(259): Homolog of NCBI NO: 21539555 NR Description: putative carbonic anhydrase [Arabidopsis
  misc_feature (91)..(283): Homolog of NCBI NO: 115471 NR Description: CARBONIC ANHYDRASE, CHLOROPLAST PRECURSOR
  misc_feature (39)..(303): Homolog of NCBI NO: 18418245 NR Description: carbonate dehydratase - like protein
MASGVLHRSASLCLRPAAGSSADSGRGHGAVMIGDSRTRVAALRLGGSSRRELLSVTMASRDHTGLTRQLLDFQHDTIDEVGAGHDPFIDLKARFMDFKQRNYVEKFSNYQTLAEQQTPKFMVVACADSRVCPTAVLGFQPGEAFTVRNVANLVPPYEHGGTETSAALEFAVNTLQVENVLVIGHSRCGGIQALMSMKDDSTSGSFIKNWVSIGKSARLSTKAAAGNMSFDIQCKHCEKESINSSLLNLLTYPLIEKRVNEGTLNLHGGYYNFVDCTFEKWTLLYREGLEGGSKYAIKNRSTWC

SEQ ID NO: 4141 - protein, 273 aa, Zea mays subsp. mays
  peptide (1)..(273): Ceres Seq. ID no. 12356151
  misc_feature (83)..(251): Pfam Name: Carbonic anhydrase Pfam Description: Carbonic anhydrase
  misc_feature (60)..(252): Homolog of NCBI NO: 115471 NR Description: CARBONIC ANHYDRASE, CHLOROPLAST PRECURSOR
  misc_feature (103)..(272): Homolog of NCBI NO: 7484832 NR Description: carbonate dehydratase homolog T16L1.70 -
  misc_feature (1)..(228): Homolog of NCBI NO: 21539555 NR Description: putative carbonic anhydrase [Arabidopsis
  misc_feature (1)..(228): Homolog of NCBI NO: 30696219 NR Description: carbonic anhydrase -related [Arabidopsis thaliana]
  misc_feature (9)..(252): Homolog of NCBI NO: 27652186 NR Description: carbonic anhydrase 3 [Flaveria bidentis]
  misc_feature (47)..(255): Homolog of NCBI NO: 30698715 NR Description: carbonic anhydrase -related [Arabidopsis
  misc_feature (47)..(255): Homolog of NCBI NO: 15223141 NR Description: carbonic anhydrase, putative
  misc_feature (1)..(272): Homolog of NCBI NO: 25404198 NR Description: probable carbonic anhydrase T18I24.9
  misc_feature (1)..(272): Homolog of NCBI NO: 30696223 NR Description: carbonic anhydrase -related [Arabidopsis
  misc_feature (8)..(272): Homolog of NCBI NO: 18418245 NR Description: carbonate dehydratase - like protein
MIGDSRTRVAALRLGGSSRRELLSVTMASRDHTGLTRQLLDFQHDTIDEVGAGHDPFIDLKARFMDFKQRNYVEKFSNYQTLAEQQTPKFMVVACADSRVCPTAVLGFQPGEAFTVRNVANLVPPYEHGGTETSAALEFAVNTLQVENVLVIGHSRCGGIQALMSMKDDSTSGSFIKNWVSIGKSARLSTKAAAGNMSFDIQCKHCEKESINSSLLNLLTYPLIEKRVNEGTLNLHGGYYNFVDCTFEKWTLLYREGLEGGSKYAIKNRSTWC

SEQ ID NO: 4142 - protein, 247 aa, Zea mays subsp. mays
  peptide (1)..(247): Ceres Seq. ID no. 12356152
  misc_feature (57)..(225): Pfam Name: Carbonic anhydrase Pfam Description: Carbonic anhydrase
  misc_feature (34)..(226): Homolog of NCBI NO: 115471 NR Description: CARBONIC ANHYDRASE, CHLOROPLAST PRECURSOR
  misc_feature (77)..(246): Homolog of NCBI NO: 7484832 NR Description: carbonate dehydratase homolog T16L1.70 -
  misc_feature (1)..(202): Homolog of NCBI NO: 21539555 NR Description: putative carbonic anhydrase [Arabidopsis
  misc_feature (1)..(202): Homolog of NCBI NO: 30696219 NR Description: carbonic anhydrase -related [Arabidopsis thaliana]
  misc_feature (1)..(226): Homolog of NCBI NO: 27652186 NR Description: carbonic anhydrase 3 [Flaveria bidentis]
  misc_feature (21)..(229): Homolog of NCBI NO: 30698715 NR Description: carbonic anhydrase -related [Arabidopsis
  misc_feature (21)..(229): Homolog of NCBI NO: 15223141 NR Description: carbonic anhydrase, putative
  misc_feature (1)..(246): Homolog of NCBI NO: 25404198 NR Description: probable carbonic anhydrase T18I24.9
  misc_feature (1)..(246): Homolog of NCBI NO: 30696223 NR Description: carbonic anhydrase -related [Arabidopsis
  misc_feature (1)..(246): Homolog of NCBI NO: 18418245 NR Description: carbonate dehydratase - like protein
MASRDHTGLTRQLLDFQHDTIDEVGAGHDPFIDLKARFMDFKQRNYVEKFSNYQTLAEQQTPKFMVVACADSRVCPTAVLGFQPGEAFTVRNVANLVPPYEHGGTETSAALEFAVNTLQVENVLVIGHSRCGGIQALMSMKDDSTSGSFIKNWVSIGKSARLSTKAAAGNMSFDIQCKHCEKESINSSLLNLLTYPLIEKRVNEGTLNLHGGYYNFVDCTFEKWTLLYREGLEGGSKYAIKNRSTWC

SEQ ID NO: 4143 - DNA, 1271 bp, Zea mays subsp. mays
  misc_feature (1)..(1271): Ceres Seq. ID no. 12414141
  misc_feature: MA Experiment ID: 108522 Result: Down-regulated in Transcription
  misc_feature: MA Experiment 108522 PARAMETER Experiment Name: Zm_42deg_Heat_P Parameter: Age (day) Value: 8
  misc_feature: MA Experiment 108522 PARAMETER Experiment Name: Zm_42deg_Heat_P Parameter: Organism Value: Zea mays
  misc_feature: MA Experiment 108522 PARAMETER Experiment Name: Zm_42deg_Heat_P Parameter: Plant Line Value: 35A19
  misc_feature: MA Experiment 108522 PARAMETER Experiment Name: Zm_42deg_Heat_P Parameter: Temperature (deg C) Value: 42 vs. 22
  misc_feature: MA Experiment 108522 PARAMETER Experiment Name: Zm_42deg_Heat_P Parameter: Timepoint (hr) Value: 1
  misc_feature: MA Experiment 108522 PARAMETER Experiment Name: Zm_42deg_Heat_P Parameter: Tissue Value: Aerial
  misc_feature: MA Experiment ID: 108535 Result: Up-regulated in Transcription
  misc_feature: MA Experiment 108535 PARAMETER Experiment Name: Zm_Meristem_P Parameter: Age (day) Value: 8
  misc_feature: MA Experiment 108535 PARAMETER Experiment Name: Zm_Meristem_P Parameter: Organism Value: Zea mays
  misc_feature: MA Experiment 108535 PARAMETER Experiment Name: Zm_Meristem_P Parameter: Plant Line Value: 35A19
  misc_feature: MA Experiment 108535 PARAMETER Experiment Name: Zm_Meristem_P Parameter: Tissue Value: Root Meristem vs. Above Root Meristem
  misc_feature: MA Experiment ID: 108544 Result: Down-regulated in Transcription
  misc_feature: MA Experiment ID: 20000487 Result: Up-regulated in Transcription
  misc_feature: MA Experiment 20000487 PARAMETER Experiment Name: Zm_50mM_NH4NO3_L_to_H_P Parameter: Organism Value: Zea mays
  misc_feature: MA Experiment 20000487 PARAMETER Experiment Name: Zm_50mM_NH4NO3_L_to_H_P Parameter: Timepoint (hr) Value: 4
  misc_feature: MA Experiment 20000487 PARAMETER Experiment Name: Zm_50mM_NH4NO3_L_to_H_P Parameter: Tissue Value: Leaves
  misc_feature: MA Experiment 20000487 PARAMETER Experiment Name: Zm_50mM_NH4NO3_L_to_H_P Parameter: Treatment Value: 50mM NH4NO3 vs. 100mM Mannitol
  misc_feature: MA Experiment ID: 20000488 Result: Up-regulated in Transcription
  misc_feature: MA Experiment 20000488 PARAMETER Experiment Name: Zm_50mM_NH4NO3_L_to_H_P Parameter: Organism Value: Zea mays
  misc_feature: MA Experiment 20000488 PARAMETER Experiment Name: Zm_50mM_NH4NO3_L_to_H_P Parameter: Timepoint (hr) Value: 8
  misc_feature: MA Experiment 20000488 PARAMETER Experiment Name: Zm_50mM_NH4NO3_L_to_H_P Parameter: Tissue Value: Leaves
  misc_feature: MA Experiment 20000488 PARAMETER Experiment Name: Zm_50mM_NH4NO3_L_to_H_P Parameter: Treatment Value: 50mM NH4NO3 vs. 100mM Mannitol
  misc_feature: MA Experiment ID: 20001606 Result: Up-regulated in Transcription
  misc_feature: MA Experiment 20001606 PARAMETER Experiment Name: Zm_50ppm_KNO3_L-to-H_P Parameter: Age (day) Value: 19
  misc_feature: MA Experiment 20001606 PARAMETER Experiment Name: Zm_50ppm_KNO3_L-to-H_P Parameter: Organism Value: Zea mays
  misc_feature: MA Experiment 20001606 PARAMETER Experiment Name: Zm_50ppm_KNO3_L-to-H_P Parameter: Plant Line Value: 35A19
  misc_feature: MA Experiment 20001606 PARAMETER Experiment Name: Zm_50ppm_KNO3_L-to-H_P Parameter: Timepoint (hr) Value: 8
  misc_feature: MA Experiment 20001606 PARAMETER Experiment Name: Zm_50ppm_KNO3_L-to-H_P Parameter: Tissue Value: Shoots
  misc_feature: MA Experiment 20001606 PARAMETER Experiment Name: Zm_50ppm_KNO3_L-to-H_P Parameter: Treatment Value: 50ppm KNO3 vs. 50ppm KCl
aaaacttcctccccaaacaaccggcggcggcgcgagggcttcgctttgctgccatggctctcgtcgccggctcctacgagcgcttcatctggggcttctcactcaaaaccctgacaaccccctccgccaccggcgcctcgccctccgagaccctgaccctcgcgccgctcttctcgtacccggcccacacgggcccggtgcgctgcgtggccgcggcgccgcgggcggggctggtggcctccggcggcgcggacaactccgtccgcctctacgacctcccttccgccgcggacctcggcccgctcctggacccctcggccgccgtctccgcactcgccttctactcccggggccccgtgccgcggaacctcctggccgcctgcgacgacggctcgctccacatctacgacgccgacggcttcgcgctgctctccacgctccgcgccttcccgcgccacgaggccgccgaggcgctcgccgtgcacccgtcgggccgggtcgcgctcgccgtcggccgcgcgggggcgcttgccatgctcaacctcgtccgcggccgacgcagcttcgcatgccgcctcgagcaccctgcgtccgcgatcgcctacgctgaggacagggatggcggggaccgattcgtgatggctgccgagaacaaggtcagcgtgcacgactccgtggatgccagggttattcatgatatggactgtggcaagaaggtgctcgccatggcgcccgcaaagagtggggtcctttacactggtggcgaggaccgttgtattactgcatgggatctgtccagcggcaaggtctcctcacgcattgagggtgcccatgcaactcgtgtaaaaggggttgttgtttttggtaatagcaatgatggatcacagctctccaatctaatttcttctgcttcgtccgatggtgtcataaggatatgggacattcgaacaatcgggaacggaaagcctactccattagcagaggctaatacaaaagcaaggctaacttgtcttgctggaacgtcactgaaatgactcaaggaacctacagtttgctaggcgtctgattctgcattgttagctgaattagaaaacctggacatgaaagaagaaattgaaggtgaaagatctggcacgcgagcattatctgtgtgcgtttggaacgtatccatccattatgtacaccgacatagttttggcttagtgtctgagctgcataacttatttatatttgattgcgcgacaagttttgcaatgagaaccgttttcagt

SEQ ID NO: 4144 - protein, 343 aa, Zea mays subsp. mays
  peptide (1)..(343): Ceres Seq. ID no. 12414142
  misc_feature (62)..(337): Homolog of NCBI NO: 8923577 NR Description: hypothetical protein FLJ20624 [Homo sapiens]
  misc_feature (49)..(337): Homolog of NCBI NO: 29436537 NR Description: Similar to hypothetical protein FLJ20624 [Danio
  misc_feature (18)..(337): Homolog of NCBI NO: 14578565 NR Description: putative PAK inhibitor SKB15 [Mus musculus]
  misc_feature (49)..(337): Homolog of NCBI NO: 37362258 NR Description: PAK1 interacting protein 1 [Danio rerio]
  misc_feature (18)..(337): Homolog of NCBI NO: 26346855 NR Description: unnamed protein product [Mus musculus]
  misc_feature (18)..(337): Homolog of NCBI NO: 21311951 NR Description: RIKEN cDNA 5930415H02 [Mus musculus]
  misc_feature (246)..(343): Homolog of NCBI NO: 25404514 NR Description: hypothetical protein F16G16.2 [imported] -
  misc_feature (18)..(246): Homolog of NCBI NO: 25404514 NR Description: hypothetical protein F16G16.2 [imported] -
  misc_feature (18)..(343): Homolog of NCBI NO: 15217832 NR Description: G-protein beta-subunit (transducin) family
  misc_feature (18)..(343): Homolog of NCBI NO: 23306444 NR Description: Unknown protein [Arabidopsis thaliana]
NFLPKQPAAARGLRFAAMALVAGSYERFIWGFSLKTLTTPSATGASPSETLTLAPLFSYPAHTGPVRCVAAAPRAGLVASGGADNSVRLYDLPSAADLGPLLDPSAAVSALAFYSRGPVPRNLLAACDDGSLHIYDADGFALLSTLRAFPRHEAAEALAVHPSGRVALAVGRAGALAMLNLVRGRRSFACRLEHPASAIAYAEDRDGGDRFVMAAENKVSVHDSVDARVIHDMDCGKKVLAMAPAKSGVLYTGGEDRCITAWDLSSGKVSSRIEGAHATRVKGVVVFGNSNDGSQLSNLISSASSDGVIRIWDIRTIGNGKPTPLAEANTKARLTCLAGTSLK

SEQ ID NO: 4145 - protein, 326 aa, Zea mays subsp. mays
  peptide (1)..(326): Ceres Seq. ID no. 12414143
  misc_feature (45)..(320): Homolog of NCBI NO: 8923577 NR Description: hypothetical protein FLJ20624 [Homo sapiens]
  misc_feature (32)..(320): Homolog of NCBI NO: 29436537 NR Description: Similar to hypothetical protein FLJ20624 [Danio
  misc_feature (1)..(320): Homolog of NCBI NO: 14578565 NR Description: putative PAK inhibitor SKB15 [Mus musculus]
  misc_feature (32)..(320): Homolog of NCBI NO: 37362258 NR Description: PAK1 interacting protein 1 [Danio rerio]
  misc_feature (1)..(320): Homolog of NCBI NO: 26346855 NR Description: unnamed protein product [Mus musculus]
  misc_feature (1)..(320): Homolog of NCBI NO: 21311951 NR Description: RIKEN cDNA 5930415H02 [Mus musculus]
  misc_feature (229)..(326): Homolog of NCBI NO: 25404514 NR Description: hypothetical protein F16G16.2 [imported] -
  misc_feature (1)..(229): Homolog of NCBI NO: 25404514 NR Description: hypothetical protein F16G16.2 [imported] -
  misc_feature (1)..(326): Homolog of NCBI NO: 15217832 NR Description: G-protein beta-subunit (transducin) family
  misc_feature (1)..(326): Homolog of NCBI NO: 23306444 NR Description: Unknown protein [Arabidopsis thaliana]
MALVAGSYERFIWGFSLKTLTTPSATGASPSETLTLAPLFSYPAHTGPVRCVAAAPRAGLVASGGADNSVRLYDLPSAADLGPLLDPSAAVSALAFYSRGPVPRNLLAACDDGSLHIYDADGFALLSTLRAFPRHEAAEALAVHPSGRVALAVGRAGALAMLNLVRGRRSFACRLEHPASAIAYAEDRDGGDRFVMAAENKVSVHDSVDARVIHDMDCGKKVLAMAPAKSGVLYTGGEDRCITAWDLSSGKVSSRIEGAHATRVKGVVVFGNSNDGSQLSNLISSASSDGVIRIWDIRTIGNGKPTPLAEANTKARLTCLAGTSLK

SEQ ID NO: 4146 - protein, 202 aa, Zea mays subsp. mays
  peptide (1)..(202): Ceres Seq. ID no. 12414144
  misc_feature (38)..(202): Homolog of NCBI NO: 23019401 NR Description: hypothetical protein [Thermobifida fusca]
KLPPQTTGGGARASLCCHGSRRRLLRALHLGLLTQNPDNPLRHRRLALRDPDPRAALLVPGPHGPGALRGRGAAGGAGGLRRRGQLRPPLRPPFRRGPRPAPGPLGRRLRTRLLLPGPRAAEPPGRLRRRLAPHLRRRRLRAALHAPRLPAPRGRRGARRAPVGPGRARRRPRGGACHAQPRPRPTQLRMPPRAPCVRDRLR

SEQ ID NO: 4147 - DNA, 1404 bp, Zea mays subsp. mays
  misc_feature (1)..(1404): Ceres Seq. ID no. 12405937
  misc_feature: MA Experiment ID: 108523 Result: Up-regulated in Transcription
  misc_feature: MA Experiment 108523 PARAMETER Experiment Name: Zm_42deg_Heat_P Parameter: Age (day) Value: 8
  misc_feature: MA Experiment 108523 PARAMETER Experiment Name: Zm_42deg_Heat_P Parameter: Organism Value: Zea mays
  misc_feature: MA Experiment 108523 PARAMETER Experiment Name: Zm_42deg_Heat_P Parameter: Plant Line Value: 35A19
  misc_feature: MA Experiment 108523 PARAMETER Experiment Name: Zm_42deg_Heat_P Parameter: Temperature (deg C) Value: 42 vs. 22
  misc_feature: MA Experiment 108523 PARAMETER Experiment Name: Zm_42deg_Heat_P Parameter: Timepoint (hr) Value: 6
  misc_feature: MA Experiment 108523 PARAMETER Experiment Name: Zm_42deg_Heat_P Parameter: Tissue Value: Aerial
  misc_feature: MA Experiment ID: 108527 Result: Up-regulated in Transcription
  misc_feature: MA Experiment 108527 PARAMETER Experiment Name: Zm_5mM_NO_P Parameter: Age (day) Value: 8
  misc_feature: MA Experiment 108527 PARAMETER Experiment Name: Zm_5mM_NO_P Parameter: Organism Value: Zea mays
  misc_feature: MA Experiment 108527 PARAMETER Experiment Name: Zm_5mM_NO_P Parameter: Plant Line Value: 35A19
  misc_feature: MA Experiment 108527 PARAMETER Experiment Name: Zm_5mM_NO_P Parameter: Timepoint (hr) Value: 6
  misc_feature: MA Experiment 108527 PARAMETER Experiment Name: Zm_5mM_NO_P Parameter: Tissue Value: Aerial
  misc_feature: MA Experiment 108527 PARAMETER Experiment Name: Zm_5mM_NO_P Parameter: Treatment Value: 5mM NO vs. No Treatment
  misc_feature: MA Experiment ID: 108534 Result: Up-regulated in Transcription
  misc_feature: MA Experiment 108534 PARAMETER Experiment Name: Zm_4deg_Cold_P Parameter: Age (hr) Value: 8
  misc_feature: MA Experiment 108534 PARAMETER Experiment Name: Zm_4deg_Cold_P Parameter: Organism Value: Zea mays
  misc_feature: MA Experiment 108534 PARAMETER Experiment Name: Zm_4deg_Cold_P Parameter: Plant Line Value: 35A19
  misc_feature: MA Experiment 108534 PARAMETER Experiment Name: Zm_4deg_Cold_P Parameter: Temperature (deg C) Value: 4 vs. 22
  misc_feature: MA Experiment 108534 PARAMETER Experiment Name: Zm_4deg_Cold_P Parameter: Timepoint (hr) Value: 6
  misc_feature: MA Experiment 108534 PARAMETER Experiment Name: Zm_4deg_Cold_P Parameter: Tissue Value: Aerial
  misc_feature: MA Experiment ID: 108543 Result: Up-regulated in Transcription
  misc_feature: MA Experiment ID: 20001608 Result: Down-regulated in Transcription
  misc_feature: MA Experiment 20001608 PARAMETER Experiment Name: Zm_50ppm_KNO3_L-to-H_P Parameter: Age (day) Value: 21
  misc_feature: MA Experiment 20001608 PARAMETER Experiment Name: Zm_50ppm_KNO3_L-to-H_P Parameter: Organism Value: Zea mays
  misc_feature: MA Experiment 20001608 PARAMETER Experiment Name: Zm_50ppm_KNO3_L-to-H_P Parameter: Plant Line Value: 35A19
  misc_feature: MA Experiment 20001608 PARAMETER Experiment Name: Zm_50ppm_KNO3_L-to-H_P Parameter: Timepoint (hr) Value: 48
  misc_feature: MA Experiment 20001608 PARAMETER Experiment Name: Zm_50ppm_KNO3_L-to-H_P Parameter: Tissue Value: Shoots
  misc_feature: MA Experiment 20001608 PARAMETER Experiment Name: Zm_50ppm_KNO3_L-to-H_P Parameter: Treatment Value: 50ppm KNO3 vs. 50ppm KCl
acctttcgccgattccaccggccaccgtgccttcctccaccaccagccgcggcacacccgcggaaccgccgctcgagctcgcgcctgaaccccccaaactctgccaaatttcgccaaatccagccggtcggaccccgcaacacatcgccaaaaccaaccgggccggccgacacaagccgcagcccgtggcgatggacctggcgtcgagcgaccttgcggcgctgggcgcggcggagctggtccgcgtctcggcgtcgatcccgcgcgcggctccccgcaccttcgcgctgctcaccgcctgctctcgtcttcccgctctccttcgccgtgctcgcgcactccctcttcacccaccccatcctgctccgcatccagcgcgccacccactccgagctagcgcagtggctcaggctcttcgcctaccagttcctctacctcatcgtcctcttcaccttctccctcctctccaccgccgccgccgtcttcaccgtcgcctccctctacgccaacaagcccgcgtccatctcctcctcgctcaccgcgctgccccccatcctgccccgcctcctccgcaccttcctctgggtctcccttctcatgctcgcctaccacctcgtcttcgcgctcaccgtcctcctgctcatcgtcgtcttcatccccaacgcgtccgagtccgagtccgcgccgccctccctcgccttcgtactcttcctcgtcgtcgtcgtcttcgtcttcctcgggatccacgtctacatctccgcgctgtggcacctcgccagcgtcatctccgtgctcgagccgctctgcggactcgccgccatggccaagagcaaggatctgctccagggccgcaccggcaccgcagccacgcttgtcgtctcctacttcgcggtctgcggcgtcacctccgtgctgttccgtgccgccgtcgttaaggggcgcgccgaggaggggagcttcggtctggccttgcccgggcggctgcttgtcggcgccgtgctgctgtgcgttcttgtctgtgtcaatttgctgggactgctcgtgcagagcgtcttctactacgcctgcaaggccttccacaaccagcagattgaccggactgcgttgtatgagcaccttggagggtaccttggggagtacgtgccactcaagagcaatatccagatggagaacctttgagattggagcataggacaagggtaagttactcacctcattgcttcatactagcagtttcatgtggatctttatcagaatatgagtatggcttacaaggggctatctggtcttgttgattctagtaccatgtagtagtttataatctgtataagtggtaatgcacagtatggaaccaatctgtggaatggaagtatggaacagagatgcatgaacaaggttgccttt

SEQ ID NO: 4148 - protein, 392 aa, Zea mays subsp. mays
  peptide (1)..(392): Ceres Seq. ID no. 12405938
  misc_feature (8)..(62): Pfam Name: Extensin-like region Pfam Description: Extensin-like region
  misc_feature (234)..(391): Homolog of NCBI NO: 7485737 NR Description: hypothetical protein F18F4.50 - Arabidopsis
  misc_feature (102)..(336): Homolog of NCBI NO: 7485737 NR Description: hypothetical protein F18F4.50 - Arabidopsis
  misc_feature (101)..(392): Homolog of NCBI NO: 18397813 NR Description: expressed protein
  misc_feature (102)..(391): Homolog of NCBI NO: 30684945 NR Description: expressed protein [Arabidopsis thaliana]
  misc_feature (102)..(391): Homolog of NCBI NO: 15241607 NR Description: putative protein
  misc_feature (102)..(392): Homolog of NCBI NO: 34908936 NR Description: P0691E06.20 [Oryza sativa (japonica
TFRRFHRPPCLPPPPAAAHPRNRRSSSRLNPPNSAKFRQIQPVGPRNTSPKPTGPADTSRSPWRWTWRRATLRRWARRSWSASRRRSRARLPAPSRCSPPALVFPLSFAVLAHSLFTHPILLRIQRATHSELAQWLRLFAYQFLYLIVLFTFSLLSTAAAVFTVASLYANKPASISSSLTALPPILPRLLRTFLWVSLLMLAYHLVFALTVLLLIVVFIPNASESESAPPSLAFVLFLVVVVFVFLGIHVYISALWHLASVISVLEPLCGLAAMAKSKDLLQGRTGTAATLVVSYFAVCGVTSVLFRAAVVKGRAEEGSFGLALPGRLLVGAVLLCVLVCVNLLGLLVQSVFYYACKAFHNQQIDRTALYEHLGGYLGEYVPLKSNIQMENL

SEQ ID NO: 4149 - protein, 310 aa, Zea mays subsp. mays
  peptide (1)..(310): Ceres Seq. ID no. 12405939
  misc_feature (2)..(45): Homolog of NCBI NO: 1076802 NR Description: extensin-like protein - maize
  misc_feature (64)..(98): Homolog of NCBI NO: 15241607 NR Description: putative protein
  misc_feature (64)..(99): Homolog of NCBI NO: 34908936 NR Description: P0691E06.20 [Oryza sativa (japonica
LSPIPPATVPSSTTSRGTPAEPPLELAPEPPKLCQISPNPAGRTPQHIAKTNRAGRHKPQPVAMDLASSDLAALGAAELVRVSASIPRAAPRTFALLTACSRLPALLRRARALPLHPPHPAPHPARHPLRASAVAQALRLPVPLPHRPLHLLPPLHRRRRLHRRLPLRQQARVHLLLAHRAAPHPAPPPPHLPLGLPSHARLPPRLRAHRPPAHRRLHPQRVRVRVRAALPRLRTLPRRRRLRLPRDPRLHLRAVAPRQRHLRARAALRTRRHGQEQGSAPGPHRHRSHACRLLLRGLRRHLRAVPCRRR

SEQ ID NO: 4150 - protein, 247 aa, Zea mays subsp. mays
  peptide (1)..(247): Ceres Seq. ID no. 12405940
  misc_feature (1)..(35): Homolog of NCBI NO: 15241607 NR Description: putative protein
  misc_feature (1)..(36): Homolog of NCBI NO: 34908936 NR Description: P0691E06.20 [Oryza sativa (japonica
MDLASSDLAALGAAELVRVSASIPRAAPRTFALLTACSRLPALLRRARALPLHPPHPAPHPARHPLRASAVAQALRLPVPLPHRPLHLLPPLHRRRRLHRRLPLRQQARVHLLLAHRAAPHPAPPPPHLPLGLPSHARLPPRLRAHRPPAHRRLHPQRVRVRVRAALPRLRTLPRRRRLRLPRDPRLHLRAVAPRQRHLRARAALRTRRHGQEQGSAPGPHRHRSHACRLLLRGLRRHLRAVPCRRR

SEQ ID NO: 4151 - DNA, 1016 bp, Zea mays subsp. mays
  misc_feature (1)..(1016): Ceres Seq. ID no. 13501199
  misc_feature: MA Experiment ID: 108528 Result: Up-regulated in Transcription
  misc_feature: MA Experiment 108528 PARAMETER Experiment Name: Zm_Imbibed_Seeds_P Parameter: Age (day) Value: 5 vs. 2
  misc_feature: MA Experiment 108528 PARAMETER Experiment Name: Zm_Imbibed_Seeds_P Parameter: Organism Value: Zea mays
  misc_feature: MA Experiment 108528 PARAMETER Experiment Name: Zm_Imbibed_Seeds_P Parameter: Plant Line Value: 35A19
  misc_feature: MA Experiment 108528 PARAMETER Experiment Name: Zm_Imbibed_Seeds_P Parameter: Tissue Value: Aerial vs. Embryo
  misc_feature: MA Experiment ID: 108529 Result: Down-regulated in Transcription
  misc_feature: MA Experiment 108529 PARAMETER Experiment Name: Zm_Imbibed_Seeds_P Parameter: Age (day) Value: 5 vs. 2
  misc_feature: MA Experiment 108529 PARAMETER Experiment Name: Zm_Imbibed_Seeds_P Parameter: Organism Value: Zea mays
  misc_feature: MA Experiment 108529 PARAMETER Experiment Name: Zm_Imbibed_Seeds_P Parameter: Plant Line Value: 35A19
  misc_feature: MA Experiment 108529 PARAMETER Experiment Name: Zm_Imbibed_Seeds_P Parameter: Tissue Value: Roots vs. Embryo
  misc_feature: MA Experiment ID: 108530 Result: Up-regulated in Transcription
  misc_feature: MA Experiment 108530 PARAMETER Experiment Name: Zm_Imbibed_Seeds_P Parameter: Age (day) Value: 6 vs. 2
  misc_feature: MA Experiment 108530 PARAMETER Experiment Name: Zm_Imbibed_Seeds_P Parameter: Organism Value: Zea mays
  misc_feature: MA Experiment 108530 PARAMETER Experiment Name: Zm_Imbibed_Seeds_P Parameter: Plant Line Value: 35A19
  misc_feature: MA Experiment 108530 PARAMETER Experiment Name: Zm_Imbibed_Seeds_P Parameter: Tissue Value: Aerial vs. Embryo
  misc_feature: MA Experiment ID: 108535 Result: Down-regulated in Transcription
  misc_feature: MA Experiment 108535 PARAMETER Experiment Name: Zm_Meristem_P Parameter: Age (day) Value: 8
  misc_feature: MA Experiment 108535 PARAMETER Experiment Name: Zm_Meristem_P Parameter: Organism Value: Zea mays
  misc_feature: MA Experiment 108535 PARAMETER Experiment Name: Zm_Meristem_P Parameter: Plant Line Value: 35A19
  misc_feature: MA Experiment 108535 PARAMETER Experiment Name: Zm_Meristem_P Parameter: Tissue Value: Root Meristem vs. Above Root Meristem
  misc_feature: MA Experiment ID: 108543 Result: Up-regulated in Transcription
  misc_feature: MA Experiment ID: 108545 Result: Up-regulated in Transcription
  misc_feature: MA Experiment 108545 PARAMETER Experiment Name: Zm_Imbibed_Seeds_P Parameter: Age (day) Value: 3 vs. 2
  misc_feature: MA Experiment 108545 PARAMETER Experiment Name: Zm_Imbibed_Seeds_P Parameter: Organism Value: Zea mays
  misc_feature: MA Experiment 108545 PARAMETER Experiment Name: Zm_Imbibed_Seeds_P Parameter: Plant Line Value: 35A19
  misc_feature: MA Experiment 108545 PARAMETER Experiment Name: Zm_Imbibed_Seeds_P Parameter: Tissue Value: Aerial vs. Embryo
  misc_feature: MA Experiment ID: 108546 Result: Down-regulated in Transcription
  misc_feature: MA Experiment 108546 PARAMETER Experiment Name: Zm_Imbibed_Seeds_P Parameter: Age (day) Value: 3 vs. 2
  misc_feature: MA Experiment 108546 PARAMETER Experiment Name: Zm_Imbibed_Seeds_P Parameter: Organism Value: Zea mays
  misc_feature: MA Experiment 108546 PARAMETER Experiment Name: Zm_Imbibed_Seeds_P Parameter: Plant Line Value: 35A19
  misc_feature: MA Experiment 108546 PARAMETER Experiment Name: Zm_Imbibed_Seeds_P Parameter: Tissue Value: Roots vs. Embryo
  misc_feature: MA Experiment ID: 108547 Result: Up-regulated in Transcription
  misc_feature: MA Experiment 108547 PARAMETER Experiment Name: Zm_Imbibed_Seeds_P Parameter: Age (day) Value: 4 vs. 2
  misc_feature: MA Experiment 108547 PARAMETER Experiment Name: Zm_Imbibed_Seeds_P Parameter: Organism Value: Zea mays
  misc_feature: MA Experiment 108547 PARAMETER Experiment Name: Zm_Imbibed_Seeds_P Parameter: Plant Line Value: 35A19
  misc_feature: MA Experiment 108547 PARAMETER Experiment Name: Zm_Imbibed_Seeds_P Parameter: Tissue Value: Aerial vs. Embryo
  misc_feature: MA Experiment ID: 108687 Result: Down-regulated in Transcription
  misc_feature: MA Experiment 108687 PARAMETER Experiment Name: Zm_Embryos-Flowers__P Parameter: Tissue Value: Embryo vs. Aerial+
  misc_feature: MA Experiment ID: 20000535 Result: Down-regulated in Transcription
  misc_feature: MA Experiment 20000535 PARAMETER Experiment Name: Zm_Hybrid_Seed_Dev_P Parameter: DAP Value: 30 vs. 12
  misc_feature: MA Experiment 20000535 PARAMETER Experiment Name: Zm_Hybrid_Seed_Dev_P Parameter: Organism Value: Zea mays
  misc_feature: MA Experiment 20000535 PARAMETER Experiment Name: Zm_Hybrid_Seed_Dev_P Parameter: Plant Line Value: 35A19
  misc_feature: MA Experiment 20000535 PARAMETER Experiment Name: Zm_Hybrid_Seed_Dev_P Parameter: Tissue Value: Embryo vs. Unfert Floret
  misc_feature: MA Experiment ID: 20001608 Result: Up-regulated in Transcription
  misc_feature: MA Experiment 20001608 PARAMETER Experiment Name: Zm_50ppm_KNO3_L-to-H_P Parameter: Age (day) Value: 21
  misc_feature: MA Experiment 20001608 PARAMETER Experiment Name: Zm_50ppm_KNO3_L-to-H_P Parameter: Organism Value: Zea mays
  misc_feature: MA Experiment 20001608 PARAMETER Experiment Name: Zm_50ppm_KNO3_L-to-H_P Parameter: Plant Line Value: 35A19
  misc_feature: MA Experiment 20001608 PARAMETER Experiment Name: Zm_50ppm_KNO3_L-to-H_P Parameter: Timepoint (hr) Value: 48
  misc_feature: MA Experiment 20001608 PARAMETER Experiment Name: Zm_50ppm_KNO3_L-to-H_P Parameter: Tissue Value: Shoots
  misc_feature: MA Experiment 20001608 PARAMETER Experiment Name: Zm_50ppm_KNO3_L-to-H_P Parameter: Treatment Value: 50ppm KNO3 vs. 50ppm KCl
cataggttgctaggctcggccgtgtagagcagcaagagcacgccgcgccaagcaacaaagagggaccccgcttccatggaggtggtgggcggcgtgtcgctgaggccgtcgccagcgccggcgcgtatccggactaccctgccacccgtcgacgtaggcggacgcttccttctccgccgggtcgcggggcgccagccggcgaggcgcgcgctggtcgtggaggcccggggcggcaggggctggtcggagcggcagatgcagcagcagcgccgcgcgccgctgctgccgaaaatcgaggacgacggcaacccgcgattcgtcatcttcatccgcaccgccaatgtctacttctggtacccgctcaacatcatcacgggcggtacgacggcgaagatcatgctcgccgccaaggacaacttcctcggcaagtacatctacaaggacacgctcgccaggaacctcgccgccgtcatttacaaagacgaggacgtgatcatagacacagcgaaagagcagtaccgtgtgctcaagaccgaaaatcagtttcggtatggctacaaagttgtggagaaagggaacataaggtctgctctgacgacaagcaatgtgatcgaacttccaaagaaggacgagctcaaaaccgtggttgacaaggtgaaggacttctttggcgacgtgactgccggcgccaaagaatcctttgcgcagataacagggtctgctgtcagcaaggaggaagaggaagcagagagcaaagagaagttccgctccaagagacgaaagaagcagcggaagtcgaaggagggcctcaagacggagaaatgattcagtcagtcacacaagtaaagcaccggctgtagtttcgctatcgatgtccgagaactgttctgtaatttctccagcttccttttttttgtttgttttgtaaaaagacgtcgtgtaacttcattgcgactaacgtgtgctatgccttctcagtaaatctcacaaaatgtgaaggtactccctacgttctc

SEQ ID NO: 4152 - protein, 249 aa, Zea mays subsp. mays
  peptide (1)..(249): Ceres Seq. ID no. 13501200
  misc_feature (40)..(135): Homolog of NCBI NO: 11072026 NR Description: F12A21.16 [Arabidopsis thaliana]
  misc_feature (133)..(229): Homolog of NCBI NO: 11072026 NR Description: F12A21.16 [Arabidopsis thaliana]
  misc_feature (40)..(229): Homolog of NCBI NO: 30697554 NR Description: auxin-regulated protein [Arabidopsis thaliana]
  misc_feature (40)..(232): Homolog of NCBI NO: 30697556 NR Description: auxin-regulated protein [Arabidopsis thaliana]
MEVVGGVSLRPSPAPARIRTTLPPVDVGGRFLLRRVAGRQPARRALVVEARGGRGWSERQMQQQRRAPLLPKIEDDGNPRFVIFIRTANVYFWYPLNIITGGTTAKIMLAAKDNFLGKYIYKDTLARNLAAVIYKDEDVIIDTAKEQYRVLKTENQFRYGYKVVEKGNIRSALTTSNVIELPKKDELKTVVDKVKDFFGDVTAGAKESFAQITGSAVSKEEEEAESKEKFRSKRRKKQRKSKEGLKTEK

SEQ ID NO: 4153 - protein, 189 aa, Zea mays subsp. mays
  peptide (1)..(189): Ceres Seq. ID no. 13501201
  misc_feature (1)..(75): Homolog of NCBI NO: 11072026 NR Description: F12A21.16 [Arabidopsis thaliana]
  misc_feature (73)..(169): Homolog of NCBI NO: 11072026 NR Description: F12A21.16 [Arabidopsis thaliana]
  misc_feature (1)..(169): Homolog of NCBI NO: 30697554 NR Description: auxin-regulated protein [Arabidopsis thaliana]
  misc_feature (1)..(172): Homolog of NCBI NO: 30697556 NR Description: auxin-regulated protein [Arabidopsis thaliana]
MQQQRRAPLLPKIEDDGNPRFVIFIRTANVYFWYPLNIITGGTTAKIMLAAKDNFLGKYIYKDTLARNLAAVIYKDEDVIIDTAKEQYRVLKTENQFRYGYKVVEKGNIRSALTTSNVIELPKKDELKTVVDKVKDFFGDVTAGAKESFAQITGSAVSKEEEEAESKEKFRSKRRKKQRKSKEGLKTEK

SEQ ID NO: 4154 - protein, 142 aa, Zea mays subsp. mays
  peptide (1)..(142): Ceres Seq. ID no. 13501202
  misc_feature (1)..(28): Homolog of NCBI NO: 11072026 NR Description: F12A21.16 [Arabidopsis thaliana]
  misc_feature (26)..(122): Homolog of NCBI NO: 11072026 NR Description: F12A21.16 [Arabidopsis thaliana]
  misc_feature (1)..(122): Homolog of NCBI NO: 30697554 NR Description: auxin-regulated protein [Arabidopsis thaliana]
  misc_feature (1)..(125): Homolog of NCBI NO: 30697556 NR Description: auxin-regulated protein [Arabidopsis thaliana]
MLAAKDNFLGKYIYKDTLARNLAAVIYKDEDVIIDTAKEQYRVLKTENQFRYGYKVVEKGNIRSALTTSNVIELPKKDELKTVVDKVKDFFGDVTAGAKESFAQITGSAVSKEEEEAESKEKFRSKRRKKQRKSKEGLKTEK

SEQ ID NO: 4155 - DNA, 1521 bp, Zea mays subsp. mays
  misc_feature (1)..(1521): Ceres Seq. ID no. 13495297
  misc_feature: MA Experiment ID: 108523 Result: Down-regulated in Transcription
  misc_feature: MA Experiment 108523 PARAMETER Experiment Name: Zm_42deg_Heat_P Parameter: Age (day) Value: 8
  misc_feature: MA Experiment 108523 PARAMETER Experiment Name: Zm_42deg_Heat_P Parameter: Organism Value: Zea mays
  misc_feature: MA Experiment 108523 PARAMETER Experiment Name: Zm_42deg_Heat_P Parameter: Plant Line Value: 35A19
  misc_feature: MA Experiment 108523 PARAMETER Experiment Name: Zm_42deg_Heat_P Parameter: Temperature (deg C) Value: 42 vs. 22
  misc_feature: MA Experiment 108523 PARAMETER Experiment Name: Zm_42deg_Heat_P Parameter: Timepoint (hr) Value: 6
  misc_feature: MA Experiment 108523 PARAMETER Experiment Name: Zm_42deg_Heat_P Parameter: Tissue Value: Aerial
  misc_feature: MA Experiment ID: 108527 Result: Down-regulated in Transcription
  misc_feature: MA Experiment 108527 PARAMETER Experiment Name: Zm_5mM_NO_P Parameter: Age (day) Value: 8
  misc_feature: MA Experiment 108527 PARAMETER Experiment Name: Zm_5mM_NO_P Parameter: Organism Value: Zea mays
  misc_feature: MA Experiment 108527 PARAMETER Experiment Name: Zm_5mM_NO_P Parameter: Plant Line Value: 35A19
  misc_feature: MA Experiment 108527 PARAMETER Experiment Name: Zm_5mM_NO_P Parameter: Timepoint (hr) Value: 6
  misc_feature: MA Experiment 108527 PARAMETER Experiment Name: Zm_5mM_NO_P Parameter: Tissue Value: Aerial
  misc_feature: MA Experiment 108527 PARAMETER Experiment Name: Zm_5mM_NO_P Parameter: Treatment Value: 5mM NO vs. No Treatment
  misc_feature: MA Experiment ID: 108528 Result: Up-regulated in Transcription
  misc_feature: MA Experiment 108528 PARAMETER Experiment Name: Zm_Imbibed_Seeds_P Parameter: Age (day) Value: 5 vs. 2
  misc_feature: MA Experiment 108528 PARAMETER Experiment Name: Zm_Imbibed_Seeds_P Parameter: Organism Value: Zea mays
  misc_feature: MA Experiment 108528 PARAMETER Experiment Name: Zm_Imbibed_Seeds_P Parameter: Plant Line Value: 35A19
  misc_feature: MA Experiment 108528 PARAMETER Experiment Name: Zm_Imbibed_Seeds_P Parameter: Tissue Value: Aerial vs. Embryo
  misc_feature: MA Experiment ID: 108529 Result: Down-regulated in Transcription
  misc_feature: MA Experiment 108529 PARAMETER Experiment Name: Zm_Imbibed_Seeds_P Parameter: Age (day) Value: 5 vs. 2
  misc_feature: MA Experiment 108529 PARAMETER Experiment Name: Zm_Imbibed_Seeds_P Parameter: Organism Value: Zea mays
  misc_feature: MA Experiment 108529 PARAMETER Experiment Name: Zm_Imbibed_Seeds_P Parameter: Plant Line Value: 35A19
  misc_feature: MA Experiment 108529 PARAMETER Experiment Name: Zm_Imbibed_Seeds_P Parameter: Tissue Value: Roots vs. Embryo
  misc_feature: MA Experiment ID: 108530 Result: Up-regulated in Transcription
  misc_feature: MA Experiment 108530 PARAMETER Experiment Name: Zm_Imbibed_Seeds_P Parameter: Age (day) Value: 6 vs. 2
  misc_feature: MA Experiment 108530 PARAMETER Experiment Name: Zm_Imbibed_Seeds_P Parameter: Organism Value: Zea mays
  misc_feature: MA Experiment 108530 PARAMETER Experiment Name: Zm_Imbibed_Seeds_P Parameter: Plant Line Value: 35A19
  misc_feature: MA Experiment 108530 PARAMETER Experiment Name: Zm_Imbibed_Seeds_P Parameter: Tissue Value: Aerial vs. Embryo
  misc_feature: MA Experiment ID: 108536 Result: Down-regulated in Transcription
  misc_feature: MA Experiment 108536 PARAMETER Experiment Name: Zm_Meristem_P Parameter: Age (day) Value: 8
  misc_feature: MA Experiment 108536 PARAMETER Experiment Name: Zm_Meristem_P Parameter: Organism Value: Zea mays
  misc_feature: MA Experiment 108536 PARAMETER Experiment Name: Zm_Meristem_P Parameter: Plant Line Value: 35A19
  misc_feature: MA Experiment 108536 PARAMETER Experiment Name: Zm_Meristem_P Parameter: Tissue Value: Shoot Meristem vs. Above Shoot Meristem
  misc_feature: MA Experiment ID: 108543 Result: Up-regulated in Transcription
  misc_feature: MA Experiment ID: 108545 Result: Up-regulated in Transcription
  misc_feature: MA Experiment 108545 PARAMETER Experiment Name: Zm_Imbibed_Seeds_P Parameter: Age (day) Value: 3 vs. 2
  misc_feature: MA Experiment 108545 PARAMETER Experiment Name: Zm_Imbibed_Seeds_P Parameter: Organism Value: Zea mays
  misc_feature: MA Experiment 108545 PARAMETER Experiment Name: Zm_Imbibed_Seeds_P Parameter: Plant Line Value: 35A19
  misc_feature: MA Experiment 108545 PARAMETER Experiment Name: Zm_Imbibed_Seeds_P Parameter: Tissue Value: Aerial vs. Embryo
  misc_feature: MA Experiment ID: 108546 Result: Down-regulated in Transcription
  misc_feature: MA Experiment 108546 PARAMETER Experiment Name: Zm_Imbibed_Seeds_P Parameter: Age (day) Value: 3 vs. 2
  misc_feature: MA Experiment 108546 PARAMETER Experiment Name: Zm_Imbibed_Seeds_P Parameter: Organism Value: Zea mays
  misc_feature: MA Experiment 108546 PARAMETER Experiment Name: Zm_Imbibed_Seeds_P Parameter: Plant Line Value: 35A19
  misc_feature: MA Experiment 108546 PARAMETER Experiment Name: Zm_Imbibed_Seeds_P Parameter: Tissue Value: Roots vs. Embryo
  misc_feature: MA Experiment ID: 108547 Result: Up-regulated in Transcription
  misc_feature: MA Experiment 108547 PARAMETER Experiment Name: Zm_Imbibed_Seeds_P Parameter: Age (day) Value: 4 vs. 2
  misc_feature: MA Experiment 108547 PARAMETER Experiment Name: Zm_Imbibed_Seeds_P Parameter: Organism Value: Zea mays
  misc_feature: MA Experiment 108547 PARAMETER Experiment Name: Zm_Imbibed_Seeds_P Parameter: Plant Line Value: 35A19
  misc_feature: MA Experiment 108547 PARAMETER Experiment Name: Zm_Imbibed_Seeds_P Parameter: Tissue Value: Aerial vs. Embryo
  misc_feature: MA Experiment ID: 108559 Result: Down-regulated in Transcription
  misc_feature: MA Experiment 108559 PARAMETER Experiment Name: Zm_5mM_NO_P Parameter: Age (day) Value: 8
  misc_feature: MA Experiment 108559 PARAMETER Experiment Name: Zm_5mM_NO_P Parameter: Organism Value: Zea mays
  misc_feature: MA Experiment 108559 PARAMETER Experiment Name: Zm_5mM_NO_P Parameter: Plant Line Value: 35A19
  misc_feature: MA Experiment 108559 PARAMETER Experiment Name: Zm_5mM_NO_P Parameter: Timepoint (hr) Value: 12
  misc_feature: MA Experiment 108559 PARAMETER Experiment Name: Zm_5mM_NO_P Parameter: Tissue Value: Aerial
  misc_feature: MA Experiment 108559 PARAMETER Experiment Name: Zm_5mM_NO_P Parameter: Treatment Value: 5mM NO vs. No Treatment
  misc_feature: MA Experiment ID: 20000478 Result: Down-regulated in Transcription
  misc_feature: MA Experiment 20000478 PARAMETER Experiment Name: Zm_5mM_SA_P Parameter: Age (day) Value: 11
  misc_feature: MA Experiment 20000478 PARAMETER Experiment Name: Zm_5mM_SA_P Parameter: Organism Value: Zea mays
  misc_feature: MA Experiment 20000478 PARAMETER Experiment Name: Zm_5mM_SA_P Parameter: Plant Line Value: 35A19
  misc_feature: MA Experiment 20000478 PARAMETER Experiment Name: Zm_5mM_SA_P Parameter: Timepoint (hr) Value: 72
  misc_feature: MA Experiment 20000478 PARAMETER Experiment Name: Zm_5mM_SA_P Parameter: Tissue Value: Aerial
  misc_feature: MA Experiment 20000478 PARAMETER Experiment Name: Zm_5mM_SA_P Parameter: Treatment Value: 5mM SA vs. No Treatment
  misc_feature: MA Experiment ID: 20000480 Result: Down-regulated in Transcription
  misc_feature: MA Experiment 20000480 PARAMETER Experiment Name: Zm_Drought_P Parameter: Age (day) Value: 11
  misc_feature: MA Experiment 20000480 PARAMETER Experiment Name: Zm_Drought_P Parameter: Organism Value: Zea mays
  misc_feature: MA Experiment 20000480 PARAMETER Experiment Name: Zm_Drought_P Parameter: Plant Line Value: 35A19
  misc_feature: MA Experiment 20000480 PARAMETER Experiment Name: Zm_Drought_P Parameter: Timepoint (hr) Value: 72
  misc_feature: MA Experiment 20000480 PARAMETER Experiment Name: Zm_Drought_P Parameter: Tissue Value: Aerial
  misc_feature: MA Experiment 20000480 PARAMETER Experiment Name: Zm_Drought_P Parameter: Treatment Value: Drought vs. No Drought
  misc_feature: MA Experiment ID: 20000626 Result: Down-regulated in Transcription
  misc_feature: MA Experiment 20000626 PARAMETER Experiment Name: Zm_Herbicide-Treatments_P Parameter: Timepoint (hr) Value: 12
  misc_feature: MA Experiment 20000626 PARAMETER Experiment Name: Zm_Herbicide-Treatments_P Parameter: Tissue Value: Aerial
  misc_feature: MA Experiment 20000626 PARAMETER Experiment Name: Zm_Herbicide-Treatments_P Parameter: Treatment Value: Roundup vs. No Treatment
acggaagaagcgttttgccagtccatccacccaagcgaggcgaccgaggctggcctcttcgcctatcacccgaaacaagattagattagagatagcaaaaggcgaagcgacgggtaaccgccaccaccaaatcgctaccgccaatccgccatgatgctcccgacggccaccgcgacggccgtcttcctcaccgcggcgccttcctctttctccacccgccgtcggcgcagtcgcgccatcttcgcatccctttcgccgtccttctcctcctcggaggagccgctgctggtgcgcgcggcgcggggcgaggacggcctcccacgcccgcccgcgtggatgatgcggcaggcagggcggtacatggcggagtaccaggcgctggccaagcgccacccctcgttccgggagcgctccgagaacacggacctcatcgtcgagatcacgctgcagccgtggcgtgccttcgcgcccgacggcgtcatcctgttctcggacatactcacgcccctgccggccatcggggtgccgttcgatatctcggactccaaggggcccgtgatccaatcgccagtacggtccaaagagcaggtgagggagctcgtccccatcgaccttgatatgctccagttcgtcggggagtcactaaagattctgcgaaatgagattgatggaaaagctgctttgctaggatttgtgggggccccatggacaattgcaacttacattgttgaaggggggatgaccaatacgtacacaaatataaagagcatgtgccatacagctccagatgtcttgaagggtcttctctctcaccttgcacaggccatatctgactatatcatttaccaagttaactcgggggcccagtgtatacagatatttgattcatggggtggacagcttccacctcatgtgtgggagcagtggtcaaaaccatatatcaaacagattgtgagtaggattaagaaagagtgccctaatgtaccccttgtgttgtatataaatggaaatggaggtttacttgagcgcatgaagaacacaggagctgatgttattgggcttgactggacagtggacatgactgatggaaggaggcgccttggtaatggcattagtgtacaagggaatgtggatccagcatttttgttctcaccattaccagtactgactgatgaaattcatagggttgtgaaagcagctggtccaaaaggtcatatacttaatctgggctgtacttcagaaaacacccgaagaagctgtagcacatttctttgatgtcacaaggcgcttgagatatgacacccttttccaaggttctgttgctgaagaattgcatcacgttgcttgacaacggcaatgacattcccatttttcatcaagtggtgtatttgatctgtcatatcatcttagagtcgtagtagattcctagtgttgcctgcattctacctttcaagagagactcattttcttaagcctgtatatgtattgcagagataccggcggcaaatctagtgcaatttt

SEQ ID NO: 4156 - protein, 374 aa, Zea mays subsp. mays
  peptide (1)..(374): Ceres Seq. ID no. 13495298
  misc_feature (41)..(360): Pfam Name: Uroporphyrinogen decarboxylase (URO-D) Pfam Description: Uroporphyrinogen decarboxylase (URO-D)
  misc_feature (5)..(360): Homolog of NCBI NO: 34912796 NR Description: putative uroporphyrinogen decarboxylase [Oryza
  misc_feature (39)..(360): Homolog of NCBI NO: 16323119 NR Description: AT3g14930/K15M2_7 [Arabidopsis thaliana]
  misc_feature (39)..(360): Homolog of NCBI NO: 18400577 NR Description: uroporphyrinogen decarboxylase (UPD), putative thaliana] >gi|30683381|ref|NP_850587.1| uroporphyrinogen
  misc_feature (63)..(360): Homolog of NCBI NO: 8777476 NR Description: uroporphyrinogen decarboxylase [Arabidopsis >gi|22531275|gb|AAM97141.1| putative uroporphyrinogen
  misc_feature (41)..(360): Homolog of NCBI NO: 23041382 NR Description: hypothetical protein [Trichodesmium erythraeum
  misc_feature (39)..(360): Homolog of NCBI NO: 14334768 NR Description: putative uroporphyrinogen decarboxylase
  misc_feature (39)..(360): Homolog of NCBI NO: 15226690 NR Description: uroporphyrinogen decarboxylase (UPD), putative thaliana] >gi|6014937|sp|O22886|DCUP_ARATH Uroporphyrinogen
  misc_feature (16)..(360): Homolog of NCBI NO: 2501647 NR Description: Uroporphyrinogen decarboxylase, chloroplast
  misc_feature (36)..(360): Homolog of NCBI NO: 16975230 NR Description: Chain A, Crystal Structure And Substrate Binding
  misc_feature (44)..(360): Homolog of NCBI NO: 33240529 NR Description: Uroporphyrinogen decarboxylase [Prochlorococcus subsp. marinus str. CCMP1375] >gi|33238057|gb|AAQ00124.1| decarboxylase [Prochlorococcus marinus subsp. marinus str.
MMLPTATATAVFLTAAPSSFSTRRRRSRAIFASLSPSFSSSEEPLLVRAARGEDGLPRPPAWMMRQAGRYMAEYQALAKRHPSFRERSENTDLIVEITLQPWRAFAPDGVILFSDILTPLPAIGVPFDISDSKGPVIQSPVRSKEQVRELVPIDLDMLQFVGESLKILRNEIDGKAALLGFVGAPWTIATYIVEGGMTNTYTNIKSMCHTAPDVLKGLLSHLAQAISDYIIYQVNSGAQCIQIFDSWGGQLPPHVWEQWSKPYIKQIVSRIKKECPNVPLVLYINGNGGLLERMKNTGADVIGLDWTVDMTDGRRRLGNGISVQGNVDPAFLFSPLPVLTDEIHRVVKAAGPKGHILNLGCTSENTRRSCSTFL

SEQ ID NO: 4157 - protein, 373 aa, Zea mays subsp. mays
  peptide (1)..(373): Ceres Seq. ID no. 13495299
  misc_feature (40)..(359): Pfam Name: Uroporphyrinogen decarboxylase (URO-D) Pfam Description: Uroporphyrinogen decarboxylase (URO-D)
  misc_feature (4)..(359): Homolog of NCBI NO: 34912796 NR Description: putative uroporphyrinogen decarboxylase [Oryza
  misc_feature (38)..(359): Homolog of NCBI NO: 16323119 NR Description: AT3g14930/K15M2_7 [Arabidopsis thaliana]
  misc_feature (38)..(359): Homolog of NCBI NO: 18400577 NR Description: uroporphyrinogen decarboxylase (UPD), putative thaliana] >gi|30683381|ref|NP_850587.1| uroporphyrinogen
  misc_feature (62)..(359): Homolog of NCBI NO: 8777476 NR Description: uroporphyrinogen decarboxylase [Arabidopsis >gi|22531275|gb|AAM97141.1| putative uroporphyrinogen
  misc_feature (40)..(359): Homolog of NCBI NO: 23041382 NR Description: hypothetical protein [Trichodesmium erythraeum
  misc_feature (38)..(359): Homolog of NCBI NO: 14334768 NR Description: putative uroporphyrinogen decarboxylase
  misc_feature (38)..(359): Homolog of NCBI NO: 15226690 NR Description: uroporphyrinogen decarboxylase (UPD), putative thaliana] >gi|6014937|sp|O22886|DCUP_ARATH Uroporphyrinogen
  misc_feature (15)..(359): Homolog of NCBI NO: 2501647 NR Description: Uroporphyrinogen decarboxylase, chloroplast
  misc_feature (35)..(359): Homolog of NCBI NO: 16975230 NR Description: Chain A, Crystal Structure And Substrate Binding
  misc_feature (43)..(359): Homolog of NCBI NO: 33240529 NR Description: Uroporphyrinogen decarboxylase [Prochlorococcus subsp. marinus str. CCMP1375] >gi|33238057|gb|AAQ00124.1| decarboxylase [Prochlorococcus marinus subsp. marinus str.
MLPTATATAVFLTAAPSSFSTRRRRSRAIFASLSPSFSSSEEPLLVRAARGEDGLPRPPAWMMRQAGRYMAEYQALAKRHPSFRERSENTDLIVEITLQPWRAFAPDGVILFSDILTPLPAIGVPFDISDSKGPVIQSPVRSKEQVRELVPIDLDMLQFVGESLKILRNEIDGKAALLGFVGAPWTIATYIVEGGMTNTYTNIKSMCHTAPDVLKGLLSHLAQAISDYIIYQVNSGAQCIQIFDSWGGQLPPHVWEQWSKPYIKQIVSRIKKECPNVPLVLYINGNGGLLERMKNTGADVIGLDWTVDMTDGRRRLGNGISVQGNVDPAFLFSPLPVLTDEIHRVVKAAGPKGHILNLGCTSENTRRSCSTFL

SEQ ID NO: 4158 - protein, 312 aa, Zea mays subsp. mays
  peptide (1)..(312): Ceres Seq. ID no. 13495300
  misc_feature (1)..(298): Pfam Name: Uroporphyrinogen decarboxylase (URO-D) Pfam Description: Uroporphyrinogen decarboxylase (URO-D)
  misc_feature (1)..(298): Homolog of NCBI NO: 34912796 NR Description: putative uroporphyrinogen decarboxylase [Oryza
  misc_feature (1)..(298): Homolog of NCBI NO: 16323119 NR Description: AT3g14930/K15M2_7 [Arabidopsis thaliana]
  misc_feature (1)..(298): Homolog of NCBI NO: 18400577 NR Description: uroporphyrinogen decarboxylase (UPD), putative thaliana] >gi|30683381|ref|NP_850587.1| uroporphyrinogen
  misc_feature (1)..(298): Homolog of NCBI NO: 8777476 NR Description: uroporphyrinogen decarboxylase [Arabidopsis >gi|22531275|gb|AAM97141.1| putative uroporphyrinogen
  misc_feature (1)..(298): Homolog of NCBI NO: 23041382 NR Description: hypothetical protein [Trichodesmium erythraeum
  misc_feature (1)..(298): Homolog of NCBI NO: 14334768 NR Description: putative uroporphyrinogen decarboxylase
  misc_feature (1)..(298): Homolog of NCBI NO: 15226690 NR Description: uroporphyrinogen decarboxylase (UPD), putative thaliana] >gi|6014937|sp|O22886|DCUP_ARATH Uroporphyrinogen
  misc_feature (1)..(298): Homolog of NCBI NO: 2501647 NR Description: Uroporphyrinogen decarboxylase, chloroplast
  misc_feature (1)..(298): Homolog of NCBI NO: 16975230 NR Description: Chain A, Crystal Structure And Substrate Binding
  misc_feature (1)..(298): Homolog of NCBI NO: 33240529 NR Description: Uroporphyrinogen decarboxylase [Prochlorococcus subsp. marinus str. CCMP1375] >gi|33238057|gb|AAQ00124.1| decarboxylase [Prochlorococcus marinus subsp. marinus str.
MMRQAGRYMAEYQALAKRHPSFRERSENTDLIVEITLQPWRAFAPDGVILFSDILTPLPAIGVPFDISDSKGPVIQSPVRSKEQVRELVPIDLDMLQFVGESLKILRNEIDGKAALLGFVGAPWTIATYIVEGGMTNTYTNIKSMCHTAPDVLKGLLSHLAQAISDYIIYQVNSGAQCIQIFDSWGGQLPPHVWEQWSKPYIKQIVSRIKKECPNVPLVLYINGNGGLLERMKNTGADVIGLDWTVDMTDGRRRLGNGISVQGNVDPAFLFSPLPVLTDEIHRVVKAAGPKGHILNLGCTSENTRRSCSTFL

SEQ ID NO: 4159 - DNA, 655 bp, Zea mays subsp. mays
  misc_feature (1)..(655): Ceres Seq. ID no. 12404480
  misc_feature: MA Experiment ID: 108535 Result: Down-regulated in Transcription
  misc_feature: MA Experiment 108535 PARAMETER Experiment Name: Zm_Meristem_P Parameter: Age (day) Value: 8
  misc_feature: MA Experiment 108535 PARAMETER Experiment Name: Zm_Meristem_P Parameter: Organism Value: Zea mays
  misc_feature: MA Experiment 108535 PARAMETER Experiment Name: Zm_Meristem_P Parameter: Plant Line Value: 35A19
  misc_feature: MA Experiment 108535 PARAMETER Experiment Name: Zm_Meristem_P Parameter: Tissue Value: Root Meristem vs. Above Root Meristem
  misc_feature: MA Experiment ID: 108543 Result: Down-regulated in Transcription
  misc_feature: MA Experiment ID: 20000478 Result: Up-regulated in Transcription
  misc_feature: MA Experiment 20000478 PARAMETER Experiment Name: Zm_5mM_SA_P Parameter: Age (day) Value: 11
  misc_feature: MA Experiment 20000478 PARAMETER Experiment Name: Zm_5mM_SA_P Parameter: Organism Value: Zea mays
  misc_feature: MA Experiment 20000478 PARAMETER Experiment Name: Zm_5mM_SA_P Parameter: Plant Line Value: 35A19
  misc_feature: MA Experiment 20000478 PARAMETER Experiment Name: Zm_5mM_SA_P Parameter: Timepoint (hr) Value: 72
  misc_feature: MA Experiment 20000478 PARAMETER Experiment Name: Zm_5mM_SA_P Parameter: Tissue Value: Aerial
  misc_feature: MA Experiment 20000478 PARAMETER Experiment Name: Zm_5mM_SA_P Parameter: Treatment Value: 5mM SA vs. No Treatment
acatcctaatcgaaaactcgatgtagtggattcagtttgtgcaaaaaatggaggaaaaccattttcagatcaaatgttcactagcatcaaggaggtgcatgatagagaaaaagaggtgcatacctcgggatattcagatgagcagatatctgaattgaaaaaggagattcatagaactagggatgaacagcttgcgcacataaccaacatggtcgaggaaaagttaaactgcactgtggagaagttgcaacagcagctcatggaagaacagaacgcaaggctggaagctgagaaggtggcgtacgaagctaggctgaaatcagaagcggagatccagaagctcaaggagagcctcaaagctcaaatggaaaatgatgagttccggaggatggcgcagagccagggcagtaaatgtgctatcctataggcattagtacttgctagaaattggtggagctatcgtgctgacgcgtctcttgtacgtagtactttctctgttccaaaaatatatagttcaatacaccttagtagagatgactacgagagtatccaaacaagacctcgtcggacatgttagcctgaagcttgcttatggacatattggatatagtttttgggtgagaacttttgaacaacttccttgtttttttctctc

SEQ ID NO: 4160 - protein, 141 aa, Zea mays subsp. mays
  peptide (1)..(141): Ceres Seq. ID no. 12404481
  misc_feature (49)..(116): Pfam Name: Hsp70 protein Pfam Description: Hsp70 protein
  misc_feature (6)..(123): Homolog of NCBI NO: 15234852 NR Description: AIG1-like protein; protein id: At4g09930.1
  misc_feature (6)..(141): Homolog of NCBI NO: 15217731 NR Description: AIG1; protein id: At1g33960.1, supported by cDNA:
  misc_feature (6)..(141): Homolog of NCBI NO: 15234871 NR Description: AIG1-like protein; protein id: At4g09950.1
  misc_feature (4)..(128): Homolog of NCBI NO: 32479674 NR Description: P0076O17.7 [Oryza sativa (japonica
  misc_feature (4)..(128): Homolog of NCBI NO: 38346576 NR Description: OSJNBa0064D20.7 [Oryza sativa (japonica
  misc_feature (6)..(141): Homolog of NCBI NO: 4097585 NR Description: NTGP4 [Nicotiana tabacum]
  misc_feature (6)..(129): Homolog of NCBI NO: 24417378 NR Description: unknown [Arabidopsis thaliana]
  misc_feature (6)..(129): Homolog of NCBI NO: 25373414 NR Description: hypothetical protein F12G12.21 - Arabidopsis
  misc_feature (6)..(129): Homolog of NCBI NO: 18399081 NR Description: expressed protein
  misc_feature (6)..(129): Homolog of NCBI NO: 12324509 NR Description: AIG1-like protein, 5' partial; 1-1205
HPNRKLDVVDSVCAKNGGKPFSDQMFTSIKEVHDREKEVHTSGYSDEQISELKKEIHRTRDEQLAHITNMVEEKLNCTVEKLQQQLMEEQNARLEAEKVAYEARLKSEAEIQKLKESLKAQMENDEFRRMAQSQGSKCAIL

SEQ ID NO: 4161 - protein, 117 aa, Zea mays subsp. mays
  peptide (1)..(117): Ceres Seq. ID no. 12404482
  misc_feature (25)..(92): Pfam Name: Hsp70 protein Pfam Description: Hsp70 protein
  misc_feature (1)..(99): Homolog of NCBI NO: 15234852 NR Description: AIG1-like protein; protein id: At4g09930.1
  misc_feature (1)..(117): Homolog of NCBI NO: 15217731 NR Description: AIG1; protein id: At1g33960.1, supported by cDNA:
  misc_feature (1)..(117): Homolog of NCBI NO: 15234871 NR Description: AIG1-like protein; protein id: At4g09950.1
  misc_feature (1)..(104): Homolog of NCBI NO: 32479674 NR Description: P0076O17.7 [Oryza sativa (japonica
  misc_feature (1)..(104): Homolog of NCBI NO: 38346576 NR Description: OSJNBa0064D20.7 [Oryza sativa (japonica
  misc_feature (1)..(117): Homolog of NCBI NO: 4097585 NR Description: NTGP4 [Nicotiana tabacum]
  misc_feature (1)..(105): Homolog of NCBI NO: 24417378 NR Description: unknown [Arabidopsis thaliana]
  misc_feature (1)..(105): Homolog of NCBI NO: 25373414 NR Description: hypothetical protein F12G12.21 - Arabidopsis
  misc_feature (1)..(105): Homolog of NCBI NO: 18399081 NR Description: expressed protein
  misc_feature (1)..(105): Homolog of NCBI NO: 12324509 NR Description: AIG1-like protein, 5' partial; 1-1205
MFTSIKEVHDREKEVHTSGYSDEQISELKKEIHRTRDEQLAHITNMVEEKLNCTVEKLQQQLMEEQNARLEAEKVAYEARLKSEAEIQKLKESLKAQMENDEFRRMAQSQGSKCAIL

SEQ ID NO: 4162 - protein, 72 aa, Zea mays subsp. mays
  peptide (1)..(72): Ceres Seq. ID no. 12404483
  misc_feature (1)..(54): Homolog of NCBI NO: 15234852 NR Description: AIG1-like protein; protein id: At4g09930.1
  misc_feature (1)..(72): Homolog of NCBI NO: 15217731 NR Description: AIG1; protein id: At1g33960.1, supported by cDNA:
  misc_feature (1)..(72): Homolog of NCBI NO: 15234871 NR Description: AIG1-like protein; protein id: At4g09950.1
  misc_feature (1)..(59): Homolog of NCBI NO: 32479674 NR Description: P0076O17.7 [Oryza sativa (japonica
  misc_feature (1)..(59): Homolog of NCBI NO: 38346576 NR Description: OSJNBa0064D20.7 [Oryza sativa (japonica
  misc_feature (1)..(72): Homolog of NCBI NO: 4097585 NR Description: NTGP4 [Nicotiana tabacum]
  misc_feature (1)..(60): Homolog of NCBI NO: 24417378 NR Description: unknown [Arabidopsis thaliana]
  misc_feature (1)..(60): Homolog of NCBI NO: 18399081 NR Description: expressed protein
  misc_feature (1)..(60): Homolog of NCBI NO: 25373414 NR Description: hypothetical protein F12G12.21 - Arabidopsis
  misc_feature (1)..(60): Homolog of NCBI NO: 12324509 NR Description: AIG1-like protein, 5' partial; 1-1205
MVEEKLNCTVEKLQQQLMEEQNARLEAEKVAYEARLKSEAEIQKLKESLKAQMENDEFRRMAQSQGSKCAIL

SEQ ID NO: 4163 - DNA, 684 bp, Zea mays subsp. mays
  misc_feature (1)..(684): Ceres Seq. ID no. 12345970
  misc_feature: MA Experiment ID: 108528 Result: Up-regulated in Transcription
  misc_feature: MA Experiment 108528 PARAMETER Experiment Name: Zm_Imbibed_Seeds_P Parameter: Age (day) Value: 5 vs. 2
  misc_feature: MA Experiment 108528 PARAMETER Experiment Name: Zm_Imbibed_Seeds_P Parameter: Organism Value: Zea mays
  misc_feature: MA Experiment 108528 PARAMETER Experiment Name: Zm_Imbibed_Seeds_P Parameter: Plant Line Value: 35A19
  misc_feature: MA Experiment 108528 PARAMETER Experiment Name: Zm_Imbibed_Seeds_P Parameter: Tissue Value: Aerial vs. Embryo
  misc_feature: MA Experiment ID: 108530 Result: Up-regulated in Transcription
  misc_feature: MA Experiment 108530 PARAMETER Experiment Name: Zm_Imbibed_Seeds_P Parameter: Age (day) Value: 6 vs. 2
  misc_feature: MA Experiment 108530 PARAMETER Experiment Name: Zm_Imbibed_Seeds_P Parameter: Organism Value: Zea mays
  misc_feature: MA Experiment 108530 PARAMETER Experiment Name: Zm_Imbibed_Seeds_P Parameter: Plant Line Value: 35A19
  misc_feature: MA Experiment 108530 PARAMETER Experiment Name: Zm_Imbibed_Seeds_P Parameter: Tissue Value: Aerial vs. Embryo
  misc_feature: MA Experiment ID: 108545 Result: Up-regulated in Transcription
  misc_feature: MA Experiment 108545 PARAMETER Experiment Name: Zm_Imbibed_Seeds_P Parameter: Age (day) Value: 3 vs. 2
  misc_feature: MA Experiment 108545 PARAMETER Experiment Name: Zm_Imbibed_Seeds_P Parameter: Organism Value: Zea mays
  misc_feature: MA Experiment 108545 PARAMETER Experiment Name: Zm_Imbibed_Seeds_P Parameter: Plant Line Value: 35A19
  misc_feature: MA Experiment 108545 PARAMETER Experiment Name: Zm_Imbibed_Seeds_P Parameter: Tissue Value: Aerial vs. Embryo
  misc_feature: MA Experiment ID: 108547 Result: Up-regulated in Transcription
  misc_feature: MA Experiment 108547 PARAMETER Experiment Name: Zm_Imbibed_Seeds_P Parameter: Age (day) Value: 4 vs. 2
  misc_feature: MA Experiment 108547 PARAMETER Experiment Name: Zm_Imbibed_Seeds_P Parameter: Organism Value: Zea mays
  misc_feature: MA Experiment 108547 PARAMETER Experiment Name: Zm_Imbibed_Seeds_P Parameter: Plant Line Value: 35A19
  misc_feature: MA Experiment 108547 PARAMETER Experiment Name: Zm_Imbibed_Seeds_P Parameter: Tissue Value: Aerial vs. Embryo
  misc_feature: MA Experiment ID: 20000479 Result: Down-regulated in Transcription
  misc_feature: MA Experiment 20000479 PARAMETER Experiment Name: Zm_Drought_P Parameter: Age (day) Value: 10
  misc_feature: MA Experiment 20000479 PARAMETER Experiment Name: Zm_Drought_P Parameter: Organism Value: Zea mays
  misc_feature: MA Experiment 20000479 PARAMETER Experiment Name: Zm_Drought_P Parameter: Plant Line Value: 35A19
  misc_feature: MA Experiment 20000479 PARAMETER Experiment Name: Zm_Drought_P Parameter: Timepoint (hr) Value: 48
  misc_feature: MA Experiment 20000479 PARAMETER Experiment Name: Zm_Drought_P Parameter: Tissue Value: Aerial
  misc_feature: MA Experiment 20000479 PARAMETER Experiment Name: Zm_Drought_P Parameter: Treatment Value: Drought vs. No Drought
  misc_feature: MA Experiment ID: 20000480 Result: Down-regulated in Transcription
  misc_feature: MA Experiment 20000480 PARAMETER Experiment Name: Zm_Drought_P Parameter: Age (day) Value: 11
  misc_feature: MA Experiment 20000480 PARAMETER Experiment Name: Zm_Drought_P Parameter: Organism Value: Zea mays
  misc_feature: MA Experiment 20000480 PARAMETER Experiment Name: Zm_Drought_P Parameter: Plant Line Value: 35A19
  misc_feature: MA Experiment 20000480 PARAMETER Experiment Name: Zm_Drought_P Parameter: Timepoint (hr) Value: 72
  misc_feature: MA Experiment 20000480 PARAMETER Experiment Name: Zm_Drought_P Parameter: Tissue Value: Aerial
  misc_feature: MA Experiment 20000480 PARAMETER Experiment Name: Zm_Drought_P Parameter: Treatment Value: Drought vs. No Drought
attggacggatcgagctggtactggcacactcgatccaatattttagctagctagcaagcaaagcaagccttgagcttgagcggcggctagcgcaatgggaggcgtggcgtcggagctggtaggagccagcagggagaggcagagcaggaagaggaagcagttccacacggtggagctcaagatcaggatggactgcgacggctgcgagctcaaggtcaggaacacccttgcccgcatgagaggggtggagtcggtggagatcaaccggaagcagcagaaggtgacggtgaaggggttcgtggaggcgcagcgggtgcttaggcgcacccagtccacggggaagcgcgtcgagctgtggccctacgtgccctacaccaacctctacgtcgcgccgccggtgtacgacaagagggcgccgccgggccacgtccgcagggtcgacgcactcatcgcgcccgccgccggccaggaagagcacctcgccacgctcttcagcgacgataaccccaacgcctgctcccttatgtgatgcctcatgctagctagagccgcctgctccccggccttatgcgatgctagctgcttgcttcatccacgctgtactagcgatgtacatgcattgtttgcatgaaaacgaactgatgctccgtagttacgcagtaatataataatctctatctttt

SEQ ID NO: 4164 - protein, 144 aa, Zea mays subsp. mays
  peptide (1)..(144): Ceres Seq. ID no. 12345971
  misc_feature (27)..(87): Pfam Name: Heavy-metal-associated domain Pfam Description: Heavy-metal-associated domain
  misc_feature (6)..(144): Homolog of NCBI NO: 15233937 NR Description: copper chaperone (CCH)-related
  misc_feature (18)..(144): Homolog of NCBI NO: 21397273 NR Description: Putative atfp6-like protein
  misc_feature (15)..(144): Homolog of NCBI NO: 15223925 NR Description: copper chaperone (CCH)-related
  misc_feature (19)..(144): Homolog of NCBI NO: 15237967 NR Description: copper chaperone (CCH)-related; protein id:
  misc_feature (15)..(144): Homolog of NCBI NO: 15219990 NR Description: copper chaperone (CCH)-related
  misc_feature (4)..(144): Homolog of NCBI NO: 23304411 NR Description: farnesylated protein 1 [Hordeum vulgare subsp.
  misc_feature (4)..(144): Homolog of NCBI NO: 38346843 NR Description: OSJNBa0091C12.3 [Oryza sativa (japonica
  misc_feature (15)..(144): Homolog of NCBI NO: 32442810 NR Description: putative farnesylated protein [Brassica rapa
  misc_feature (6)..(144): Homolog of NCBI NO: 15235984 NR Description: copper chaperone (CCH)-related; protein id:
  misc_feature (1)..(144): Homolog of NCBI NO: 37573003 NR Description: putative farnesylated protein
MGGVASELVGASRERQSRKRKQFHTVELKIRMDCDGCELKVRNTLARMRGVESVEINRKQQKVTVKGFVEAQRVLRRTQSTGKRVELWPYVPYTNLYVAPPVYDKRAPPGHVRRVDALIAPAAGQEEHLATLFSDDNPNACSLM

SEQ ID NO: 4165 - protein, 113 aa, Zea mays subsp. mays
  peptide (1)..(113): Ceres Seq. ID no. 12345972
  misc_feature (1)..(56): Pfam Name: Heavy-metal-associated domain Pfam Description: Heavy-metal-associated domain
  misc_feature (1)..(113): Homolog of NCBI NO: 15233937 NR Description: copper chaperone (CCH)-related
  misc_feature (1)..(113): Homolog of NCBI NO: 21397273 NR Description: Putative atfp6-like protein
  misc_feature (1)..(113): Homolog of NCBI NO: 15223925 NR Description: copper chaperone (CCH)-related
  misc_feature (1)..(113): Homolog of NCBI NO: 15237967 NR Description: copper chaperone (CCH)-related; protein id:
  misc_feature (1)..(113): Homolog of NCBI NO: 15219990 NR Description: copper chaperone (CCH)-related
  misc_feature (1)..(113): Homolog of NCBI NO: 23304411 NR Description: farnesylated protein 1 [Hordeum vulgare subsp.
  misc_feature (1)..(113): Homolog of NCBI NO: 38346843 NR Description: OSJNBa0091C12.3 [Oryza sativa (japonica
  misc_feature (1)..(113): Homolog of NCBI NO: 32442810 NR Description: putative farnesylated protein [Brassica rapa
  misc_feature (1)..(113): Homolog of NCBI NO: 15235984 NR Description: copper chaperone (CCH)-related; protein id:
  misc_feature (1)..(113): Homolog of NCBI NO: 37573003 NR Description: putative farnesylated protein
MDCDGCELKVRNTLARMRGVESVEINRKQQKVTVKGFVEAQRVLRRTQSTGKRVELWPYVPYTNLYVAPPVYDKRAPPGHVRRVDALIAPAAGQEEHLATLFSDDNPNACSLM

SEQ ID NO: 4166 - protein, 97 aa, Zea mays subsp. mays
  peptide (1)..(97): Ceres Seq. ID no. 12345973
  misc_feature (1)..(97): Homolog of NCBI NO: 15233937 NR Description: copper chaperone (CCH)-related
  misc_feature (1)..(97): Homolog of NCBI NO: 21397273 NR Description: Putative atfp6-like protein
  misc_feature (1)..(97): Homolog of NCBI NO: 15223925 NR Description: copper chaperone (CCH)-related
  misc_feature (1)..(97): Homolog of NCBI NO: 15237967 NR Description: copper chaperone (CCH)-related; protein id:
  misc_feature (1)..(97): Homolog of NCBI NO: 15219990 NR Description: copper chaperone (CCH)-related
  misc_feature (1)..(97): Homolog of NCBI NO: 23304411 NR Description: farnesylated protein 1 [Hordeum vulgare subsp.
  misc_feature (1)..(97): Homolog of NCBI NO: 38346843 NR Description: OSJNBa0091C12.3 [Oryza sativa (japonica
  misc_feature (1)..(97): Homolog of NCBI NO: 32442810 NR Description: putative farnesylated protein [Brassica rapa
  misc_feature (1)..(97): Homolog of NCBI NO: 15235984 NR Description: copper chaperone (CCH)-related; protein id:
  misc_feature (1)..(97): Homolog of NCBI NO: 37573003 NR Description: putative farnesylated protein
MRGVESVEINRKQQKVTVKGFVEAQRVLRRTQSTGKRVELWPYVPYTNLYVAPPVYDKRAPPGHVRRVDALIAPAAGQEEHLATLFSDDNPNACSLM

SEQ ID NO: 4167 - DNA, 1198 bp, Zea mays subsp. mays
  misc_feature (1)..(1198): Ceres Seq. ID no. 12349951
  misc_feature: MA Experiment ID: 108535 Result: Up-regulated in Transcription
  misc_feature: MA Experiment 108535 PARAMETER Experiment Name: Zm_Meristem_P Parameter: Age (day) Value: 8
  misc_feature: MA Experiment 108535 PARAMETER Experiment Name: Zm_Meristem_P Parameter: Organism Value: Zea mays
  misc_feature: MA Experiment 108535 PARAMETER Experiment Name: Zm_Meristem_P Parameter: Plant Line Value: 35A19
  misc_feature: MA Experiment 108535 PARAMETER Experiment Name: Zm_Meristem_P Parameter: Tissue Value: Root Meristem vs. Above Root Meristem
actctaggctaaacttcactgacgctacggaaggggtctcgaagagctgccaagacccacctgccacctccgatggacttcgccggccgggtatccttcctgctcttcttcctggtcgctggcactgtagcaaacgaccagatcttcaccacttcaggtttgccatttgggcgaagttcgcgtgagccaaggtaccgcgtcgagttccatcctgttgattcgccattccatccagataatggtcaggaatcggtaccaatggctagtcatgaggggaagcgttataagtgctttctaccagttgaagaaactaaaaccatgaagtcaatgctcccacaaaatgcgactaatattataatagaaagtgaaaggcgaattaagccaaaggagccggatgagttacttgaggttctcaaggatcagtgtttctacaggcacgaaggttggtggtcgtatgaattctgttattatgggaaaatcagacaggtccatgtagaggacagtaaggttatccaagaatttgttctaggcgaattcgatgatgacgcaactgctgcataccatgaaaatagcacctctgagttaactgacgatgaccatcacgtgaaagatatatctaagaggtatcatgttcacttgtatacaaatgggactgtatgtgatctcacagatattccccgggagacagaggttagatttgtctgctcggagcctactgtgctgattagttcagtcaaggagatctcttcctgcaaatatgttgtaacaattcaaagcccgatgctttgcaaaaacccgttgttccagcaagaaaaacgaacccttcccatccattgcaatgaattacctgctaaagcagaatccggtgctgaggatggtttgcttccaaaagaagcgcagatttccatcatccccgatcaggatgagctgcatggttttccagcttatgctacttgatataatgatatgccttcaatatttatttctggtgtagaaaaagcacagttttggaggcccagtggcaactgagcaacgcgatgtattactctctccgttcttttttatttgccgtggtttagtttaaaaattacgacaaatattggagaacggacccatagatcctacagcagcggctccttgtaaagcaggttgagacgatcattctgcagtgctaattatttaggaggattacgaaggt

SEQ ID NO: 4168 - protein, 294 aa, Zea mays subsp. mays
  peptide (1)..(294): Ceres Seq. ID no. 12349952
  misc_feature (109)..(252): Homolog of NCBI NO: 13905114 NR Description: Unknown (protein for IMAGE:3598453) [Mus musculus]
  misc_feature (38)..(252): Homolog of NCBI NO: 34865743 NR Description: similar to Protein OS-9 precursor [Rattus
  misc_feature (38)..(252): Homolog of NCBI NO: 29243990 NR Description: hypothetical protein 1300007E20 [Mus musculus]
  misc_feature (38)..(252): Homolog of NCBI NO: 5803109 NR Description: amplified in osteosarcoma [Homo sapiens]
  misc_feature (38)..(252): Homolog of NCBI NO: 12653521 NR Description: Similar to amplified in osteosarcoma [Homo
  misc_feature (47)..(258): Homolog of NCBI NO: 28850402 NR Description: similar to Arabidopsis thaliana (Mouse-ear
  misc_feature (177)..(242): Homolog of NCBI NO: 7487985 NR Description: hypothetical protein F7N22.4 - Arabidopsis
  misc_feature (63)..(146): Homolog of NCBI NO: 7487985 NR Description: hypothetical protein F7N22.4 - Arabidopsis
  misc_feature (19)..(276): Homolog of NCBI NO: 21592392 NR Description: unknown [Arabidopsis thaliana]
  misc_feature (19)..(276): Homolog of NCBI NO: 18421420 NR Description: putative protein
MDFAGRVSFLLFFLVAGTVANDQIFTTSGLPFGRSSREPRYRVEFHPVDSPFHPDNGQESVPMASHEGKRYKCFLPVEETKTMKSMLPQNATNIIIESERRIKPKEPDELLEVLKDQCFYRHEGWWSYEFCYYGKIRQVHVEDSKVIQEFVLGEFDDDATAAYHENSTSELTDDDHHVKDISKRYHVHLYTNGTVCDLTDIPRETEVRFVCSEPTVLISSVKEISSCKYVVTIQSPMLCKNPLFQQEKRTLPIHCNELPAKAESGAEDGLLPKEAQISIIPDQDELHGFPAYAT

SEQ ID NO: 4169 - protein, 232 aa, Zea mays subsp. mays
  peptide (1)..(232): Ceres Seq. ID no. 12349953
  misc_feature (47)..(190): Homolog of NCBI NO: 13905114 NR Description: Unknown (protein for IMAGE:3598453) [Mus musculus]
  misc_feature (1)..(190): Homolog of NCBI NO: 34865743 NR Description: similar to Protein OS-9 precursor [Rattus
  misc_feature (1)..(190): Homolog of NCBI NO: 29243990 NR Description: hypothetical protein 1300007E20 [Mus musculus]
  misc_feature (1)..(190): Homolog of NCBI NO: 5803109 NR Description: amplified in osteosarcoma [Homo sapiens]
  misc_feature (1)..(190): Homolog of NCBI NO: 12653521 NR Description: Similar to amplified in osteosarcoma [Homo
  misc_feature (1)..(196): Homolog of NCBI NO: 28850402 NR Description: similar to Arabidopsis thaliana (Mouse-ear
  misc_feature (115)..(180): Homolog of NCBI NO: 7487985 NR Description: hypothetical protein F7N22.4 - Arabidopsis
  misc_feature (1)..(84): Homolog of NCBI NO: 7487985 NR Description: hypothetical protein F7N22.4 - Arabidopsis
  misc_feature (1)..(214): Homolog of NCBI NO: 21592392 NR Description: unknown [Arabidopsis thaliana]
  misc_feature (1)..(214): Homolog of NCBI NO: 18421420 NR Description: putative protein
MASHEGKRYKCFLPVEETKTMKSMLPQNATNIIIESERRIKPKEPDELLEVLKDQCFYRHEGWWSYEFCYYGKIRQVHVEDSKVIQEFVLGEFDDDATAAYHENSTSELTDDDHHVKDISKRYHVHLYTNGTVCDLTDIPRETEVRFVCSEPTVLISSVKEISSCKYVVTIQSPMLCKNPLFQQEKRTLPIHCNELPAKAESGAEDGLLPKEAQISIIPDQDELHGFPAYAT

SEQ ID NO: 4170 - protein, 212 aa, Zea mays subsp. mays
  peptide (1)..(212): Ceres Seq. ID no. 12349954
  misc_feature (27)..(170): Homolog of NCBI NO: 13905114 NR Description: Unknown (protein for IMAGE:3598453) [Mus musculus]
  misc_feature (1)..(170): Homolog of NCBI NO: 34865743 NR Description: similar to Protein OS-9 precursor [Rattus
  misc_feature (1)..(170): Homolog of NCBI NO: 29243990 NR Description: hypothetical protein 1300007E20 [Mus musculus]
  misc_feature (1)..(170): Homolog of NCBI NO: 5803109 NR Description: amplified in osteosarcoma [Homo sapiens]
  misc_feature (1)..(170): Homolog of NCBI NO: 12653521 NR Description: Similar to amplified in osteosarcoma [Homo
  misc_feature (1)..(176): Homolog of NCBI NO: 28850402 NR Description: similar to Arabidopsis thaliana (Mouse-ear
  misc_feature (95)..(160): Homolog of NCBI NO: 7487985 NR Description: hypothetical protein F7N22.4 - Arabidopsis
  misc_feature (1)..(64): Homolog of NCBI NO: 7487985 NR Description: hypothetical protein F7N22.4 - Arabidopsis
  misc_feature (1)..(194): Homolog of NCBI NO: 21592392 NR Description: unknown [Arabidopsis thaliana]
  misc_feature (1)..(194): Homolog of NCBI NO: 18421420 NR Description: putative protein
MKSMLPQNATNIIIESERRIKPKEPDELLEVLKDQCFYRHEGWWSYEFCYYGKIRQVHVEDSKVIQEFVLGEFDDDATAAYHENSTSELTDDDHHVKDISKRYHVHLYTNGTVCDLTDIPRETEVRFVCSEPTVLISSVKEISSCKYVVTIQSPMLCKNPLFQQEKRTLPIHCNELPAKAESGAEDGLLPKEAQISIIPDQDELHGFPAYAT

SEQ ID NO: 4171 - DNA, 1041 bp, Zea mays subsp. mays
  misc_feature (1)..(1041): Ceres Seq. ID no. 12340753
  misc_feature: MA Experiment ID: 108523 Result: Up-regulated in Transcription
  misc_feature: MA Experiment 108523 PARAMETER Experiment Name: Zm_42deg_Heat_P Parameter: Age (day) Value: 8
  misc_feature: MA Experiment 108523 PARAMETER Experiment Name: Zm_42deg_Heat_P Parameter: Organism Value: Zea mays
  misc_feature: MA Experiment 108523 PARAMETER Experiment Name: Zm_42deg_Heat_P Parameter: Plant Line Value: 35A19
  misc_feature: MA Experiment 108523 PARAMETER Experiment Name: Zm_42deg_Heat_P Parameter: Temperature (deg C) Value: 42 vs. 22
  misc_feature: MA Experiment 108523 PARAMETER Experiment Name: Zm_42deg_Heat_P Parameter: Timepoint (hr) Value: 6
  misc_feature: MA Experiment 108523 PARAMETER Experiment Name: Zm_42deg_Heat_P Parameter: Tissue Value: Aerial
  misc_feature: MA Experiment ID: 108556 Result: Up-regulated in Transcription
  misc_feature: MA Experiment 108556 PARAMETER Experiment Name: Zm_Drought_P Parameter: Age (day) Value: 9
  misc_feature: MA Experiment 108556 PARAMETER Experiment Name: Zm_Drought_P Parameter: Organism Value: Zea mays
  misc_feature: MA Experiment 108556 PARAMETER Experiment Name: Zm_Drought_P Parameter: Plant Line Value: 35A19
  misc_feature: MA Experiment 108556 PARAMETER Experiment Name: Zm_Drought_P Parameter: Timepoint (hr) Value: 24
  misc_feature: MA Experiment 108556 PARAMETER Experiment Name: Zm_Drought_P Parameter: Tissue Value: Aerial
  misc_feature: MA Experiment 108556 PARAMETER Experiment Name: Zm_Drought_P Parameter: Treatment Value: Drought vs. No Drought
  misc_feature: MA Experiment ID: 20000477 Result: Up-regulated in Transcription
  misc_feature: MA Experiment 20000477 PARAMETER Experiment Name: Zm_5mM_SA_P Parameter: Age (day) Value: 10
  misc_feature: MA Experiment 20000477 PARAMETER Experiment Name: Zm_5mM_SA_P Parameter: Organism Value: Zea mays
  misc_feature: MA Experiment 20000477 PARAMETER Experiment Name: Zm_5mM_SA_P Parameter: Plant Line Value: 35A19
  misc_feature: MA Experiment 20000477 PARAMETER Experiment Name: Zm_5mM_SA_P Parameter: Timepoint (hr) Value: 48
  misc_feature: MA Experiment 20000477 PARAMETER Experiment Name: Zm_5mM_SA_P Parameter: Tissue Value: Aerial
  misc_feature: MA Experiment 20000477 PARAMETER Experiment Name: Zm_5mM_SA_P Parameter: Treatment Value: 5mM SA vs. No Treatment
  misc_feature: MA Experiment ID: 20000479 Result: Up-regulated in Transcription
  misc_feature: MA Experiment 20000479 PARAMETER Experiment Name: Zm_Drought_P Parameter: Age (day) Value: 10
  misc_feature: MA Experiment 20000479 PARAMETER Experiment Name: Zm_Drought_P Parameter: Organism Value: Zea mays
  misc_feature: MA Experiment 20000479 PARAMETER Experiment Name: Zm_Drought_P Parameter: Plant Line Value: 35A19
  misc_feature: MA Experiment 20000479 PARAMETER Experiment Name: Zm_Drought_P Parameter: Timepoint (hr) Value: 48
  misc_feature: MA Experiment 20000479 PARAMETER Experiment Name: Zm_Drought_P Parameter: Tissue Value: Aerial
  misc_feature: MA Experiment 20000479 PARAMETER Experiment Name: Zm_Drought_P Parameter: Treatment Value: Drought vs. No Drought
  misc_feature: MA Experiment ID: 20000480 Result: Up-regulated in Transcription
  misc_feature: MA Experiment 20000480 PARAMETER Experiment Name: Zm_Drought_P Parameter: Age (day) Value: 11
  misc_feature: MA Experiment 20000480 PARAMETER Experiment Name: Zm_Drought_P Parameter: Organism Value: Zea mays
  misc_feature: MA Experiment 20000480 PARAMETER Experiment Name: Zm_Drought_P Parameter: Plant Line Value: 35A19
  misc_feature: MA Experiment 20000480 PARAMETER Experiment Name: Zm_Drought_P Parameter: Timepoint (hr) Value: 72
  misc_feature: MA Experiment 20000480 PARAMETER Experiment Name: Zm_Drought_P Parameter: Tissue Value: Aerial
  misc_feature: MA Experiment 20000480 PARAMETER Experiment Name: Zm_Drought_P Parameter: Treatment Value: Drought vs. No Drought
agtggctgcacctcggtcccagctgtcagcgaacggcaacgaggcaaacacatgacgcctctcttctcttccgtgtagatctcgcttagaattcgtgtaccagaaaccccggccctaaccgcgcccgcaccctcgcccttggctcgccggagattaacgctacagccgtaatcacgtaaattccttttcatggagggtgtgggcgcgcggctagggcgcacttcggcgcgctacgggccggcgacgacgttcacgggccatgtcaggaagtggcgcaaggagtgggtaccagtggtcgccgccgccgccgccgccgccgccaacgccaacaccagcgccaacggtggcacgacgtcctccacggggatgggatctggcggaggatcccgcgggaataatcttctcctgtttaagtggaccccggtgaacggggctaacgggggaggaggggatggggagcagcagcagcaggctgagacggccacgagacgccggcggtatgtgccggtttctttaatggaagagcaaaggcaagaatctaccaaatctgatgatgagaacaaggctaatgatggagatccatcttcgaatgaaactgagccatcaaatggaaagactgatatcaatgatacacctatggatgaatctcaggcaacagatgaggatggtcgagattctggtaaaaacggcggtggaacagacctaaatttgaatttaggtttgaaagacccggatggtgataatgaagttgagacatcagagaaacatgtagcggcaaacaatccgcagacagagaatagatccaagaggaaatccgtaacccctgaccttgagatgacaatgtaacccagaaatttcatttgtcttaattttactatttgccatgagcccatgaggtgtgtaacttgggtacgttctcatcgtagaaacatttaagtaaaatcgattacaggacatacaatagtgtgaactgaagaaacctttttttactcgaacatggagaattgtctaaagtcattgtcaaatataatttaattttcc

SEQ ID NO: 4172 - protein, 218 aa, Zea mays subsp. mays
  peptide (1)..(218): Ceres Seq. ID no. 12340754
  misc_feature (1)..(186): Homolog of NCBI NO: 15240476 NR Description: putative protein; protein id: At5g55210.1
  misc_feature (1)..(153): Homolog of NCBI NO: 30685783 NR Description: expressed protein [Arabidopsis thaliana]
  misc_feature (1)..(153): Homolog of NCBI NO: 7486827 NR Description: hypothetical protein T10I14.150 - Arabidopsis
MEGVGARLGRTSARYGPATTFTGHVRKWRKEWVPVVAAAAAAAANANTSANGGTTSSTGMGSGGGSRGNNLLLFKWTPVNGANGGGGDGEQQQQAETATRRRRYVPVSLMEEQRQESTKSDDENKANDGDPSSNETEPSNGKTDINDTPMDESQATDEDGRDSGKNGGGTDLNLNLGLKDPDGDNEVETSEKHVAANNPQTENRSKRKSVTPDLEMTM

SEQ ID NO: 4173 - protein, 159 aa, Zea mays subsp. mays
  peptide (1)..(159): Ceres Seq. ID no. 12340755
  misc_feature (1)..(127): Homolog of NCBI NO: 15240476 NR Description: putative protein; protein id: At5g55210.1
  misc_feature (1)..(94): Homolog of NCBI NO: 30685783 NR Description: expressed protein [Arabidopsis thaliana]
  misc_feature (1)..(94): Homolog of NCBI NO: 7486827 NR Description: hypothetical protein T10I14.150 - Arabidopsis
MGSGGGSRGNNLLLFKWTPVNGANGGGGDGEQQQQAETATRRRRYVPVSLMEEQRQESTKSDDENKANDGDPSSNETEPSNGKTDINDTPMDESQATDEDGRDSGKNGGGTDLNLNLGLKDPDGDNEVETSEKHVAANNPQTENRSKRKSVTPDLEMTM

SEQ ID NO: 4174 - protein, 109 aa, Zea mays subsp. mays
  peptide (1)..(109): Ceres Seq. ID no. 12340756
  misc_feature (1)..(77): Homolog of NCBI NO: 15240476 NR Description: putative protein; protein id: At5g55210.1
  misc_feature (1)..(44): Homolog of NCBI NO: 30685783 NR Description: expressed protein [Arabidopsis thaliana]
  misc_feature (1)..(44): Homolog of NCBI NO: 7486827 NR Description: hypothetical protein T10I14.150 - Arabidopsis
MEEQRQESTKSDDENKANDGDPSSNETEPSNGKTDINDTPMDESQATDEDGRDSGKNGGGTDLNLNLGLKDPDGDNEVETSEKHVAANNPQTENRSKRKSVTPDLEMTM

SEQ ID NO: 4175 - DNA, 781 bp, Zea mays subsp. mays
  misc_feature (1)..(781): Ceres Seq. ID no. 12356172
  misc_feature: MA Experiment ID: 108523 Result: Up-regulated in Transcription
  misc_feature: MA Experiment 108523 PARAMETER Experiment Name: Zm_42deg_Heat_P Parameter: Age (day) Value: 8
  misc_feature: MA Experiment 108523 PARAMETER Experiment Name: Zm_42deg_Heat_P Parameter: Organism Value: Zea mays
  misc_feature: MA Experiment 108523 PARAMETER Experiment Name: Zm_42deg_Heat_P Parameter: Plant Line Value: 35A19
  misc_feature: MA Experiment 108523 PARAMETER Experiment Name: Zm_42deg_Heat_P Parameter: Temperature (deg C) Value: 42 vs. 22
  misc_feature: MA Experiment 108523 PARAMETER Experiment Name: Zm_42deg_Heat_P Parameter: Timepoint (hr) Value: 6
  misc_feature: MA Experiment 108523 PARAMETER Experiment Name: Zm_42deg_Heat_P Parameter: Tissue Value: Aerial
  misc_feature: MA Experiment ID: 108527 Result: Up-regulated in Transcription
  misc_feature: MA Experiment 108527 PARAMETER Experiment Name: Zm_5mM_NO_P Parameter: Age (day) Value: 8
  misc_feature: MA Experiment 108527 PARAMETER Experiment Name: Zm_5mM_NO_P Parameter: Organism Value: Zea mays
  misc_feature: MA Experiment 108527 PARAMETER Experiment Name: Zm_5mM_NO_P Parameter: Plant Line Value: 35A19
  misc_feature: MA Experiment 108527 PARAMETER Experiment Name: Zm_5mM_NO_P Parameter: Timepoint (hr) Value: 6
  misc_feature: MA Experiment 108527 PARAMETER Experiment Name: Zm_5mM_NO_P Parameter: Tissue Value: Aerial
  misc_feature: MA Experiment 108527 PARAMETER Experiment Name: Zm_5mM_NO_P Parameter: Treatment Value: 5mM NO vs. No Treatment
  misc_feature: MA Experiment ID: 108545 Result: Down-regulated in Transcription
  misc_feature: MA Experiment 108545 PARAMETER Experiment Name: Zm_Imbibed_Seeds_P Parameter: Age (day) Value: 3 vs. 2
  misc_feature: MA Experiment 108545 PARAMETER Experiment Name: Zm_Imbibed_Seeds_P Parameter: Organism Value: Zea mays
  misc_feature: MA Experiment 108545 PARAMETER Experiment Name: Zm_Imbibed_Seeds_P Parameter: Plant Line Value: 35A19
  misc_feature: MA Experiment 108545 PARAMETER Experiment Name: Zm_Imbibed_Seeds_P Parameter: Tissue Value: Aerial vs. Embryo
  misc_feature: MA Experiment ID: 20000535 Result: Down-regulated in Transcription
  misc_feature: MA Experiment 20000535 PARAMETER Experiment Name: Zm_Hybrid_Seed_Dev_P Parameter: DAP Value: 30 vs. 12
  misc_feature: MA Experiment 20000535 PARAMETER Experiment Name: Zm_Hybrid_Seed_Dev_P Parameter: Organism Value: Zea mays
  misc_feature: MA Experiment 20000535 PARAMETER Experiment Name: Zm_Hybrid_Seed_Dev_P Parameter: Plant Line Value: 35A19
  misc_feature: MA Experiment 20000535 PARAMETER Experiment Name: Zm_Hybrid_Seed_Dev_P Parameter: Tissue Value: Embryo vs. Unfert Floret
gcacagcacagaccggaagcacagcgcccagtcgcccacccacccgctgcgtcccgctcaccaagtcaccagccttgctgcgcgcgtcctcccacccgccgcccgtagccatgtcggtgacgctgcacacgaacctgggcgacatcaagtgcgaggtgttctgcgaccaggtgccccgcacggcggagaacttactggccctctgcgccagcggctactacgacggcaccgtgttccaccgaaacatcaagggcttcatgatccagggcggcgaccccaccggctccggcaagggcggctcctccatctggggcaccaagttcgcggacgagttcagggagtccctcaagcacaacgcacgggggatcatgtcgatggccaacaacgggcccaacaccaacggcagccagttcttcatcacctacgccaagcagccgcacctcaacggccactacaccgtcttcgccaaggtcatccacggcttcgaggtcctcgacctcatggagaaggcgcagaccggccccggggacaggccgctcgccgagatcaggctcaaccgcgtcaccatccacgccaacccgctagccctctgaactactactgccttccacctgctcctgcagtcctgtcccgtggccttattataattactattattactcatggaaatcaggatgaggagagtaatttcgcgaggacacttttgattgattttgaaacatggatctgtagctctctaaacacttgtagttgtagaactctaaaaaaactttagattccc

SEQ ID NO: 4176 - protein, 257 aa, Zea mays subsp. mays
  peptide (1)..(257): Ceres Seq. ID no. 12356173
HSTDRKHSAQSPTHPLRPAHQVTSLAARVLPPAARSHVGDAAHEPGRHQVRGVLRPGAPHGGELTGPLRQRLLRRHRVPPKHQGLHDPGRRPHRLRQGRLLHLGHQVRGRVQGVPQAQRTGDHVDGQQRAQHQRQPVLHHLRQAAAPQRPLHRLRQGHPRLRGPRPHGEGADRPRGQAARRDQAQPRHHPRQPASPLNYYCLPPAPAVLSRGLIIITIITHGNQDEESNFARTLLIDFETWICSSLNTCSCRTLKKL

SEQ ID NO: 4177 - protein, 196 aa, Zea mays subsp. mays
  peptide (1)..(196): Ceres Seq. ID no. 12356174
  misc_feature (39)..(193): Homolog of NCBI NO: 1199600 NR Description: cyclophilin-like protein
  misc_feature (4)..(195): Homolog of NCBI NO: 19922376 NR Description: CG7747-PA [Drosophila melanogaster]
  misc_feature (37)..(181): Homolog of NCBI NO: 39590255 NR Description: Hypothetical protein CBG11184 [Caenorhabditis
  misc_feature (37)..(195): Homolog of NCBI NO: 29028318 NR Description: cyclophilin [Homo sapiens]
  misc_feature (37)..(195): Homolog of NCBI NO: 28190012 NR Description: CYP10L [Mus musculus]
  misc_feature (37)..(195): Homolog of NCBI NO: 21746159 NR Description: peptidylprolyl isomerase-like 3; cyclophilin-like
  misc_feature (37)..(195): Homolog of NCBI NO: 19557636 NR Description: peptidylprolyl isomerase-like protein 3 isoform
  misc_feature (37)..(195): Homolog of NCBI NO: 14043400 NR Description: Unknown (protein for MGC:10732) [Homo sapiens]
  misc_feature (37)..(195): Homolog of NCBI NO: 30678211 NR Description: expressed protein [Arabidopsis thaliana]
  misc_feature (37)..(195): Homolog of NCBI NO: 6006361 NR Description: ESTs AU030008(E50477),AU078239(E50477) correspond a region of the predicted gene.~Similar to peptidyl-prolyl
TAQTGSTAPSRPPTRCVPLTKSPALLRASSHPPPVAMSVTLHTNLGDIKCEVFCDQVPRTAENLLALCASGYYDGTVFHRNIKGFMIQGGDPTGSGKGGSSIWGTKFADEFRESLKHNARGIMSMANNGPNTNGSQFFITYAKQPHLNGHYTVFAKVIHGFEVLDLMEKAQTGPGDRPLAEIRLNRVTIHANPLAL

SEQ ID NO: 4178 - protein, 160 aa, Zea mays subsp. mays
  peptide (1)..(160): Ceres Seq. ID no. 12356175
  misc_feature (3)..(157): Homolog of NCBI NO: 1199600 NR Description: cyclophilin-like protein
  misc_feature (1)..(159): Homolog of NCBI NO: 19922376 NR Description: CG7747-PA [Drosophila melanogaster]
  misc_feature (1)..(145): Homolog of NCBI NO: 39590255 NR Description: Hypothetical protein CBG11184 [Caenorhabditis
  misc_feature (1)..(159): Homolog of NCBI NO: 29028318 NR Description: cyclophilin [Homo sapiens]
  misc_feature (1)..(159): Homolog of NCBI NO: 28190012 NR Description: CYP10L [Mus musculus]
  misc_feature (1)..(159): Homolog of NCBI NO: 21746159 NR Description: peptidylprolyl isomerase-like 3; cyclophilin-like
  misc_feature (1)..(159): Homolog of NCBI NO: 19557636 NR Description: peptidylprolyl isomerase-like protein 3 isoform
  misc_feature (1)..(159): Homolog of NCBI NO: 14043400 NR Description: Unknown (protein for MGC:10732) [Homo sapiens]
  misc_feature (1)..(159): Homolog of NCBI NO: 30678211 NR Description: expressed protein [Arabidopsis thaliana]
  misc_feature (1)..(159): Homolog of NCBI NO: 6006361 NR Description: ESTs AU030008(E50477),AU078239(E50477) correspond a region of the predicted gene.~Similar to peptidyl-prolyl
MSVTLHTNLGDIKCEVFCDQVPRTAENLLALCASGYYDGTVFHRNIKGFMIQGGDPTGSGKGGSSIWGTKFADEFRESLKHNARGIMSMANNGPNTNGSQFFITYAKQPHLNGHYTVFAKVIHGFEVLDLMEKAQTGPGDRPLAEIRLNRVTIHANPLAL

SEQ ID NO: 4179 - DNA, 1133 bp, Zea mays subsp. mays
  misc_feature (1)..(1133): Ceres Seq. ID no. 12404468
  misc_feature: MA Experiment ID: 108504 Result: Down-regulated in Transcription
  misc_feature: MA Experiment 108504 PARAMETER Experiment Name: Zm_Drought_P Parameter: Age (day) Value: 8
  misc_feature: MA Experiment 108504 PARAMETER Experiment Name: Zm_Drought_P Parameter: Organism Value: Zea mays
  misc_feature: MA Experiment 108504 PARAMETER Experiment Name: Zm_Drought_P Parameter: Plant Line Value: 35A19
  misc_feature: MA Experiment 108504 PARAMETER Experiment Name: Zm_Drought_P Parameter: Timepoint (hr) Value: 12
  misc_feature: MA Experiment 108504 PARAMETER Experiment Name: Zm_Drought_P Parameter: Tissue Value: Aerial
  misc_feature: MA Experiment 108504 PARAMETER Experiment Name: Zm_Drought_P Parameter: Treatment Value: Drought vs. No Drought
  misc_feature: MA Experiment ID: 108522 Result: Up-regulated in Transcription
  misc_feature: MA Experiment 108522 PARAMETER Experiment Name: Zm_42deg_Heat_P Parameter: Age (day) Value: 8
  misc_feature: MA Experiment 108522 PARAMETER Experiment Name: Zm_42deg_Heat_P Parameter: Organism Value: Zea mays
  misc_feature: MA Experiment 108522 PARAMETER Experiment Name: Zm_42deg_Heat_P Parameter: Plant Line Value: 35A19
  misc_feature: MA Experiment 108522 PARAMETER Experiment Name: Zm_42deg_Heat_P Parameter: Temperature (deg C) Value: 42 vs. 22
  misc_feature: MA Experiment 108522 PARAMETER Experiment Name: Zm_42deg_Heat_P Parameter: Timepoint (hr) Value: 1
  misc_feature: MA Experiment 108522 PARAMETER Experiment Name: Zm_42deg_Heat_P Parameter: Tissue Value: Aerial
  misc_feature: MA Experiment ID: 108527 Result: Down-regulated in Transcription
  misc_feature: MA Experiment 108527 PARAMETER Experiment Name: Zm_5mM_NO_P Parameter: Age (day) Value: 8
  misc_feature: MA Experiment 108527 PARAMETER Experiment Name: Zm_5mM_NO_P Parameter: Organism Value: Zea mays
  misc_feature: MA Experiment 108527 PARAMETER Experiment Name: Zm_5mM_NO_P Parameter: Plant Line Value: 35A19
  misc_feature: MA Experiment 108527 PARAMETER Experiment Name: Zm_5mM_NO_P Parameter: Timepoint (hr) Value: 6
  misc_feature: MA Experiment 108527 PARAMETER Experiment Name: Zm_5mM_NO_P Parameter: Tissue Value: Aerial
  misc_feature: MA Experiment 108527 PARAMETER Experiment Name: Zm_5mM_NO_P Parameter: Treatment Value: 5mM NO vs. No Treatment
  misc_feature: MA Experiment ID: 108535 Result: Down-regulated in Transcription
  misc_feature: MA Experiment 108535 PARAMETER Experiment Name: Zm_Meristem_P Parameter: Age (day) Value: 8
  misc_feature: MA Experiment 108535 PARAMETER Experiment Name: Zm_Meristem_P Parameter: Organism Value: Zea mays
  misc_feature: MA Experiment 108535 PARAMETER Experiment Name: Zm_Meristem_P Parameter: Plant Line Value: 35A19
  misc_feature: MA Experiment 108535 PARAMETER Experiment Name: Zm_Meristem_P Parameter: Tissue Value: Root Meristem vs. Above Root Meristem
  misc_feature: MA Experiment ID: 108543 Result: Up-regulated in Transcription
  misc_feature: MA Experiment ID: 108556 Result: Down-regulated in Transcription
  misc_feature: MA Experiment 108556 PARAMETER Experiment Name: Zm_Drought_P Parameter: Age (day) Value: 9
  misc_feature: MA Experiment 108556 PARAMETER Experiment Name: Zm_Drought_P Parameter: Organism Value: Zea mays
  misc_feature: MA Experiment 108556 PARAMETER Experiment Name: Zm_Drought_P Parameter: Plant Line Value: 35A19
  misc_feature: MA Experiment 108556 PARAMETER Experiment Name: Zm_Drought_P Parameter: Timepoint (hr) Value: 24
  misc_feature: MA Experiment 108556 PARAMETER Experiment Name: Zm_Drought_P Parameter: Tissue Value: Aerial
  misc_feature: MA Experiment 108556 PARAMETER Experiment Name: Zm_Drought_P Parameter: Treatment Value: Drought vs. No Drought
  misc_feature: MA Experiment ID: 108559 Result: Down-regulated in Transcription
  misc_feature: MA Experiment 108559 PARAMETER Experiment Name: Zm_5mM_NO_P Parameter: Age (day) Value: 8
  misc_feature: MA Experiment 108559 PARAMETER Experiment Name: Zm_5mM_NO_P Parameter: Organism Value: Zea mays
  misc_feature: MA Experiment 108559 PARAMETER Experiment Name: Zm_5mM_NO_P Parameter: Plant Line Value: 35A19
  misc_feature: MA Experiment 108559 PARAMETER Experiment Name: Zm_5mM_NO_P Parameter: Timepoint (hr) Value: 12
  misc_feature: MA Experiment 108559 PARAMETER Experiment Name: Zm_5mM_NO_P Parameter: Tissue Value: Aerial
  misc_feature: MA Experiment 108559 PARAMETER Experiment Name: Zm_5mM_NO_P Parameter: Treatment Value: 5mM NO vs. No Treatment
  misc_feature: MA Experiment ID: 108687 Result: Down-regulated in Transcription
  misc_feature: MA Experiment 108687 PARAMETER Experiment Name: Zm_Embryos-Flowers__P Parameter: Tissue Value: Embryo vs. Aerial+
  misc_feature: MA Experiment ID: 20000477 Result: Down-regulated in Transcription
  misc_feature: MA Experiment 20000477 PARAMETER Experiment Name: Zm_5mM_SA_P Parameter: Age (day) Value: 10
  misc_feature: MA Experiment 20000477 PARAMETER Experiment Name: Zm_5mM_SA_P Parameter: Organism Value: Zea mays
  misc_feature: MA Experiment 20000477 PARAMETER Experiment Name: Zm_5mM_SA_P Parameter: Plant Line Value: 35A19
  misc_feature: MA Experiment 20000477 PARAMETER Experiment Name: Zm_5mM_SA_P Parameter: Timepoint (hr) Value: 48
  misc_feature: MA Experiment 20000477 PARAMETER Experiment Name: Zm_5mM_SA_P Parameter: Tissue Value: Aerial
  misc_feature: MA Experiment 20000477 PARAMETER Experiment Name: Zm_5mM_SA_P Parameter: Treatment Value: 5mM SA vs. No Treatment
  misc_feature: MA Experiment ID: 20000535 Result: Down-regulated in Transcription
  misc_feature: MA Experiment 20000535 PARAMETER Experiment Name: Zm_Hybrid_Seed_Dev_P Parameter: DAP Value: 30 vs. 12
  misc_feature: MA Experiment 20000535 PARAMETER Experiment Name: Zm_Hybrid_Seed_Dev_P Parameter: Organism Value: Zea mays
  misc_feature: MA Experiment 20000535 PARAMETER Experiment Name: Zm_Hybrid_Seed_Dev_P Parameter: Plant Line Value: 35A19
  misc_feature: MA Experiment 20000535 PARAMETER Experiment Name: Zm_Hybrid_Seed_Dev_P Parameter: Tissue Value: Embryo vs. Unfert Floret
aagtaggcaactaagacaaagtggcgaactcttctctgtactagctttcttcttcttcctcctcttcctcctcccaaacagactggatttcatcaagataatcctgaaactggagccaacaagcagacagagaaagaagagcaagaagaccggctcccagccgatacaaggtaggagtgagcagcgttagatcagttttcatctcaggatcgatatggtgacagtgagagaggagactcgcaaggggccatggacagagcaggaggacctgcaactggtatgcactgtccgtctgttcggtgaacgtcgttgggatttcattgccaaagtatcagggctcaaccggacaggcaagagctgccggctgcgctgggtcaactacctccaccctggcctcaagcgtgggcgcatgtctccccatgaagagcgactcatcctagagctgcacgctcggtggggaaacaggtggtccaggatagcacgccgcttgccagggcgcactgacaatgagatcaagaactactggaggacacacatgagaaagaaggcacaggagaggaagaggaacatgtctccatcgtcgtcctcgtcttcgctgacttaccagtcaggctacccagatactccatcaaccattggagttgagggacaggagcttcatggtggcagtggctgcatcacaagcatcctgaagggcacccctccggacatggatggctatcccatggaccagatatggatggaaattgaggcgccacagatgccctcggaggagagctttgttggggggaaccataatgtgtgcagcagccttgccaccccgctgccaccaccaactgtctgggaatactacccagaggcctgctggaaggttgacgatgagatcaagatggcaccacaatttcaatttggttatagtgaaggagttgggcccctgcttctgatgccataaatattgggtcagattactaagttatacacctacctagcagaagtgaagtgcttttgtagaaacaagctttagcatggatctgaatatttatctccgcgcttagaattgcaggtctatggatctatgcatggttgctatgtatctatctagtgtgcaagacaagatcatcttaatttgtcct

SEQ ID NO: 4180 - protein, 245 aa, Zea mays subsp. mays
  peptide (1)..(245): Ceres Seq. ID no. 12404469
  misc_feature (63)..(108): Pfam Name: Myb-like DNA-binding domain Pfam Description: Myb-like DNA-binding domain
  misc_feature (4)..(113): Homolog of NCBI NO: 1732513 NR Description: snapdragon myb protein 305 homolog [Arabidopsis
  misc_feature (4)..(113): Homolog of NCBI NO: 15230095 NR Description: myb family transcription factor
  misc_feature (5)..(113): Homolog of NCBI NO: 18409792 NR Description: myb family transcription factor; protein id:
  misc_feature (4)..(118): Homolog of NCBI NO: 15236297 NR Description: myb family transcription factor; protein id:
  misc_feature (9)..(120): Homolog of NCBI NO: 11967859 NR Description: Myb factor protein [Oryza sativa (japonica
  misc_feature (9)..(120): Homolog of NCBI NO: 34906070 NR Description: putative Myb factor protein
  misc_feature (41)..(241): Homolog of NCBI NO: 30697277 NR Description: myb family transcription factor [Arabidopsis
  misc_feature (6)..(230): Homolog of NCBI NO: 15231343 NR Description: Myb family transcription factor
  misc_feature (1)..(241): Homolog of NCBI NO: 15238519 NR Description: myb family transcription factor; protein id:
  misc_feature (1)..(241): Homolog of NCBI NO: 11358547 NR Description: myb-related transcription factor MYB59
MVTVREETRKGPWTEQEDLQLVCTVRLFGERRWDFIAKVSGLNRTGKSCRLRWVNYLHPGLKRGRMSPHEERLILELHARWGNRWSRIARRLPGRTDNEIKNYWRTHMRKKAQERKRNMSPSSSSSSLTYQSGYPDTPSTIGVEGQELHGGSGCITSILKGTPPDMDGYPMDQIWMEIEAPQMPSEESFVGGNHNVCSSLATPLPPPTVWEYYPEACWKVDDEIKMAPQFQFGYSEGVGPLLLMP

SEQ ID NO: 4181 - protein, 180 aa, Zea mays subsp. mays
  peptide (1)..(180): Ceres Seq. ID no. 12404470
  misc_feature (1)..(43): Pfam Name: Myb-like DNA-binding domain Pfam Description: Myb-like DNA-binding domain
  misc_feature (1)..(48): Homolog of NCBI NO: 1732513 NR Description: snapdragon myb protein 305 homolog [Arabidopsis
  misc_feature (1)..(48): Homolog of NCBI NO: 15230095 NR Description: myb family transcription factor
  misc_feature (1)..(48): Homolog of NCBI NO: 18409792 NR Description: myb family transcription factor; protein id:
  misc_feature (1)..(53): Homolog of NCBI NO: 15236297 NR Description: myb family transcription factor; protein id:
  misc_feature (1)..(55): Homolog of NCBI NO: 11967859 NR Description: Myb factor protein [Oryza sativa (japonica
  misc_feature (1)..(55): Homolog of NCBI NO: 34906070 NR Description: putative Myb factor protein
  misc_feature (1)..(176): Homolog of NCBI NO: 30697277 NR Description: myb family transcription factor [Arabidopsis
  misc_feature (1)..(165): Homolog of NCBI NO: 15231343 NR Description: Myb family transcription factor
  misc_feature (1)..(176): Homolog of NCBI NO: 15238519 NR Description: myb family transcription factor; protein id:
  misc_feature (1)..(176): Homolog of NCBI NO: 11358547 NR Description: myb-related transcription factor MYB59
MSPHEERLILELHARWGNRWSRIARRLPGRTDNEIKNYWRTHMRKKAQERKRNMSPSSSSSSLTYQSGYPDTPSTIGVEGQELHGGSGCITSILKGTPPDMDGYPMDQIWMEIEAPQMPSEESFVGGNHNVCSSLATPLPPPTVWEYYPEACWKVDDEIKMAPQFQFGYSEGVGPLLLMP

SEQ ID NO: 4182 - protein, 138 aa, Zea mays subsp. mays
  peptide (1)..(138): Ceres Seq. ID no. 12404471
  misc_feature (1)..(134): Homolog of NCBI NO: 15238519 NR Description: myb family transcription factor; protein id:
  misc_feature (1)..(134): Homolog of NCBI NO: 11358547 NR Description: myb-related transcription factor MYB59
  misc_feature (1)..(23): Homolog of NCBI NO: 23476305 NR Description: myb-like transcription factor 5 [Gossypium
  misc_feature (1)..(23): Homolog of NCBI NO: 14249017 NR Description: myb-like transcription factor Myb 5 [Gossypium
  misc_feature (1)..(23): Homolog of NCBI NO: 7438339 NR Description: myb-related protein - upland cotton
  misc_feature (1)..(11): Homolog of NCBI NO: 15236297 NR Description: myb family transcription factor; protein id:
  misc_feature (1)..(13): Homolog of NCBI NO: 11967859 NR Description: Myb factor protein [Oryza sativa (japonica
  misc_feature (1)..(13): Homolog of NCBI NO: 34906070 NR Description: putative Myb factor protein
  misc_feature (1)..(134): Homolog of NCBI NO: 30697277 NR Description: myb family transcription factor [Arabidopsis
  misc_feature (1)..(123): Homolog of NCBI NO: 15231343 NR Description: Myb family transcription factor
MRKKAQERKRNMSPSSSSSSLTYQSGYPDTPSTIGVEGQELHGGSGCITSILKGTPPDMDGYPMDQIWMEIEAPQMPSEESFVGGNHNVCSSLATPLPPPTVWEYYPEACWKVDDEIKMAPQFQFGYSEGVGPLLLMP

SEQ ID NO: 4183 - DNA, 958 bp, Zea mays subsp. mays
  misc_feature (1)..(958): Ceres Seq. ID no. 13571162
  misc_feature: MA Experiment ID: 108529 Result: Down-regulated in Transcription
  misc_feature: MA Experiment 108529 PARAMETER Experiment Name: Zm_Imbibed_Seeds_P Parameter: Age (day) Value: 5 vs. 2
  misc_feature: MA Experiment 108529 PARAMETER Experiment Name: Zm_Imbibed_Seeds_P Parameter: Organism Value: Zea mays
  misc_feature: MA Experiment 108529 PARAMETER Experiment Name: Zm_Imbibed_Seeds_P Parameter: Plant Line Value: 35A19
  misc_feature: MA Experiment 108529 PARAMETER Experiment Name: Zm_Imbibed_Seeds_P Parameter: Tissue Value: Roots vs. Embryo
  misc_feature: MA Experiment ID: 108535 Result: Up-regulated in Transcription
  misc_feature: MA Experiment 108535 PARAMETER Experiment Name: Zm_Meristem_P Parameter: Age (day) Value: 8
  misc_feature: MA Experiment 108535 PARAMETER Experiment Name: Zm_Meristem_P Parameter: Organism Value: Zea mays
  misc_feature: MA Experiment 108535 PARAMETER Experiment Name: Zm_Meristem_P Parameter: Plant Line Value: 35A19
  misc_feature: MA Experiment 108535 PARAMETER Experiment Name: Zm_Meristem_P Parameter: Tissue Value: Root Meristem vs. Above Root Meristem
  misc_feature: MA Experiment ID: 108556 Result: Down-regulated in Transcription
  misc_feature: MA Experiment 108556 PARAMETER Experiment Name: Zm_Drought_P Parameter: Age (day) Value: 9
  misc_feature: MA Experiment 108556 PARAMETER Experiment Name: Zm_Drought_P Parameter: Organism Value: Zea mays
  misc_feature: MA Experiment 108556 PARAMETER Experiment Name: Zm_Drought_P Parameter: Plant Line Value: 35A19
  misc_feature: MA Experiment 108556 PARAMETER Experiment Name: Zm_Drought_P Parameter: Timepoint (hr) Value: 24
  misc_feature: MA Experiment 108556 PARAMETER Experiment Name: Zm_Drought_P Parameter: Tissue Value: Aerial
  misc_feature: MA Experiment 108556 PARAMETER Experiment Name: Zm_Drought_P Parameter: Treatment Value: Drought vs. No Drought
  misc_feature: MA Experiment ID: 20000478 Result: Down-regulated in Transcription
  misc_feature: MA Experiment 20000478 PARAMETER Experiment Name: Zm_5mM_SA_P Parameter: Age (day) Value: 11
  misc_feature: MA Experiment 20000478 PARAMETER Experiment Name: Zm_5mM_SA_P Parameter: Organism Value: Zea mays
  misc_feature: MA Experiment 20000478 PARAMETER Experiment Name: Zm_5mM_SA_P Parameter: Plant Line Value: 35A19
  misc_feature: MA Experiment 20000478 PARAMETER Experiment Name: Zm_5mM_SA_P Parameter: Timepoint (hr) Value: 72
  misc_feature: MA Experiment 20000478 PARAMETER Experiment Name: Zm_5mM_SA_P Parameter: Tissue Value: Aerial
  misc_feature: MA Experiment 20000478 PARAMETER Experiment Name: Zm_5mM_SA_P Parameter: Treatment Value: 5mM SA vs. No Treatment
  misc_feature: MA Experiment ID: 20000492 Result: Up-regulated in Transcription
  misc_feature: MA Experiment 20000492 PARAMETER Experiment Name: Zm_Hybrid_Seed_Dev_P Parameter: DAP Value: 12
  misc_feature: MA Experiment 20000492 PARAMETER Experiment Name: Zm_Hybrid_Seed_Dev_P Parameter: Organism Value: Zea mays
  misc_feature: MA Experiment 20000492 PARAMETER Experiment Name: Zm_Hybrid_Seed_Dev_P Parameter: Plant Line Value: 35A19
  misc_feature: MA Experiment 20000492 PARAMETER Experiment Name: Zm_Hybrid_Seed_Dev_P Parameter: Tissue Value: Fert Kernel vs. Unfert Floret
  misc_feature: MA Experiment ID: 20000535 Result: Up-regulated in Transcription
  misc_feature: MA Experiment 20000535 PARAMETER Experiment Name: Zm_Hybrid_Seed_Dev_P Parameter: DAP Value: 30 vs. 12
  misc_feature: MA Experiment 20000535 PARAMETER Experiment Name: Zm_Hybrid_Seed_Dev_P Parameter: Organism Value: Zea mays
  misc_feature: MA Experiment 20000535 PARAMETER Experiment Name: Zm_Hybrid_Seed_Dev_P Parameter: Plant Line Value: 35A19
  misc_feature: MA Experiment 20000535 PARAMETER Experiment Name: Zm_Hybrid_Seed_Dev_P Parameter: Tissue Value: Embryo vs. Unfert Floret
  misc_feature: MA Experiment ID: 20000626 Result: Up-regulated in Transcription
  misc_feature: MA Experiment 20000626 PARAMETER Experiment Name: Zm_Herbicide-Treatments_P Parameter: Timepoint (hr) Value: 12
  misc_feature: MA Experiment 20000626 PARAMETER Experiment Name: Zm_Herbicide-Treatments_P Parameter: Tissue Value: Aerial
  misc_feature: MA Experiment 20000626 PARAMETER Experiment Name: Zm_Herbicide-Treatments_P Parameter: Treatment Value: Roundup vs. No Treatment
  misc_feature: MA Experiment ID: 20000627 Result: Up-regulated in Transcription
  misc_feature: MA Experiment 20000627 PARAMETER Experiment Name: Zm_Herbicide-Treatments_P Parameter: Timepoint (hr) Value: 12
  misc_feature: MA Experiment 20000627 PARAMETER Experiment Name: Zm_Herbicide-Treatments_P Parameter: Tissue Value: Aerial
  misc_feature: MA Experiment 20000627 PARAMETER Experiment Name: Zm_Herbicide-Treatments_P Parameter: Treatment Value: Finale vs. No Treatment
  misc_feature: MA Experiment ID: 20000632 Result: Down-regulated in Transcription
  misc_feature: MA Experiment 20000632 PARAMETER Experiment Name: Zm_Herbicide-Treatments_P Parameter: Timepoint (hr) Value: 4
  misc_feature: MA Experiment 20000632 PARAMETER Experiment Name: Zm_Herbicide-Treatments_P Parameter: Tissue Value: Aerial
  misc_feature: MA Experiment 20000632 PARAMETER Experiment Name: Zm_Herbicide-Treatments_P Parameter: Treatment Value: Glean vs. No Treatment
aaaatttcccccccaatttccctccaccgaagcatcacccaatcagatccgatttcgtagagatgaagccggcagtagaggcggaggctgacgagcgagcggcggaggagatggcacctaagaaggcagcggctgccaagaaagcggccgaggaagttgaggtggaggaggtggtggacggggacgaggcggtcgatggggagggcgacggtgacgaggacgacgatggggaaggcggtgacgaggaggatgatgatgaggaggtggatggggaggagaaggaggcggcaggggttgtggagatctccgacgaagacgacgacgacggtgacggggaggcggacgacgacgacgacgatgacggggatgacgacgacgacgacgacgaggactcagacgacgaggaagaggtcgacggtgaagacgatcaggaggaggagctgggaaccgagtatctggttcagcctcttgggcgggctgaagacgaagagcactcgagcgactttgaaccggaagaaaacggtgagggtgccgacgatgaggagatcgatgaagaggacgatgacggtgaggactctgtgaaggcgcagacctctacgaagaggaagaggtcaggcgacgaagaagaagaagacgacgacgatggggatgatgatggtgacgatgatgacgatgggaggccaccatcaaagcgatagtatggttagctctagttttgtagctgtgtccttgggtgtttggtaggtaggtagtgctgctgatgttggtttagaagaactcatcatcacctgggatatgtgtgtgatttggcttggccgatggatgaatgatgaaggtcttgtacttgttgctgcttctttcatgttgatgaactcgcactgattcactgtacatgctagcttctaattgtctgtctagacagctttatgggtttaactagaatcggatttttttccct

SEQ ID NO: 4184 - protein, 231 aa, Zea mays subsp. mays
  peptide (1)..(231): Ceres Seq. ID no. 13571163
  misc_feature (45)..(211): Pfam Name: Chromadorea ALT protein Pfam Description: Chromadorea ALT protein
  misc_feature (21)..(224): Homolog of NCBI NO: 34894890 NR Description: B1140D12.10 [Oryza sativa (japonica
  misc_feature (25)..(230): Homolog of NCBI NO: 18401985 NR Description: expressed protein [Arabidopsis thaliana]
  misc_feature (59)..(224): Homolog of NCBI NO: 35210494 NR Description: aspartic acid-rich protein aspolin2 [Theragra
  misc_feature (59)..(224): Homolog of NCBI NO: 35210492 NR Description: aspartic acid-rich protein aspolin1 [Theragra
  misc_feature (59)..(224): Homolog of NCBI NO: 35210494 NR Description: aspartic acid-rich protein aspolin2 [Theragra
  misc_feature (50)..(224): Homolog of NCBI NO: 33284873 NR Description: SI:bZ1G18.2 (novel protein similar to human
  misc_feature (52)..(224): Homolog of NCBI NO: 35210492 NR Description: aspartic acid-rich protein aspolin1 [Theragra
  misc_feature (52)..(224): Homolog of NCBI NO: 35210494 NR Description: aspartic acid-rich protein aspolin2 [Theragra
  misc_feature (59)..(224): Homolog of NCBI NO: 35210494 NR Description: aspartic acid-rich protein aspolin2 [Theragra
  misc_feature (59)..(224): Homolog of NCBI NO: 35210492 NR Description: aspartic acid-rich protein aspolin1 [Theragra
NFPPNFPPPKHHPIRSDFVEMKPAVEAEADERAAEEMAPKKAAAAKKAAEEVEVEEVVDGDEAVDGEGDGDEDDDGEGGDEEDDDEEVDGEEKEAAGVVEISDEDDDDGDGEADDDDDDDGDDDDDDDEDSDDEEEVDGEDDQEEELGTEYLVQPLGRAEDEEHSSDFEPEENGEGADDEEIDEEDDDGEDSVKAQTSTKRKRSGDEEEEDDDDGDDDGDDDDDGRPPSKR

SEQ ID NO: 4185 - protein, 211 aa, Zea mays subsp. mays
  peptide (1)..(211): Ceres Seq. ID no. 13571164
  misc_feature (25)..(191): Pfam Name: Chromadorea ALT protein Pfam Description: Chromadorea ALT protein
  misc_feature (1)..(204): Homolog of NCBI NO: 34894890 NR Description: B1140D12.10 [Oryza sativa (japonica
  misc_feature (5)..(210): Homolog of NCBI NO: 18401985 NR Description: expressed protein [Arabidopsis thaliana]
  misc_feature (39)..(204): Homolog of NCBI NO: 35210494 NR Description: aspartic acid-rich protein aspolin2 [Theragra
  misc_feature (39)..(204): Homolog of NCBI NO: 35210492 NR Description: aspartic acid-rich protein aspolin1 [Theragra
  misc_feature (39)..(204): Homolog of NCBI NO: 35210494 NR Description: aspartic acid-rich protein aspolin2 [Theragra
  misc_feature (30)..(204): Homolog of NCBI NO: 33284873 NR Description: SI:bZ1G18.2 (novel protein similar to human
  misc_feature (32)..(204): Homolog of NCBI NO: 35210492 NR Description: aspartic acid-rich protein aspolin1 [Theragra
  misc_feature (32)..(204): Homolog of NCBI NO: 35210494 NR Description: aspartic acid-rich protein aspolin2 [Theragra
  misc_feature (39)..(204): Homolog of NCBI NO: 35210494 NR Description: aspartic acid-rich protein aspolin2 [Theragra
  misc_feature (39)..(204): Homolog of NCBI NO: 35210492 NR Description: aspartic acid-rich protein aspolin1 [Theragra
MKPAVEAEADERAAEEMAPKKAAAAKKAAEEVEVEEVVDGDEAVDGEGDGDEDDDGEGGDEEDDDEEVDGEEKEAAGVVEISDEDDDDGDGEADDDDDDDGDDDDDDDEDSDDEEEVDGEDDQEEELGTEYLVQPLGRAEDEEHSSDFEPEENGEGADDEEIDEEDDDGEDSVKAQTSTKRKRSGDEEEEDDDDGDDDGDDDDDGRPPSKR

SEQ ID NO: 4186 - protein, 195 aa, Zea mays subsp. mays
  peptide (1)..(195): Ceres Seq. ID no. 13571165
  misc_feature (9)..(175): Pfam Name: Chromadorea ALT protein Pfam Description: Chromadorea ALT protein
  misc_feature (1)..(188): Homolog of NCBI NO: 34894890 NR Description: B1140D12.10 [Oryza sativa (japonica
  misc_feature (1)..(194): Homolog of NCBI NO: 18401985 NR Description: expressed protein [Arabidopsis thaliana]
  misc_feature (23)..(188): Homolog of NCBI NO: 35210494 NR Description: aspartic acid-rich protein aspolin2 [Theragra
  misc_feature (23)..(188): Homolog of NCBI NO: 35210492 NR Description: aspartic acid-rich protein aspolin1 [Theragra
  misc_feature (23)..(188): Homolog of NCBI NO: 35210494 NR Description: aspartic acid-rich protein aspolin2 [Theragra
  misc_feature (14)..(188): Homolog of NCBI NO: 33284873 NR Description: SI:bZ1G18.2 (novel protein similar to human
  misc_feature (16)..(188): Homolog of NCBI NO: 35210492 NR Description: aspartic acid-rich protein aspolin1 [Theragra
  misc_feature (16)..(188): Homolog of NCBI NO: 35210494 NR Description: aspartic acid-rich protein aspolin2 [Theragra
  misc_feature (23)..(188): Homolog of NCBI NO: 35210494 NR Description: aspartic acid-rich protein aspolin2 [Theragra
  misc_feature (23)..(188): Homolog of NCBI NO: 35210492 NR Description: aspartic acid-rich protein aspolin1 [Theragra
MAPKKAAAAKKAAEEVEVEEVVDGDEAVDGEGDGDEDDDGEGGDEEDDDEEVDGEEKEAAGVVEISDEDDDDGDGEADDDDDDDGDDDDDDDEDSDDEEEVDGEDDQEEELGTEYLVQPLGRAEDEEHSSDFEPEENGEGADDEEIDEEDDDGEDSVKAQTSTKRKRSGDEEEEDDDDGDDDGDDDDDGRPPSKR

SEQ ID NO: 4187 - DNA, 1252 bp, Zea mays subsp. mays
  misc_feature (1)..(1252): Ceres Seq. ID no. 12365355
  misc_feature: MA Experiment ID: 108504 Result: Up-regulated in Transcription
  misc_feature: MA Experiment 108504 PARAMETER Experiment Name: Zm_Drought_P Parameter: Age (day) Value: 8
  misc_feature: MA Experiment 108504 PARAMETER Experiment Name: Zm_Drought_P Parameter: Organism Value: Zea mays
  misc_feature: MA Experiment 108504 PARAMETER Experiment Name: Zm_Drought_P Parameter: Plant Line Value: 35A19
  misc_feature: MA Experiment 108504 PARAMETER Experiment Name: Zm_Drought_P Parameter: Timepoint (hr) Value: 12
  misc_feature: MA Experiment 108504 PARAMETER Experiment Name: Zm_Drought_P Parameter: Tissue Value: Aerial
  misc_feature: MA Experiment 108504 PARAMETER Experiment Name: Zm_Drought_P Parameter: Treatment Value: Drought vs. No Drought
  misc_feature: MA Experiment ID: 108526 Result: Up-regulated in Transcription
  misc_feature: MA Experiment 108526 PARAMETER Experiment Name: Zm_5mM_NO_P Parameter: Age (day) Value: 8
  misc_feature: MA Experiment 108526 PARAMETER Experiment Name: Zm_5mM_NO_P Parameter: Organism Value: Zea mays
  misc_feature: MA Experiment 108526 PARAMETER Experiment Name: Zm_5mM_NO_P Parameter: Plant Line Value: 35A19
  misc_feature: MA Experiment 108526 PARAMETER Experiment Name: Zm_5mM_NO_P Parameter: Timepoint (hr) Value: 1
  misc_feature: MA Experiment 108526 PARAMETER Experiment Name: Zm_5mM_NO_P Parameter: Tissue Value: Aerial
  misc_feature: MA Experiment 108526 PARAMETER Experiment Name: Zm_5mM_NO_P Parameter: Treatment Value: 5mM NO vs. No Treatment
  misc_feature: MA Experiment ID: 108527 Result: Up-regulated in Transcription
  misc_feature: MA Experiment 108527 PARAMETER Experiment Name: Zm_5mM_NO_P Parameter: Age (day) Value: 8
  misc_feature: MA Experiment 108527 PARAMETER Experiment Name: Zm_5mM_NO_P Parameter: Organism Value: Zea mays
  misc_feature: MA Experiment 108527 PARAMETER Experiment Name: Zm_5mM_NO_P Parameter: Plant Line Value: 35A19
  misc_feature: MA Experiment 108527 PARAMETER Experiment Name: Zm_5mM_NO_P Parameter: Timepoint (hr) Value: 6
  misc_feature: MA Experiment 108527 PARAMETER Experiment Name: Zm_5mM_NO_P Parameter: Tissue Value: Aerial
  misc_feature: MA Experiment 108527 PARAMETER Experiment Name: Zm_5mM_NO_P Parameter: Treatment Value: 5mM NO vs. No Treatment
  misc_feature: MA Experiment ID: 108528 Result: Down-regulated in Transcription
  misc_feature: MA Experiment 108528 PARAMETER Experiment Name: Zm_Imbibed_Seeds_P Parameter: Age (day) Value: 5 vs. 2
  misc_feature: MA Experiment 108528 PARAMETER Experiment Name: Zm_Imbibed_Seeds_P Parameter: Organism Value: Zea mays
  misc_feature: MA Experiment 108528 PARAMETER Experiment Name: Zm_Imbibed_Seeds_P Parameter: Plant Line Value: 35A19
  misc_feature: MA Experiment 108528 PARAMETER Experiment Name: Zm_Imbibed_Seeds_P Parameter: Tissue Value: Aerial vs. Embryo
  misc_feature: MA Experiment ID: 108529 Result: Down-regulated in Transcription
  misc_feature: MA Experiment 108529 PARAMETER Experiment Name: Zm_Imbibed_Seeds_P Parameter: Age (day) Value: 5 vs. 2
  misc_feature: MA Experiment 108529 PARAMETER Experiment Name: Zm_Imbibed_Seeds_P Parameter: Organism Value: Zea mays
  misc_feature: MA Experiment 108529 PARAMETER Experiment Name: Zm_Imbibed_Seeds_P Parameter: Plant Line Value: 35A19
  misc_feature: MA Experiment 108529 PARAMETER Experiment Name: Zm_Imbibed_Seeds_P Parameter: Tissue Value: Roots vs. Embryo
  misc_feature: MA Experiment ID: 108530 Result: Down-regulated in Transcription
  misc_feature: MA Experiment 108530 PARAMETER Experiment Name: Zm_Imbibed_Seeds_P Parameter: Age (day) Value: 6 vs. 2
  misc_feature: MA Experiment 108530 PARAMETER Experiment Name: Zm_Imbibed_Seeds_P Parameter: Organism Value: Zea mays
  misc_feature: MA Experiment 108530 PARAMETER Experiment Name: Zm_Imbibed_Seeds_P Parameter: Plant Line Value: 35A19
  misc_feature: MA Experiment 108530 PARAMETER Experiment Name: Zm_Imbibed_Seeds_P Parameter: Tissue Value: Aerial vs. Embryo
  misc_feature: MA Experiment ID: 108532 Result: Down-regulated in Transcription
  misc_feature: MA Experiment 108532 PARAMETER Experiment Name: Zm_20uM_KNO3_H-to-L_P Parameter: Age (day) Value: 11
  misc_feature: MA Experiment 108532 PARAMETER Experiment Name: Zm_20uM_KNO3_H-to-L_P Parameter: Organism Value: Zea mays
  misc_feature: MA Experiment 108532 PARAMETER Experiment Name: Zm_20uM_KNO3_H-to-L_P Parameter: Plant Line Value: 35A19
  misc_feature: MA Experiment 108532 PARAMETER Experiment Name: Zm_20uM_KNO3_H-to-L_P Parameter: Timepoint (hr) Value: 16
  misc_feature: MA Experiment 108532 PARAMETER Experiment Name: Zm_20uM_KNO3_H-to-L_P Parameter: Tissue Value: Roots
  misc_feature: MA Experiment 108532 PARAMETER Experiment Name: Zm_20uM_KNO3_H-to-L_P Parameter: Treatment Value: 20uM KNO3 vs. 60mM KNO3
  misc_feature: MA Experiment ID: 108535 Result: Down-regulated in Transcription
  misc_feature: MA Experiment 108535 PARAMETER Experiment Name: Zm_Meristem_P Parameter: Age (day) Value: 8
  misc_feature: MA Experiment 108535 PARAMETER Experiment Name: Zm_Meristem_P Parameter: Organism Value: Zea mays
  misc_feature: MA Experiment 108535 PARAMETER Experiment Name: Zm_Meristem_P Parameter: Plant Line Value: 35A19
  misc_feature: MA Experiment 108535 PARAMETER Experiment Name: Zm_Meristem_P Parameter: Tissue Value: Root Meristem vs. Above Root Meristem
  misc_feature: MA Experiment ID: 108536 Result: Up-regulated in Transcription
  misc_feature: MA Experiment 108536 PARAMETER Experiment Name: Zm_Meristem_P Parameter: Age (day) Value: 8
  misc_feature: MA Experiment 108536 PARAMETER Experiment Name: Zm_Meristem_P Parameter: Organism Value: Zea mays
  misc_feature: MA Experiment 108536 PARAMETER Experiment Name: Zm_Meristem_P Parameter: Plant Line Value: 35A19
  misc_feature: MA Experiment 108536 PARAMETER Experiment Name: Zm_Meristem_P Parameter: Tissue Value: Shoot Meristem vs. Above Shoot Meristem
  misc_feature: MA Experiment ID: 108542 Result: Up-regulated in Transcription
  misc_feature: MA Experiment 108542 PARAMETER Experiment Name: Zm_150mM_NaCl_P Parameter: Age (day) Value: 8
  misc_feature: MA Experiment 108542 PARAMETER Experiment Name: Zm_150mM_NaCl_P Parameter: Organism Value: Zea mays
  misc_feature: MA Experiment 108542 PARAMETER Experiment Name: Zm_150mM_NaCl_P Parameter: Plant Line Value: 35A19
  misc_feature: MA Experiment 108542 PARAMETER Experiment Name: Zm_150mM_NaCl_P Parameter: Timepoint (hr) Value: 6
  misc_feature: MA Experiment 108542 PARAMETER Experiment Name: Zm_150mM_NaCl_P Parameter: Tissue Value: Aerial
  misc_feature: MA Experiment 108542 PARAMETER Experiment Name: Zm_150mM_NaCl_P Parameter: Treatment Value: 150mM NaCl vs. No Treatment
  misc_feature: MA Experiment ID: 108546 Result: Down-regulated in Transcription
  misc_feature: MA Experiment 108546 PARAMETER Experiment Name: Zm_Imbibed_Seeds_P Parameter: Age (day) Value: 3 vs. 2
  misc_feature: MA Experiment 108546 PARAMETER Experiment Name: Zm_Imbibed_Seeds_P Parameter: Organism Value: Zea mays
  misc_feature: MA Experiment 108546 PARAMETER Experiment Name: Zm_Imbibed_Seeds_P Parameter: Plant Line Value: 35A19
  misc_feature: MA Experiment 108546 PARAMETER Experiment Name: Zm_Imbibed_Seeds_P Parameter: Tissue Value: Roots vs. Embryo
  misc_feature: MA Experiment ID: 108547 Result: Down-regulated in Transcription
  misc_feature: MA Experiment 108547 PARAMETER Experiment Name: Zm_Imbibed_Seeds_P Parameter: Age (day) Value: 4 vs. 2
  misc_feature: MA Experiment 108547 PARAMETER Experiment Name: Zm_Imbibed_Seeds_P Parameter: Organism Value: Zea mays
  misc_feature: MA Experiment 108547 PARAMETER Experiment Name: Zm_Imbibed_Seeds_P Parameter: Plant Line Value: 35A19
  misc_feature: MA Experiment 108547 PARAMETER Experiment Name: Zm_Imbibed_Seeds_P Parameter: Tissue Value: Aerial vs. Embryo
  misc_feature: MA Experiment ID: 108556 Result: Up-regulated in Transcription
  misc_feature: MA Experiment 108556 PARAMETER Experiment Name: Zm_Drought_P Parameter: Age (day) Value: 9
  misc_feature: MA Experiment 108556 PARAMETER Experiment Name: Zm_Drought_P Parameter: Organism Value: Zea mays
  misc_feature: MA Experiment 108556 PARAMETER Experiment Name: Zm_Drought_P Parameter: Plant Line Value: 35A19
  misc_feature: MA Experiment 108556 PARAMETER Experiment Name: Zm_Drought_P Parameter: Timepoint (hr) Value: 24
  misc_feature: MA Experiment 108556 PARAMETER Experiment Name: Zm_Drought_P Parameter: Tissue Value: Aerial
  misc_feature: MA Experiment 108556 PARAMETER Experiment Name: Zm_Drought_P Parameter: Treatment Value: Drought vs. No Drought
  misc_feature: MA Experiment ID: 108559 Result: Up-regulated in Transcription
  misc_feature: MA Experiment 108559 PARAMETER Experiment Name: Zm_5mM_NO_P Parameter: Age (day) Value: 8
  misc_feature: MA Experiment 108559 PARAMETER Experiment Name: Zm_5mM_NO_P Parameter: Organism Value: Zea mays
  misc_feature: MA Experiment 108559 PARAMETER Experiment Name: Zm_5mM_NO_P Parameter: Plant Line Value: 35A19
  misc_feature: MA Experiment 108559 PARAMETER Experiment Name: Zm_5mM_NO_P Parameter: Timepoint (hr) Value: 12
  misc_feature: MA Experiment 108559 PARAMETER Experiment Name: Zm_5mM_NO_P Parameter: Tissue Value: Aerial
  misc_feature: MA Experiment 108559 PARAMETER Experiment Name: Zm_5mM_NO_P Parameter: Treatment Value: 5mM NO vs. No Treatment
  misc_feature: MA Experiment ID: 108689 Result: Up-regulated in Transcription
  misc_feature: MA Experiment 108689 PARAMETER Experiment Name: Zm_Drought_Roots_P Parameter: Age (day) Value: 9
  misc_feature: MA Experiment 108689 PARAMETER Experiment Name: Zm_Drought_Roots_P Parameter: Organism Value: Zea mays
  misc_feature: MA Experiment 108689 PARAMETER Experiment Name: Zm_Drought_Roots_P Parameter: Plant Line Value: 35A19
  misc_feature: MA Experiment 108689 PARAMETER Experiment Name: Zm_Drought_Roots_P Parameter: Timepoint (hr) Value: 24
  misc_feature: MA Experiment 108689 PARAMETER Experiment Name: Zm_Drought_Roots_P Parameter: Tissue Value: Roots
  misc_feature: MA Experiment 108689 PARAMETER Experiment Name: Zm_Drought_Roots_P Parameter: Treatment Value: Drought vs. No Drought
  misc_feature: MA Experiment ID: 20000477 Result: Up-regulated in Transcription
  misc_feature: MA Experiment 20000477 PARAMETER Experiment Name: Zm_5mM_SA_P Parameter: Age (day) Value: 10
  misc_feature: MA Experiment 20000477 PARAMETER Experiment Name: Zm_5mM_SA_P Parameter: Organism Value: Zea mays
  misc_feature: MA Experiment 20000477 PARAMETER Experiment Name: Zm_5mM_SA_P Parameter: Plant Line Value: 35A19
  misc_feature: MA Experiment 20000477 PARAMETER Experiment Name: Zm_5mM_SA_P Parameter: Timepoint (hr) Value: 48
  misc_feature: MA Experiment 20000477 PARAMETER Experiment Name: Zm_5mM_SA_P Parameter: Tissue Value: Aerial
  misc_feature: MA Experiment 20000477 PARAMETER Experiment Name: Zm_5mM_SA_P Parameter: Treatment Value: 5mM SA vs. No Treatment
  misc_feature: MA Experiment ID: 20000478 Result: Up-regulated in Transcription
  misc_feature: MA Experiment 20000478 PARAMETER Experiment Name: Zm_5mM_SA_P Parameter: Age (day) Value: 11
  misc_feature: MA Experiment 20000478 PARAMETER Experiment Name: Zm_5mM_SA_P Parameter: Organism Value: Zea mays
  misc_feature: MA Experiment 20000478 PARAMETER Experiment Name: Zm_5mM_SA_P Parameter: Plant Line Value: 35A19
  misc_feature: MA Experiment 20000478 PARAMETER Experiment Name: Zm_5mM_SA_P Parameter: Timepoint (hr) Value: 72
  misc_feature: MA Experiment 20000478 PARAMETER Experiment Name: Zm_5mM_SA_P Parameter: Tissue Value: Aerial
  misc_feature: MA Experiment 20000478 PARAMETER Experiment Name: Zm_5mM_SA_P Parameter: Treatment Value: 5mM SA vs. No Treatment
  misc_feature: MA Experiment ID: 20000480 Result: Up-regulated in Transcription
  misc_feature: MA Experiment 20000480 PARAMETER Experiment Name: Zm_Drought_P Parameter: Age (day) Value: 11
  misc_feature: MA Experiment 20000480 PARAMETER Experiment Name: Zm_Drought_P Parameter: Organism Value: Zea mays
  misc_feature: MA Experiment 20000480 PARAMETER Experiment Name: Zm_Drought_P Parameter: Plant Line Value: 35A19
  misc_feature: MA Experiment 20000480 PARAMETER Experiment Name: Zm_Drought_P Parameter: Timepoint (hr) Value: 72
  misc_feature: MA Experiment 20000480 PARAMETER Experiment Name: Zm_Drought_P Parameter: Tissue Value: Aerial
  misc_feature: MA Experiment 20000480 PARAMETER Experiment Name: Zm_Drought_P Parameter: Treatment Value: Drought vs. No Drought
  misc_feature: MA Experiment ID: 20000532 Result: Up-regulated in Transcription
  misc_feature: MA Experiment 20000532 PARAMETER Experiment Name: Zm_0.001percent_MeJA_P Parameter: Age (day) Value: 10
  misc_feature: MA Experiment 20000532 PARAMETER Experiment Name: Zm_0.001percent_MeJA_P Parameter: Organism Value: Zea mays
  misc_feature: MA Experiment 20000532 PARAMETER Experiment Name: Zm_0.001percent_MeJA_P Parameter: Plant Line Value: 35A19
  misc_feature: MA Experiment 20000532 PARAMETER Experiment Name: Zm_0.001percent_MeJA_P Parameter: Timepoint (hr) Value: 48
  misc_feature: MA Experiment 20000532 PARAMETER Experiment Name: Zm_0.001percent_MeJA_P Parameter: Tissue Value: Aerial
  misc_feature: MA Experiment 20000532 PARAMETER Experiment Name: Zm_0.001percent_MeJA_P Parameter: Treatment Value: 0.001percent MeJA vs. No Treatment
  misc_feature: MA Experiment ID: 20000535 Result: Up-regulated in Transcription
  misc_feature: MA Experiment 20000535 PARAMETER Experiment Name: Zm_Hybrid_Seed_Dev_P Parameter: DAP Value: 30 vs. 12
  misc_feature: MA Experiment 20000535 PARAMETER Experiment Name: Zm_Hybrid_Seed_Dev_P Parameter: Organism Value: Zea mays
  misc_feature: MA Experiment 20000535 PARAMETER Experiment Name: Zm_Hybrid_Seed_Dev_P Parameter: Plant Line Value: 35A19
  misc_feature: MA Experiment 20000535 PARAMETER Experiment Name: Zm_Hybrid_Seed_Dev_P Parameter: Tissue Value: Embryo vs. Unfert Floret
  misc_feature: MA Experiment ID: 20000626 Result: Up-regulated in Transcription
  misc_feature: MA Experiment 20000626 PARAMETER Experiment Name: Zm_Herbicide-Treatments_P Parameter: Timepoint (hr) Value: 12
  misc_feature: MA Experiment 20000626 PARAMETER Experiment Name: Zm_Herbicide-Treatments_P Parameter: Tissue Value: Aerial
  misc_feature: MA Experiment 20000626 PARAMETER Experiment Name: Zm_Herbicide-Treatments_P Parameter: Treatment Value: Roundup vs. No Treatment
  misc_feature: MA Experiment ID: 20000629 Result: Up-regulated in Transcription
  misc_feature: MA Experiment 20000629 PARAMETER Experiment Name: Zm_Herbicide-Treatments_P Parameter: Timepoint (hr) Value: 12
  misc_feature: MA Experiment 20000629 PARAMETER Experiment Name: Zm_Herbicide-Treatments_P Parameter: Tissue Value: Aerial
  misc_feature: MA Experiment 20000629 PARAMETER Experiment Name: Zm_Herbicide-Treatments_P Parameter: Treatment Value: Trimec vs. No Treatment
  misc_feature: MA Experiment ID: 20000630 Result: Up-regulated in Transcription
  misc_feature: MA Experiment 20000630 PARAMETER Experiment Name: Zm_Herbicide-Treatments_P Parameter: Timepoint (hr) Value: 4
  misc_feature: MA Experiment 20000630 PARAMETER Experiment Name: Zm_Herbicide-Treatments_P Parameter: Tissue Value: Aerial
  misc_feature: MA Experiment 20000630 PARAMETER Experiment Name: Zm_Herbicide-Treatments_P Parameter: Treatment Value: Roundup vs. No Treatment
  misc_feature: MA Experiment ID: 20000633 Result: Up-regulated in Transcription
  misc_feature: MA Experiment 20000633 PARAMETER Experiment Name: Zm_Herbicide-Treatments_P Parameter: Timepoint (hr) Value: 4
  misc_feature: MA Experiment 20000633 PARAMETER Experiment Name: Zm_Herbicide-Treatments_P Parameter: Tissue Value: Aerial
  misc_feature: MA Experiment 20000633 PARAMETER Experiment Name: Zm_Herbicide-Treatments_P Parameter: Treatment Value: Trimec vs. No Treatment
  misc_feature: MA Experiment ID: 20001606 Result: Down-regulated in Transcription
  misc_feature: MA Experiment 20001606 PARAMETER Experiment Name: Zm_50ppm_KNO3_L-to-H_P Parameter: Age (day) Value: 19
  misc_feature: MA Experiment 20001606 PARAMETER Experiment Name: Zm_50ppm_KNO3_L-to-H_P Parameter: Organism Value: Zea mays
  misc_feature: MA Experiment 20001606 PARAMETER Experiment Name: Zm_50ppm_KNO3_L-to-H_P Parameter: Plant Line Value: 35A19
  misc_feature: MA Experiment 20001606 PARAMETER Experiment Name: Zm_50ppm_KNO3_L-to-H_P Parameter: Timepoint (hr) Value: 8
  misc_feature: MA Experiment 20001606 PARAMETER Experiment Name: Zm_50ppm_KNO3_L-to-H_P Parameter: Tissue Value: Shoots
  misc_feature: MA Experiment 20001606 PARAMETER Experiment Name: Zm_50ppm_KNO3_L-to-H_P Parameter: Treatment Value: 50ppm KNO3 vs. 50ppm KCl
  misc_feature: MA Experiment ID: 20001608 Result: Down-regulated in Transcription
  misc_feature: MA Experiment 20001608 PARAMETER Experiment Name: Zm_50ppm_KNO3_L-to-H_P Parameter: Age (day) Value: 21
  misc_feature: MA Experiment 20001608 PARAMETER Experiment Name: Zm_50ppm_KNO3_L-to-H_P Parameter: Organism Value: Zea mays
  misc_feature: MA Experiment 20001608 PARAMETER Experiment Name: Zm_50ppm_KNO3_L-to-H_P Parameter: Plant Line Value: 35A19
  misc_feature: MA Experiment 20001608 PARAMETER Experiment Name: Zm_50ppm_KNO3_L-to-H_P Parameter: Timepoint (hr) Value: 48
  misc_feature: MA Experiment 20001608 PARAMETER Experiment Name: Zm_50ppm_KNO3_L-to-H_P Parameter: Tissue Value: Shoots
  misc_feature: MA Experiment 20001608 PARAMETER Experiment Name: Zm_50ppm_KNO3_L-to-H_P Parameter: Treatment Value: 50ppm KNO3 vs. 50ppm KCl
  misc_feature: MA Experiment ID: 20001613 Result: Down-regulated in Transcription
  misc_feature: MA Experiment 20001613 PARAMETER Experiment Name: Zm_50ppm_KNO3_L-to-H_P Parameter: Age (day) Value: 20
  misc_feature: MA Experiment 20001613 PARAMETER Experiment Name: Zm_50ppm_KNO3_L-to-H_P Parameter: Organism Value: Zea mays
  misc_feature: MA Experiment 20001613 PARAMETER Experiment Name: Zm_50ppm_KNO3_L-to-H_P Parameter: Plant Line Value: 35A19
  misc_feature: MA Experiment 20001613 PARAMETER Experiment Name: Zm_50ppm_KNO3_L-to-H_P Parameter: Timepoint (hr) Value: 24
  misc_feature: MA Experiment 20001613 PARAMETER Experiment Name: Zm_50ppm_KNO3_L-to-H_P Parameter: Tissue Value: Roots
  misc_feature: MA Experiment 20001613 PARAMETER Experiment Name: Zm_50ppm_KNO3_L-to-H_P Parameter: Treatment Value: 50ppm KNO3 vs. 50ppm KCl
aaggctctggctcgcgcacccctgtccctgttcgatccgcaccgcacacctagacgcacctccaactgcagcgcgccatacttgaccgcatcagcatggcatccacgggaacgacggcggcggcggcggcggtggcggtgccggaggtgaccctgcggtcgggcaacgggaagccgatgccgatggtgggcatgggcacggcgtcgttccccgtggtgcacgaggccgtcagggacgccgtgctggcggccatcgaggtggggttccgccacttcgacacggccttcctgtacggcaccgagaagccgctcggcgacgccgtggccgaggcgctgcggcgcggcctcctgcggtcccgggaggagctcttcgtcacgtccaagctgtggtgctcgcagacccacgcggacctcgtgctgccgtccctgcgggaaactctcgagaacctgcagatggagtacgtggacctgtacctgatccactggccggtgtccctcaggccggccggcgggccgcccaagttcccgaacaggaaggaggacgcggtgccgctggacgtggcgggcgtgtggcgcgccatggaggagtgccagcggctgggcctcgccagggcgatcggcgtcagcaacttcaccaccaggcacctggacaaggtcctggccatcgccgcggtcccgcccgcggtgaaccaggtggagctgaacccggcgtggcagcagcggacgctgcgggcgtactgcgtcgaccggggcgtccacgtcgccgcctactcgccgctgggagggcagaactgggacgggcggggcagcgccgtgctcgactcggaggtgctcgcggagatagccagggcgagggggaagaccgtggcacaggtggcgctgcgatggatacatgagcagggagtgacgtgcatcgtcaagagctacaacagggagaggctgaagcagaacctcgagatattcgactgggagctgaccgacgacgaccggctcaagatcaaccacatcccgcagaggaaggttgtcgaggccagcggcttgttctcgcaggagggtgagttcacctctgttgatcccgcggaactgaatactgtggaggaatgggaactggactggaaaatggcccccgcctgtcggtgttgctccgtataggaaccgaataacaacgatcgccctcggtgtttcgagctatagttacagtatggttccgtaaactttgtatgaattttctgatctaaataaagtgggttttt

SEQ ID NO: 4188 - protein, 351 aa, Zea mays subsp. mays
  peptide (1)..(351): Ceres Seq. ID no. 12365356
  misc_feature (11)..(326): Homolog of NCBI NO: 37530524 NR Description: putative NADPH-dependent oxidoreductase
  misc_feature (23)..(326): Homolog of NCBI NO: 27357979 NR Description: Putative NADPH-dependent oxidoreductase
  misc_feature (15)..(326): Homolog of NCBI NO: 37530522 NR Description: putative NADPH-dependent oxidoreductase
  misc_feature (15)..(326): Homolog of NCBI NO: 6478216 NR Description: putative NADPH-dependent oxidoreductase [Papaver
  misc_feature (12)..(326): Homolog of NCBI NO: 40781598 NR Description: reductase 2 [Hydrangea macrophylla]
  misc_feature (1)..(322): Homolog of NCBI NO: 37530540 NR Description: putative NADPH-dependent oxidoreductase
  misc_feature (15)..(326): Homolog of NCBI NO: 40781599 NR Description: reductase 1 [Hydrangea macrophylla]
  misc_feature (1)..(334): Homolog of NCBI NO: 38344822 NR Description: OSJNBa0064H22.3 [Oryza sativa (japonica
  misc_feature (12)..(335): Homolog of NCBI NO: 38344823 NR Description: OSJNBa0064H22.4 [Oryza sativa (japonica
  misc_feature (14)..(335): Homolog of NCBI NO: 38344824 NR Description: OSJNBa0064H22.5 [Oryza sativa (japonica
MASTGTTAAAAAVAVPEVTLRSGNGKPMPMVGMGTASFPVVHEAVRDAVLAAIEVGFRHFDTAFLYGTEKPLGDAVAEALRRGLLRSREELFVTSKLWCSQTHADLVLPSLRETLENLQMEYVDLYLIHWPVSLRPAGGPPKFPNRKEDAVPLDVAGVWRAMEECQRLGLARAIGVSNFTTRHLDKVLAIAAVPPAVNQVELNPAWQQRTLRAYCVDRGVHVAAYSPLGGQNWDGRGSAVLDSEVLAEIARARGKTVAQVALRWIHEQGVTCIVKSYNRERLKQNLEIFDWELTDDDRLKINHIPQRKVVEASGLFSQEGEFTSVDPAELNTVEEWELDWKMAPACRCCSV

SEQ ID NO: 4189 - protein, 324 aa, Zea mays subsp. mays
  peptide (1)..(324): Ceres Seq. ID no. 12365357
  misc_feature (1)..(299): Homolog of NCBI NO: 37530524 NR Description: putative NADPH-dependent oxidoreductase
  misc_feature (1)..(299): Homolog of NCBI NO: 27357979 NR Description: Putative NADPH-dependent oxidoreductase
  misc_feature (1)..(299): Homolog of NCBI NO: 37530522 NR Description: putative NADPH-dependent oxidoreductase
  misc_feature (1)..(299): Homolog of NCBI NO: 6478216 NR Description: putative NADPH-dependent oxidoreductase [Papaver
  misc_feature (1)..(299): Homolog of NCBI NO: 40781598 NR Description: reductase 2 [Hydrangea macrophylla]
  misc_feature (1)..(295): Homolog of NCBI NO: 37530540 NR Description: putative NADPH-dependent oxidoreductase
  misc_feature (1)..(299): Homolog of NCBI NO: 40781599 NR Description: reductase 1 [Hydrangea macrophylla]
  misc_feature (1)..(307): Homolog of NCBI NO: 38344822 NR Description: OSJNBa0064H22.3 [Oryza sativa (japonica
  misc_feature (1)..(308): Homolog of NCBI NO: 38344823 NR Description: OSJNBa0064H22.4 [Oryza sativa (japonica
  misc_feature (1)..(308): Homolog of NCBI NO: 38344824 NR Description: OSJNBa0064H22.5 [Oryza sativa (japonica
MPMVGMGTASFPVVHEAVRDAVLAAIEVGFRHFDTAFLYGTEKPLGDAVAEALRRGLLRSREELFVTSKLWCSQTHADLVLPSLRETLENLQMEYVDLYLIHWPVSLRPAGGPPKFPNRKEDAVPLDVAGVWRAMEECQRLGLARAIGVSNFTTRHLDKVLAIAAVPPAVNQVELNPAWQQRTLRAYCVDRGVHVAAYSPLGGQNWDGRGSAVLDSEVLAEIARARGKTVAQVALRWIHEQGVTCIVKSYNRERLKQNLEIFDWELTDDDRLKINHIPQRKVVEASGLFSQEGEFTSVDPAELNTVEEWELDWKMAPACRCCSV

SEQ ID NO: 4190 - protein, 322 aa, Zea mays subsp. mays
  peptide (1)..(322): Ceres Seq. ID no. 12365358
  misc_feature (1)..(297): Homolog of NCBI NO: 37530524 NR Description: putative NADPH-dependent oxidoreductase
  misc_feature (1)..(297): Homolog of NCBI NO: 27357979 NR Description: Putative NADPH-dependent oxidoreductase
  misc_feature (1)..(297): Homolog of NCBI NO: 37530522 NR Description: putative NADPH-dependent oxidoreductase
  misc_feature (1)..(297): Homolog of NCBI NO: 6478216 NR Description: putative NADPH-dependent oxidoreductase [Papaver
  misc_feature (1)..(297): Homolog of NCBI NO: 40781598 NR Description: reductase 2 [Hydrangea macrophylla]
  misc_feature (1)..(293): Homolog of NCBI NO: 37530540 NR Description: putative NADPH-dependent oxidoreductase
  misc_feature (1)..(297): Homolog of NCBI NO: 40781599 NR Description: reductase 1 [Hydrangea macrophylla]
  misc_feature (1)..(305): Homolog of NCBI NO: 38344822 NR Description: OSJNBa0064H22.3 [Oryza sativa (japonica
  misc_feature (1)..(306): Homolog of NCBI NO: 38344823 NR Description: OSJNBa0064H22.4 [Oryza sativa (japonica
  misc_feature (1)..(306): Homolog of NCBI NO: 38344824 NR Description: OSJNBa0064H22.5 [Oryza sativa (japonica
MVGMGTASFPVVHEAVRDAVLAAIEVGFRHFDTAFLYGTEKPLGDAVAEALRRGLLRSREELFVTSKLWCSQTHADLVLPSLRETLENLQMEYVDLYLIHWPVSLRPAGGPPKFPNRKEDAVPLDVAGVWRAMEECQRLGLARAIGVSNFTTRHLDKVLAIAAVPPAVNQVELNPAWQQRTLRAYCVDRGVHVAAYSPLGGQNWDGRGSAVLDSEVLAEIARARGKTVAQVALRWIHEQGVTCIVKSYNRERLKQNLEIFDWELTDDDRLKINHIPQRKVVEASGLFSQEGEFTSVDPAELNTVEEWELDWKMAPACRCCSV

SEQ ID NO: 4191 - DNA, 1100 bp, Zea mays subsp. mays
  misc_feature (1)..(1100): Ceres Seq. ID no. 13571176
  misc_feature: MA Experiment ID: 108535 Result: Up-regulated in Transcription
  misc_feature: MA Experiment 108535 PARAMETER Experiment Name: Zm_Meristem_P Parameter: Age (day) Value: 8
  misc_feature: MA Experiment 108535 PARAMETER Experiment Name: Zm_Meristem_P Parameter: Organism Value: Zea mays
  misc_feature: MA Experiment 108535 PARAMETER Experiment Name: Zm_Meristem_P Parameter: Plant Line Value: 35A19
  misc_feature: MA Experiment 108535 PARAMETER Experiment Name: Zm_Meristem_P Parameter: Tissue Value: Root Meristem vs. Above Root Meristem
  misc_feature: MA Experiment ID: 20000488 Result: Up-regulated in Transcription
  misc_feature: MA Experiment 20000488 PARAMETER Experiment Name: Zm_50mM_NH4NO3_L_to_H_P Parameter: Organism Value: Zea mays
  misc_feature: MA Experiment 20000488 PARAMETER Experiment Name: Zm_50mM_NH4NO3_L_to_H_P Parameter: Timepoint (hr) Value: 8
  misc_feature: MA Experiment 20000488 PARAMETER Experiment Name: Zm_50mM_NH4NO3_L_to_H_P Parameter: Tissue Value: Leaves
  misc_feature: MA Experiment 20000488 PARAMETER Experiment Name: Zm_50mM_NH4NO3_L_to_H_P Parameter: Treatment Value: 50mM NH4NO3 vs. 100mM Mannitol
  misc_feature: MA Experiment ID: 20000492 Result: Up-regulated in Transcription
  misc_feature: MA Experiment 20000492 PARAMETER Experiment Name: Zm_Hybrid_Seed_Dev_P Parameter: DAP Value: 12
  misc_feature: MA Experiment 20000492 PARAMETER Experiment Name: Zm_Hybrid_Seed_Dev_P Parameter: Organism Value: Zea mays
  misc_feature: MA Experiment 20000492 PARAMETER Experiment Name: Zm_Hybrid_Seed_Dev_P Parameter: Plant Line Value: 35A19
  misc_feature: MA Experiment 20000492 PARAMETER Experiment Name: Zm_Hybrid_Seed_Dev_P Parameter: Tissue Value: Fert Kernel vs. Unfert Floret
  misc_feature: MA Experiment ID: 20000626 Result: Up-regulated in Transcription
  misc_feature: MA Experiment 20000626 PARAMETER Experiment Name: Zm_Herbicide-Treatments_P Parameter: Timepoint (hr) Value: 12
  misc_feature: MA Experiment 20000626 PARAMETER Experiment Name: Zm_Herbicide-Treatments_P Parameter: Tissue Value: Aerial
  misc_feature: MA Experiment 20000626 PARAMETER Experiment Name: Zm_Herbicide-Treatments_P Parameter: Treatment Value: Roundup vs. No Treatment
  misc_feature: MA Experiment ID: 20001606 Result: Up-regulated in Transcription
  misc_feature: MA Experiment 20001606 PARAMETER Experiment Name: Zm_50ppm_KNO3_L-to-H_P Parameter: Age (day) Value: 19
  misc_feature: MA Experiment 20001606 PARAMETER Experiment Name: Zm_50ppm_KNO3_L-to-H_P Parameter: Organism Value: Zea mays
  misc_feature: MA Experiment 20001606 PARAMETER Experiment Name: Zm_50ppm_KNO3_L-to-H_P Parameter: Plant Line Value: 35A19
  misc_feature: MA Experiment 20001606 PARAMETER Experiment Name: Zm_50ppm_KNO3_L-to-H_P Parameter: Timepoint (hr) Value: 8
  misc_feature: MA Experiment 20001606 PARAMETER Experiment Name: Zm_50ppm_KNO3_L-to-H_P Parameter: Tissue Value: Shoots
  misc_feature: MA Experiment 20001606 PARAMETER Experiment Name: Zm_50ppm_KNO3_L-to-H_P Parameter: Treatment Value: 50ppm KNO3 vs. 50ppm KCl
aacaggtgtcccagccgcgcgccgcacgccctgttgccttctctcgacttcgagagcaccgccgcacggcataacgctcgcacggccgagccccgacattctaccgcactccctccgctgcacccctttccattctaccgccggcgacgccaaagttcttgggcctcctcatcggcgacttttccgccggcgacaggaaacaacgaaccaaaccacttctctgtcgagaggcgtcgcgctcctctcttcgccctctgctgttatttttcttaacccggctttctctcgattgctgcgtaaagttgaagatgaggaagctcaagttccatgagcagaagctcctcaagaggcacaatttcttggagtacaagagggagggcggccaccgcgaggcgctcgtcacacagcgctaccgcctcgtggagagggacgactacaagaagtacaatgggatatgcttaatggtgcaaaagctcgttaacatcataaagcagatggacccaagagaccctttcagaatccagatgacagacttgattctcgataagctgtataatatgggtgtaatttcaacaaaanagagcttgttaaagtgtgagaaactttcagtgagcgccttntgcaggcggagacttgcaacagttatggtgaagctcaagtttgcagagcaccttaaggaggctgtgacgtacatcgaacaggggcatgtgcgtgtcggtccagatgcagtcacggacccagcctttcttgtgaccagaaacatggaggacttcatcacctgggtggattcctcaaagatcaagaggaaggtcatggagtacaatgatgcattagatgattatgatgccatgttntgagaaaataattctgcagaaatttatgtgcccgtcagtaatgtaatnttaagcctgccacatatgggtcttttntgaacaaatctgtgggagttgtcttntgcagggctacttgcatttgtattgcacctgcagatgtgatgcaattttgtggttggttgaaggcacattataaattcatatctgatgtagttgtgcaattgtctttgttaaagagcgggtttgcccggatttcccctagtctgc

SEQ ID NO: 4192 - protein, 182 aa, Zea mays subsp. mays
  peptide (1)..(182): Ceres Seq. ID no. 13571177
  misc_feature (1)..(106): Pfam Name: Ribosomal protein S4/S9 N-terminal domain Pfam Description: Ribosomal protein S4/S9 N-terminal domain
  misc_feature (1)..(181): Homolog of NCBI NO: 38346067 NR Description: OSJNBa0084K01.7 [Oryza sativa (japonica
  misc_feature (1)..(181): Homolog of NCBI NO: 18417773 NR Description: ribosomal protein S4/S9 related [Arabidopsis
  misc_feature (1)..(181): Homolog of NCBI NO: 21554411 NR Description: ribosomal protein-like [Arabidopsis thaliana]
  misc_feature (1)..(181): Homolog of NCBI NO: 11358773 NR Description: ribosomal protein-like - Arabidopsis thaliana
  misc_feature (1)..(179): Homolog of NCBI NO: 19527196 NR Description: RIKEN cDNA 1190002L16 [Mus musculus]
  misc_feature (1)..(179): Homolog of NCBI NO: 34864645 NR Description: similar to RIKEN cDNA 1190002L16 [Rattus
  misc_feature (1)..(179): Homolog of NCBI NO: 6321942 NR Description: part of small (ribosomal) subunit (SSU) (contains U3 snoRNA); Interacts With Mpp10; Imp3p is a specific
  misc_feature (1)..(179): Homolog of NCBI NO: 8922794 NR Description: chromosome 15 open reading frame 12; ribosomal protein S4 [Homo sapiens] >gi|7023341|dbj|BAA91929.1| protein product [Homo sapiens] >gi|12053321|emb|CAB66847.1|
  misc_feature (1)..(181): Homolog of NCBI NO: 19115815 NR Description: putative component of U3 snoRNP, required for rRNA processing [Schizosaccharomyces pombe]
  misc_feature (1)..(181): Homolog of NCBI NO: 23479022 NR Description: S4 domain, putative [Plasmodium yoelii yoelii]
  misc_feature (91)..(91): Xaa is any aa, unknown or other
  misc_feature (104)..(104): Xaa is any aa, unknown or other
  misc_feature (182)..(182): Xaa is any aa, unknown or other
MRKLKFHEQKLLKRHNFLEYKREGGHREALVTQRYRLVERDDYKKYNGICLMVQKLVNIIKQMDPRDPFRIQMTDLILDKLYNMGVISTKXSLLKCEKLSVSAXCRRRLATVMVKLKFAEHLKEAVTYIEQGHVRVGPDAVTDPAFLVTRNMEDFITWVDSSKIKRKVMEYNDALDDYDAMX

SEQ ID NO: 4193 - protein, 131 aa, Zea mays subsp. mays
  peptide (1)..(131): Ceres Seq. ID no. 13571178
  misc_feature (1)..(55): Pfam Name: Ribosomal protein S4/S9 N-terminal domain Pfam Description: Ribosomal protein S4/S9 N-terminal domain
  misc_feature (1)..(130): Homolog of NCBI NO: 38346067 NR Description: OSJNBa0084K01.7 [Oryza sativa (japonica
  misc_feature (1)..(130): Homolog of NCBI NO: 18417773 NR Description: ribosomal protein S4/S9 related [Arabidopsis
  misc_feature (1)..(130): Homolog of NCBI NO: 21554411 NR Description: ribosomal protein-like [Arabidopsis thaliana]
  misc_feature (1)..(130): Homolog of NCBI NO: 11358773 NR Description: ribosomal protein-like - Arabidopsis thaliana
  misc_feature (1)..(128): Homolog of NCBI NO: 19527196 NR Description: RIKEN cDNA 1190002L16 [Mus musculus]
  misc_feature (1)..(128): Homolog of NCBI NO: 34864645 NR Description: similar to RIKEN cDNA 1190002L16 [Rattus
  misc_feature (1)..(128): Homolog of NCBI NO: 6321942 NR Description: part of small (ribosomal) subunit (SSU) (contains U3 snoRNA); Interacts With Mpp10; Imp3p is a specific
  misc_feature (1)..(128): Homolog of NCBI NO: 8922794 NR Description: chromosome 15 open reading frame 12; ribosomal protein S4 [Homo sapiens] >gi|7023341|dbj|BAA91929.1| protein product [Homo sapiens] >gi|12053321|emb|CAB66847.1|
  misc_feature (1)..(130): Homolog of NCBI NO: 19115815 NR Description: putative component of U3 snoRNP, required for rRNA processing [Schizosaccharomyces pombe]
  misc_feature (1)..(130): Homolog of NCBI NO: 23479022 NR Description: S4 domain, putative [Plasmodium yoelii yoelii]
  misc_feature (40)..(40): Xaa is any aa, unknown or other
  misc_feature (53)..(53): Xaa is any aa, unknown or other
  misc_feature (131)..(131): Xaa is any aa, unknown or other
MVQKLVNIIKQMDPRDPFRIQMTDLILDKLYNMGVISTKXSLLKCEKLSVSAXCRRRLATVMVKLKFAEHLKEAVTYIEQGHVRVGPDAVTDPAFLVTRNMEDFITWVDSSKIKRKVMEYNDALDDYDAMX

SEQ ID NO: 4194 - protein, 120 aa, Zea mays subsp. mays
  peptide (1)..(120): Ceres Seq. ID no. 13571179
  misc_feature (45)..(92): Pfam Name: S4 domain Pfam Description: S4 domain
  misc_feature (1)..(119): Homolog of NCBI NO: 38346067 NR Description: OSJNBa0084K01.7 [Oryza sativa (japonica
  misc_feature (1)..(119): Homolog of NCBI NO: 18417773 NR Description: ribosomal protein S4/S9 related [Arabidopsis
  misc_feature (1)..(119): Homolog of NCBI NO: 21554411 NR Description: ribosomal protein-like [Arabidopsis thaliana]
  misc_feature (1)..(119): Homolog of NCBI NO: 11358773 NR Description: ribosomal protein-like - Arabidopsis thaliana
  misc_feature (1)..(117): Homolog of NCBI NO: 19527196 NR Description: RIKEN cDNA 1190002L16 [Mus musculus]
  misc_feature (1)..(117): Homolog of NCBI NO: 34864645 NR Description: similar to RIKEN cDNA 1190002L16 [Rattus
  misc_feature (1)..(117): Homolog of NCBI NO: 6321942 NR Description: part of small (ribosomal) subunit (SSU) (contains U3 snoRNA); Interacts With Mpp10; Imp3p is a specific
  misc_feature (1)..(117): Homolog of NCBI NO: 8922794 NR Description: chromosome 15 open reading frame 12; ribosomal protein S4 [Homo sapiens] >gi|7023341|dbj|BAA91929.1| protein product [Homo sapiens] >gi|12053321|emb|CAB66847.1|
  misc_feature (1)..(119): Homolog of NCBI NO: 19115815 NR Description: putative component of U3 snoRNP, required for rRNA processing [Schizosaccharomyces pombe]
  misc_feature (1)..(119): Homolog of NCBI NO: 23479022 NR Description: S4 domain, putative [Plasmodium yoelii yoelii]
  misc_feature (29)..(29): Xaa is any aa, unknown or other
  misc_feature (42)..(42): Xaa is any aa, unknown or other
  misc_feature (120)..(120): Xaa is any aa, unknown or other
MDPRDPFRIQMTDLILDKLYNMGVISTKXSLLKCEKLSVSAXCRRRLATVMVKLKFAEHLKEAVTYIEQGHVRVGPDAVTDPAFLVTRNMEDFITWVDSSKIKRKVMEYNDALDDYDAMX

SEQ ID NO: 4195 - DNA, 1949 bp, Zea mays subsp. mays
  misc_feature (1)..(1949): Ceres Seq. ID no. 12352261
  misc_feature: MA Experiment ID: 108504 Result: Up-regulated in Transcription
  misc_feature: MA Experiment 108504 PARAMETER Experiment Name: Zm_Drought_P Parameter: Age (day) Value: 8
  misc_feature: MA Experiment 108504 PARAMETER Experiment Name: Zm_Drought_P Parameter: Organism Value: Zea mays
  misc_feature: MA Experiment 108504 PARAMETER Experiment Name: Zm_Drought_P Parameter: Plant Line Value: 35A19
  misc_feature: MA Experiment 108504 PARAMETER Experiment Name: Zm_Drought_P Parameter: Timepoint (hr) Value: 12
  misc_feature: MA Experiment 108504 PARAMETER Experiment Name: Zm_Drought_P Parameter: Tissue Value: Aerial
  misc_feature: MA Experiment 108504 PARAMETER Experiment Name: Zm_Drought_P Parameter: Treatment Value: Drought vs. No Drought
  misc_feature: MA Experiment ID: 108527 Result: Up-regulated in Transcription
  misc_feature: MA Experiment 108527 PARAMETER Experiment Name: Zm_5mM_NO_P Parameter: Age (day) Value: 8
  misc_feature: MA Experiment 108527 PARAMETER Experiment Name: Zm_5mM_NO_P Parameter: Organism Value: Zea mays
  misc_feature: MA Experiment 108527 PARAMETER Experiment Name: Zm_5mM_NO_P Parameter: Plant Line Value: 35A19
  misc_feature: MA Experiment 108527 PARAMETER Experiment Name: Zm_5mM_NO_P Parameter: Timepoint (hr) Value: 6
  misc_feature: MA Experiment 108527 PARAMETER Experiment Name: Zm_5mM_NO_P Parameter: Tissue Value: Aerial
  misc_feature: MA Experiment 108527 PARAMETER Experiment Name: Zm_5mM_NO_P Parameter: Treatment Value: 5mM NO vs. No Treatment
  misc_feature: MA Experiment ID: 108534 Result: Up-regulated in Transcription
  misc_feature: MA Experiment 108534 PARAMETER Experiment Name: Zm_4deg_Cold_P Parameter: Age (hr) Value: 8
  misc_feature: MA Experiment 108534 PARAMETER Experiment Name: Zm_4deg_Cold_P Parameter: Organism Value: Zea mays
  misc_feature: MA Experiment 108534 PARAMETER Experiment Name: Zm_4deg_Cold_P Parameter: Plant Line Value: 35A19
  misc_feature: MA Experiment 108534 PARAMETER Experiment Name: Zm_4deg_Cold_P Parameter: Temperature (deg C) Value: 4 vs. 22
  misc_feature: MA Experiment 108534 PARAMETER Experiment Name: Zm_4deg_Cold_P Parameter: Timepoint (hr) Value: 6
  misc_feature: MA Experiment 108534 PARAMETER Experiment Name: Zm_4deg_Cold_P Parameter: Tissue Value: Aerial
  misc_feature: MA Experiment ID: 108540 Result: Up-regulated in Transcription
  misc_feature: MA Experiment 108540 PARAMETER Experiment Name: Zm_20percent_PEG_P Parameter: Age (day) Value: 8
  misc_feature: MA Experiment 108540 PARAMETER Experiment Name: Zm_20percent_PEG_P Parameter: Organism Value: Zea mays
  misc_feature: MA Experiment 108540 PARAMETER Experiment Name: Zm_20percent_PEG_P Parameter: Plant Line Value: 35A19
  misc_feature: MA Experiment 108540 PARAMETER Experiment Name: Zm_20percent_PEG_P Parameter: Timepoint (hr) Value: 6
  misc_feature: MA Experiment 108540 PARAMETER Experiment Name: Zm_20percent_PEG_P Parameter: Tissue Value: Aerial
  misc_feature: MA Experiment 108540 PARAMETER Experiment Name: Zm_20percent_PEG_P Parameter: Treatment Value: 20percent PEG vs. No Treatment
  misc_feature: MA Experiment ID: 108542 Result: Up-regulated in Transcription
  misc_feature: MA Experiment 108542 PARAMETER Experiment Name: Zm_150mM_NaCl_P Parameter: Age (day) Value: 8
  misc_feature: MA Experiment 108542 PARAMETER Experiment Name: Zm_150mM_NaCl_P Parameter: Organism Value: Zea mays
  misc_feature: MA Experiment 108542 PARAMETER Experiment Name: Zm_150mM_NaCl_P Parameter: Plant Line Value: 35A19
  misc_feature: MA Experiment 108542 PARAMETER Experiment Name: Zm_150mM_NaCl_P Parameter: Timepoint (hr) Value: 6
  misc_feature: MA Experiment 108542 PARAMETER Experiment Name: Zm_150mM_NaCl_P Parameter: Tissue Value: Aerial
  misc_feature: MA Experiment 108542 PARAMETER Experiment Name: Zm_150mM_NaCl_P Parameter: Treatment Value: 150mM NaCl vs. No Treatment
  misc_feature: MA Experiment ID: 108544 Result: Up-regulated in Transcription
  misc_feature: MA Experiment ID: 108556 Result: Up-regulated in Transcription
  misc_feature: MA Experiment 108556 PARAMETER Experiment Name: Zm_Drought_P Parameter: Age (day) Value: 9
  misc_feature: MA Experiment 108556 PARAMETER Experiment Name: Zm_Drought_P Parameter: Organism Value: Zea mays
  misc_feature: MA Experiment 108556 PARAMETER Experiment Name: Zm_Drought_P Parameter: Plant Line Value: 35A19
  misc_feature: MA Experiment 108556 PARAMETER Experiment Name: Zm_Drought_P Parameter: Timepoint (hr) Value: 24
  misc_feature: MA Experiment 108556 PARAMETER Experiment Name: Zm_Drought_P Parameter: Tissue Value: Aerial
  misc_feature: MA Experiment 108556 PARAMETER Experiment Name: Zm_Drought_P Parameter: Treatment Value: Drought vs. No Drought
  misc_feature: MA Experiment ID: 108559 Result: Up-regulated in Transcription
  misc_feature: MA Experiment 108559 PARAMETER Experiment Name: Zm_5mM_NO_P Parameter: Age (day) Value: 8
  misc_feature: MA Experiment 108559 PARAMETER Experiment Name: Zm_5mM_NO_P Parameter: Organism Value: Zea mays
  misc_feature: MA Experiment 108559 PARAMETER Experiment Name: Zm_5mM_NO_P Parameter: Plant Line Value: 35A19
  misc_feature: MA Experiment 108559 PARAMETER Experiment Name: Zm_5mM_NO_P Parameter: Timepoint (hr) Value: 12
  misc_feature: MA Experiment 108559 PARAMETER Experiment Name: Zm_5mM_NO_P Parameter: Tissue Value: Aerial
  misc_feature: MA Experiment 108559 PARAMETER Experiment Name: Zm_5mM_NO_P Parameter: Treatment Value: 5mM NO vs. No Treatment
  misc_feature: MA Experiment ID: 108689 Result: Up-regulated in Transcription
  misc_feature: MA Experiment 108689 PARAMETER Experiment Name: Zm_Drought_Roots_P Parameter: Age (day) Value: 9
  misc_feature: MA Experiment 108689 PARAMETER Experiment Name: Zm_Drought_Roots_P Parameter: Organism Value: Zea mays
  misc_feature: MA Experiment 108689 PARAMETER Experiment Name: Zm_Drought_Roots_P Parameter: Plant Line Value: 35A19
  misc_feature: MA Experiment 108689 PARAMETER Experiment Name: Zm_Drought_Roots_P Parameter: Timepoint (hr) Value: 24
  misc_feature: MA Experiment 108689 PARAMETER Experiment Name: Zm_Drought_Roots_P Parameter: Tissue Value: Roots
  misc_feature: MA Experiment 108689 PARAMETER Experiment Name: Zm_Drought_Roots_P Parameter: Treatment Value: Drought vs. No Drought
  misc_feature: MA Experiment ID: 20000478 Result: Up-regulated in Transcription
  misc_feature: MA Experiment 20000478 PARAMETER Experiment Name: Zm_5mM_SA_P Parameter: Age (day) Value: 11
  misc_feature: MA Experiment 20000478 PARAMETER Experiment Name: Zm_5mM_SA_P Parameter: Organism Value: Zea mays
  misc_feature: MA Experiment 20000478 PARAMETER Experiment Name: Zm_5mM_SA_P Parameter: Plant Line Value: 35A19
  misc_feature: MA Experiment 20000478 PARAMETER Experiment Name: Zm_5mM_SA_P Parameter: Timepoint (hr) Value: 72
  misc_feature: MA Experiment 20000478 PARAMETER Experiment Name: Zm_5mM_SA_P Parameter: Tissue Value: Aerial
  misc_feature: MA Experiment 20000478 PARAMETER Experiment Name: Zm_5mM_SA_P Parameter: Treatment Value: 5mM SA vs. No Treatment
  misc_feature: MA Experiment ID: 20000480 Result: Up-regulated in Transcription
  misc_feature: MA Experiment 20000480 PARAMETER Experiment Name: Zm_Drought_P Parameter: Age (day) Value: 11
  misc_feature: MA Experiment 20000480 PARAMETER Experiment Name: Zm_Drought_P Parameter: Organism Value: Zea mays
  misc_feature: MA Experiment 20000480 PARAMETER Experiment Name: Zm_Drought_P Parameter: Plant Line Value: 35A19
  misc_feature: MA Experiment 20000480 PARAMETER Experiment Name: Zm_Drought_P Parameter: Timepoint (hr) Value: 72
  misc_feature: MA Experiment 20000480 PARAMETER Experiment Name: Zm_Drought_P Parameter: Tissue Value: Aerial
  misc_feature: MA Experiment 20000480 PARAMETER Experiment Name: Zm_Drought_P Parameter: Treatment Value: Drought vs. No Drought
atcacacagcgccaccgcgtggttcgttaggaaaggaaatcgattcccccgcatccgatctcttcggtgctagagaaatatagggccgccgcctcctcctcattcggtgaaaggtgggcggttagggttgggagatctcttgactcacgacacgagcagcagaattcgtcgagggccgctggttgctgcgagaggtccgggccttcgtgggatcttgaaaattgaatgttctaatggagtccaagggtggcaagaagaagtctagcagtagtcgttcctccctgatgtacgaagctccccttggctacagcatcgaggatatccgccctgcaggcggcatcaagaagttctccgctgcttactcgaactgcgcgaggaagccatcctgatatctctgtcgtcatccccatcctagtagcgtagaaaccacctgcattttcattttgatctccctaatccctccggctagctgctttccagtgaccaaaagatatcaaagaccacttcccgtcttcctcccgtggctgtctgtcatctggctctgaaacgatggcagtcctgcaagttgctgctgctgcccctccccctgtctctgtgattgggttcgagggatttgagaagcgccttgagatcagcttctctgaggcacctgtcttggctgaccccagcggaaggggactgcgtgcgctctcgcgtgcccagatcgactctgttcttgaccttgctcggtgcaccattgtgtccgagctctcaaacgaggacttcgactcttatgtcttatctgagtcgagcctgtttgtctacccatacaagattgtgatcaagacctgtggaactacaaagcttctgctcgctattccgaggatccttgaacttgctgaagagctcctgttgccactcgctgcagttaaatactcccgtggaacgttcatattccctgaagcacagccttccccacacaagaacttcgctgacgaggttgccttcctgaatcgcttcttcggtggcctcaagtccggtggcaatgcttatgtgattggtgactctgcgaagcccgggcagaagtggcacgtctactacgccgctgagcaccctgaggagcctgttgttactctagagatgtgcatgactgggctggacaagaagaaagcttctgtcttcttcaagaccactgctgatggttactcgctgtgcgccaaggagatgaccaagctctctggtatctcggacatcatcccagagatggagatctgtgacttcgacttcgagccctgtggctactccatgaatgctgttcatggccctgctttgtcgaccattcatgtgaccccagaggacggcttcagctatgcaagctacgaggtcatgggctttaacccgggctctttctcttatggtgacctggttaagagggtgctgaggtgctttggtccaactgagttctctgttgccgtgaccatcttcggtgatcgggacaatgcgaagacctgggggacgaaactggatgctgaggcctatgcttgcagcaacatggttgagcaggtgctgccgtttggtggcttgctcatctatcagagcttcactgttatgggcgaaacgacccatgggtcgccgaggtcagtcctgcatgacttcgctggtgacattgtcaagaatcgctcagagagtgatgctccctgatgggaagctgatgctgtggatgagagcgaggaaagagaggtaaagaagatgaaatgctgatgcggtcgacgatagatcagattcagagttgctgccactggttatcttgtgaagcagccaagcctaattatttatgccacataacctttgctattgtaatgtgccacatgcttatatttgcaataaacagctctaggtggtcagctttgtctgccgcaatgagcagtgtatcgatattgtggtttaaattgttggatctaaataaagtc

SEQ ID NO: 4196 - protein, 376 aa, Zea mays subsp. mays
  peptide (1)..(376): Ceres Seq. ID no. 12352262
  misc_feature (14)..(345): Pfam Name: Adenosylmethionine decarboxylase Pfam Description: Adenosylmethionine decarboxylase
  misc_feature (13)..(359): Homolog of NCBI NO: 31980105 NR Description: S-adenosylmethionine decarboxylase proenzyme
  misc_feature (15)..(374): Homolog of NCBI NO: 28566348 NR Description: S-adenosylmethionine decarboxylase [Narcissus
  misc_feature (1)..(276): Homolog of NCBI NO: 10241685 NR Description: S-adenosylmethionine decarboxylase
  misc_feature (6)..(376): Homolog of NCBI NO: 7436593 NR Description: adenosylmethionine decarboxylase homolog
  misc_feature (13)..(376): Homolog of NCBI NO: 3913438 NR Description: S-adenosylmethionine decarboxylase proenzyme
  misc_feature (13)..(376): Homolog of NCBI NO: 4325045 NR Description: S-adenosylmethionine decarboxylase precursor
  misc_feature (1)..(369): Homolog of NCBI NO: 3913427 NR Description: S-adenosylmethionine decarboxylase proenzyme
  misc_feature (1)..(376): Homolog of NCBI NO: 3929545 NR Description: S-adenosylmethionine decarboxylase [Oryza sativa]
  misc_feature (1)..(376): Homolog of NCBI NO: 19855056 NR Description: S-adenosylmethionine decarboxylase proenzyme
  misc_feature (1)..(376): Homolog of NCBI NO: 6646868 NR Description: S-adenosylmethionine decarboxylase 2
MAVLQVAAAAPPPVSVIGFEGFEKRLEISFSEAPVLADPSGRGLRALSRAQIDSVLDLARCTIVSELSNEDFDSYVLSESSLFVYPYKIVIKTCGTTKLLLAIPRILELAEELLLPLAAVKYSRGTFIFPEAQPSPHKNFADEVAFLNRFFGGLKSGGNAYVIGDSAKPGQKWHVYYAAEHPEEPVVTLEMCMTGLDKKKASVFFKTTADGYSLCAKEMTKLSGISDIIPEMEICDFDFEPCGYSMNAVHGPALSTIHVTPEDGFSYASYEVMGFNPGSFSYGDLVKRVLRCFGPTEFSVAVTIFGDRDNAKTWGTKLDAEAYACSNMVEQVLPFGGLLIYQSFTVMGETTHGSPRSVLHDFAGDIVKNRSESDAP

SEQ ID NO: 4197 - DNA, 1447 bp, Zea mays subsp. mays
  misc_feature (1)..(1447): Ceres Seq. ID no. 12373744
  misc_feature: MA Experiment ID: 108528 Result: Down-regulated in Transcription
  misc_feature: MA Experiment 108528 PARAMETER Experiment Name: Zm_Imbibed_Seeds_P Parameter: Age (day) Value: 5 vs. 2
  misc_feature: MA Experiment 108528 PARAMETER Experiment Name: Zm_Imbibed_Seeds_P Parameter: Organism Value: Zea mays
  misc_feature: MA Experiment 108528 PARAMETER Experiment Name: Zm_Imbibed_Seeds_P Parameter: Plant Line Value: 35A19
  misc_feature: MA Experiment 108528 PARAMETER Experiment Name: Zm_Imbibed_Seeds_P Parameter: Tissue Value: Aerial vs. Embryo
  misc_feature: MA Experiment ID: 108535 Result: Up-regulated in Transcription
  misc_feature: MA Experiment 108535 PARAMETER Experiment Name: Zm_Meristem_P Parameter: Age (day) Value: 8
  misc_feature: MA Experiment 108535 PARAMETER Experiment Name: Zm_Meristem_P Parameter: Organism Value: Zea mays
  misc_feature: MA Experiment 108535 PARAMETER Experiment Name: Zm_Meristem_P Parameter: Plant Line Value: 35A19
  misc_feature: MA Experiment 108535 PARAMETER Experiment Name: Zm_Meristem_P Parameter: Tissue Value: Root Meristem vs. Above Root Meristem
  misc_feature: MA Experiment ID: 108547 Result: Down-regulated in Transcription
  misc_feature: MA Experiment 108547 PARAMETER Experiment Name: Zm_Imbibed_Seeds_P Parameter: Age (day) Value: 4 vs. 2
  misc_feature: MA Experiment 108547 PARAMETER Experiment Name: Zm_Imbibed_Seeds_P Parameter: Organism Value: Zea mays
  misc_feature: MA Experiment 108547 PARAMETER Experiment Name: Zm_Imbibed_Seeds_P Parameter: Plant Line Value: 35A19
  misc_feature: MA Experiment 108547 PARAMETER Experiment Name: Zm_Imbibed_Seeds_P Parameter: Tissue Value: Aerial vs. Embryo
ctgtttcaatttgtactctctaggtatgggccattttggacatgcaccaccctgattttcgttgctgcatctattgctacttttgtcacctacctatcccacaaatggcacaagaaggaatggaactatgatatcaacttggttacctggtctgctgggttattctatggctacgtgacatttgttcctcttcttttatatgttattctcaagtacttctcagcacctgctggtttggtgcaattgtggtgcctatatggatattctctgttcatattcattccagcatcggtaaggttcttactaaaatgcatgcacatatacttgggaatttcagctctattagtctacaattttgtgccactggtctacagctaaagttgtttaaaatttggccttttctgtgggaaatgttcactcgattctaacacctgtaaaggcagcagcaaggttgagtttaaagaatttgcactgattttgtatgaaaactggaaccaattaattccaagagtcattattactaccacttaccaatataatttgtttgctaggtacccttttactgctacatattatagttacatgattttacaaggcatatagttgtgcagtatgttagtaggcttcatgattaaacctgtttcatatggtcaaatacttttctatggatcatttgtcaaaagaaaaaaaatctttactatttttacttccatataaccaatatcggtcatttactggtcctctattgacaaaatactactacctccatgccaaattatgagatgttttggcatttctaggtacataacttttattttacactatatctagatacatagtaataatgatgtatttgggaaaactaaaacgtcttataatttggaaatgagggactagtatattatctgttcaaatgatttggaatatttctacactgctttagcatttgaagttgactggaagttctttctcctttgtgttacagcttctgtctattgtgccaatagaaatattcagatgggtgattgctggtgttgctggtttcatgtctgctactttcgttgctgtaaatctccgcgcacacattgtaaattccggcgagcgatggttcctgatcgttgctgggatattcttgttgcagttggggcttgctttttgctgaaactatatttcttcacgataactgtatagggttatttacatctaatgatcgtactagtcaagaatacacaattttccatgtggaatcacttccatgttcattgaacattgatgtaatttttccatgtatacatctttcttacacgtagaattgagaagcccctgaaattgaattacagcagccaaacaagtactgtgattgatatgggtgaagagtctgatctgtagtctattctgtgttccgctgcttgaggtgaataatgaatgagaaatcgctgtgttctcc

SEQ ID NO: 4198 - protein, 125 aa, Zea mays subsp. mays
  peptide (1)..(125): Ceres Seq. ID no. 12373745
  misc_feature (9)..(96): Pfam Name: Yip1 domain Pfam Description: Yip1 domain
  misc_feature (9)..(102): Homolog of NCBI NO: 17536971 NR Description: Putative membrane protein, with at least 4
  misc_feature (9)..(123): Homolog of NCBI NO: 21704084 NR Description: RIKEN cDNA C030002N13 [Mus musculus]
  misc_feature (9)..(123): Homolog of NCBI NO: 10092643 NR Description: hypothetical protein DJ167A19.1 [Homo sapiens]
  misc_feature (9)..(98): Homolog of NCBI NO: 40740298 NR Description: hypothetical protein AN4017.2 [Aspergillus
  misc_feature (9)..(102): Homolog of NCBI NO: 30688039 NR Description: expressed protein [Arabidopsis thaliana]
  misc_feature (9)..(122): Homolog of NCBI NO: 38564308 NR Description: At5g27490 [Arabidopsis thaliana]
  misc_feature (9)..(122): Homolog of NCBI NO: 30690667 NR Description: expressed protein [Arabidopsis thaliana]
  misc_feature (9)..(122): Homolog of NCBI NO: 34912560 NR Description: P0410E03.18 [Oryza sativa (japonica
  misc_feature (9)..(96): Homolog of NCBI NO: 30679454 NR Description: expressed protein [Arabidopsis thaliana]
  misc_feature (9)..(96): Homolog of NCBI NO: 6729038 NR Description: unknown protein [Arabidopsis thaliana]
LFQFVLSRYGPFWTCTTLIFVAASIATFVTYLSHKWHKKEWNYDINLVTWSAGLFYGYVTFVPLLLYVILKYFSAPAGLVQLWCLYGYSLFIFIPASVRFLLKCMHIYLGISALLVYNFVPLVYS

SEQ ID NO: 4199 - DNA, 1903 bp, Zea mays subsp. mays
  misc_feature (1)..(1903): Ceres Seq. ID no. 12344698
  misc_feature: MA Experiment ID: 108535 Result: Up-regulated in Transcription
  misc_feature: MA Experiment 108535 PARAMETER Experiment Name: Zm_Meristem_P Parameter: Age (day) Value: 8
  misc_feature: MA Experiment 108535 PARAMETER Experiment Name: Zm_Meristem_P Parameter: Organism Value: Zea mays
  misc_feature: MA Experiment 108535 PARAMETER Experiment Name: Zm_Meristem_P Parameter: Plant Line Value: 35A19
  misc_feature: MA Experiment 108535 PARAMETER Experiment Name: Zm_Meristem_P Parameter: Tissue Value: Root Meristem vs. Above Root Meristem
  misc_feature: MA Experiment ID: 20000534 Result: Down-regulated in Transcription
  misc_feature: MA Experiment 20000534 PARAMETER Experiment Name: Zm_Hybrid_Pollen_P Parameter: Age (day) Value: 8
  misc_feature: MA Experiment 20000534 PARAMETER Experiment Name: Zm_Hybrid_Pollen_P Parameter: Organism Value: Zea mays
  misc_feature: MA Experiment 20000534 PARAMETER Experiment Name: Zm_Hybrid_Pollen_P Parameter: Plant Line Value: 35A19
  misc_feature: MA Experiment 20000534 PARAMETER Experiment Name: Zm_Hybrid_Pollen_P Parameter: Tissue Value: Pollen vs. Aerial
accagctgcctgtgcagcagtccaattcctcttgctggagcataccagaagcagaatcgggtgagaggaaatgggatcaacaagaacgtctcatccatctttcccggtcctcctgctcttcctcctcgctaccgccgccgccgccggaagcaacaaggctgaggaggtggacgacctccagtaccttattgacaactccgaagacatcccacccaacgaccctgacgggtggcctgagggcggcggcggcggcgactacgacgacgaccttctcttccaagatcaggaccaggacctcccagactacgagccgcagatcgacgagacccacgtcgtggtcctcaccgccgccaacttctcctccttcctcgccgccacccgccatgtcatggttgagttctacgccccctggtgtggccactgccgcgagctcgcccctgaatacgccgccgccgccgcgcatctcgccgtccaccacaaccagaccgatctcgctcttgccaaggccgacgccaccgaggaaaccgacctagcccagaggtacgacgtccagggcttccccactatcatcctcttcatcgacggcgtccccaaggactacaacggcgcgaggaccaaggacgccatcgtcgactggatcaacaagaagctcggcccggccgtgcaagatgtcaccagcgtccacgaggccgagaggatactcaccggggatgacaaagccgtcattgccttcctcgacactctaaccggtgctcacagtgacgagcttgctgctgcttcaaggctggaagatagcatcaacttttatcaaacttcgattcctgatgttgctaagcttttccatatcgacccagcagcaaagcgtccatccatagtattactgaagaaagaggaggagaagttgaccttctatgatggaaagtttaaagcatcagccattgctgattttgtgtctgctaacaagcttcctttggttaccacactaactcaagaaacttccccttctatttttggcaatgcaatcaagaagcagattttactatttgctgttgcaagtgaatcctcaaaatttctgtccatctttaaggaagcagcaaagccatttaagggaaagctattatttgtctttgtggagcgagacaatgatgaagttggtgaaccagttgccaactactttggtcttactggacaagagaccacagttcttgcttacactggtaatgaagatgctaggaaatttttccttgatggcgaggtgtcacttgaagccattaaggacttcgctgaaggtttcttggaagacaaacttacaccattctacaagtctgaaccagtacctgaatctaatgatggggatgtcaaaattgttgttggaaagagtctggatgtaatagttttggatgaatcaaaagatgtacttctggagatatatgcaccgtggtgtgggcattgtcaatcactggagcctacttacaacaaactagccaagcatctaagtggagttgactcccttgtgatagccaaaatggatggtactaccaatgagcatccacgtgcaaagtctgacggatacccaacaattctcttctatccagctgggaagaaaagctttgagcctgtcacgtttgagggggagcggacagtggtagatatgtacaggttcatcaagaaacatgctagcatccctttcaagttgaagcgccaggagtcaagaagggagagcatccagacggatggtgtcaaggacgaactgtagggcaggtcatgcattgatagatagctgagttttgaattttggttttataaaattaggtccgccaccgaatttcgcgttttcagcttaaacatcacctaaatctgtttctttatattatactatattaaagcaccagtttcaaccgtg

SEQ ID NO: 4200 - protein, 561 aa, Zea mays subsp. mays
  peptide (1)..(561): Ceres Seq. ID no. 12344699
  misc_feature (429)..(537): Pfam Name: Thioredoxin Pfam Description: Thioredoxin
  misc_feature (69)..(560): Homolog of NCBI NO: 7437394 NR Description: protein disulfide-isomerase (EC 5.3.4.1) RB60 -
  misc_feature (71)..(561): Homolog of NCBI NO: 5902592 NR Description: protein disulfide isomerase precursor
  misc_feature (79)..(541): Homolog of NCBI NO: 20805287 NR Description: protein disulfide isomerase-like PDI-M
  misc_feature (77)..(541): Homolog of NCBI NO: 20805285 NR Description: protein disulfide isomerase-like PDI-H
  misc_feature (56)..(561): Homolog of NCBI NO: 7437396 NR Description: protein disulfide-isomerase homolog F28P10.60 -
  misc_feature (10)..(518): Homolog of NCBI NO: 30697408 NR Description: protein disulfide isomerase family [Arabidopsis
  misc_feature (56)..(561): Homolog of NCBI NO: 22331799 NR Description: protein disulfide-isomerase-like protein
  misc_feature (124)..(556): Homolog of NCBI NO: 28140231 NR Description: protein disulphide isomerase [Elaeis guineensis]
  misc_feature (10)..(554): Homolog of NCBI NO: 21593313 NR Description: protein disulfide isomerase precursor-like
  misc_feature (10)..(554): Homolog of NCBI NO: 30697404 NR Description: protein disulfide isomerase family [Arabidopsis
MGSTRTSHPSFPVLLLFLLATAAAAGSNKAEEVDDLQYLIDNSEDIPPNDPDGWPEGGGGGDYDDDLLFQDQDQDLPDYEPQIDETHVVVLTAANFSSFLAATRHVMVEFYAPWCGHCRELAPEYAAAAAHLAVHHNQTDLALAKADATEETDLAQRYDVQGFPTIILFIDGVPKDYNGARTKDAIVDWINKKLGPAVQDVTSVHEAERILTGDDKAVIAFLDTLTGAHSDELAAASRLEDSINFYQTSIPDVAKLFHIDPAAKRPSIVLLKKEEEKLTFYDGKFKASAIADFVSANKLPLVTTLTQETSPSIFGNAIKKQILLFAVASESSKFLSIFKEAAKPFKGKLLFVFVERDNDEVGEPVANYFGLTGQETTVLAYTGNEDARKFFLDGEVSLEAIKDFAEGFLEDKLTPFYKSEPVPESNDGDVKIVVGKSLDVIVLDESKDVLLEIYAPWCGHCQSLEPTYNKLAKHLSGVDSLVIAKMDGTTNEHPRAKSDGYPTILFYPAGKKSFEPVTFEGERTVVDMYRFIKKHASIPFKLKRQESRRESIQTDGVKDEL

SEQ ID NO: 4201 - protein, 455 aa, Zea mays subsp. mays
  peptide (1)..(455): Ceres Seq. ID no. 12344700
  misc_feature (323)..(431): Pfam Name: Thioredoxin Pfam Description: Thioredoxin
  misc_feature (1)..(454): Homolog of NCBI NO: 7437394 NR Description: protein disulfide-isomerase (EC 5.3.4.1) RB60 -
  misc_feature (1)..(455): Homolog of NCBI NO: 5902592 NR Description: protein disulfide isomerase precursor
  misc_feature (1)..(435): Homolog of NCBI NO: 20805287 NR Description: protein disulfide isomerase-like PDI-M
  misc_feature (1)..(435): Homolog of NCBI NO: 20805285 NR Description: protein disulfide isomerase-like PDI-H
  misc_feature (1)..(455): Homolog of NCBI NO: 7437396 NR Description: protein disulfide-isomerase homolog F28P10.60 -
  misc_feature (1)..(412): Homolog of NCBI NO: 30697408 NR Description: protein disulfide isomerase family [Arabidopsis
  misc_feature (1)..(455): Homolog of NCBI NO: 22331799 NR Description: protein disulfide-isomerase-like protein
  misc_feature (18)..(450): Homolog of NCBI NO: 28140231 NR Description: protein disulphide isomerase [Elaeis guineensis]
  misc_feature (1)..(448): Homolog of NCBI NO: 21593313 NR Description: protein disulfide isomerase precursor-like
  misc_feature (1)..(448): Homolog of NCBI NO: 30697404 NR Description: protein disulfide isomerase family [Arabidopsis
MVEFYAPWCGHCRELAPEYAAAAAHLAVHHNQTDLALAKADATEETDLAQRYDVQGFPTIILFIDGVPKDYNGARTKDAIVDWINKKLGPAVQDVTSVHEAERILTGDDKAVIAFLDTLTGAHSDELAAASRLEDSINFYQTSIPDVAKLFHIDPAAKRPSIVLLKKEEEKLTFYDGKFKASAIADFVSANKLPLVTTLTQETSPSIFGNAIKKQILLFAVASESSKFLSIFKEAAKPFKGKLLFVFVERDNDEVGEPVANYFGLTGQETTVLAYTGNEDARKFFLDGEVSLEAIKDFAEGFLEDKLTPFYKSEPVPESNDGDVKIVVGKSLDVIVLDESKDVLLEIYAPWCGHCQSLEPTYNKLAKHLSGVDSLVIAKMDGTTNEHPRAKSDGYPTILFYPAGKKSFEPVTFEGERTVVDMYRFIKKHASIPFKLKRQESRRESIQTDGVKDEL

SEQ ID NO: 4202 - DNA, 1178 bp, Zea mays subsp. mays
  misc_feature (1)..(1178): Ceres Seq. ID no. 12409975
  misc_feature: MA Experiment ID: 108528 Result: Up-regulated in Transcription
  misc_feature: MA Experiment 108528 PARAMETER Experiment Name: Zm_Imbibed_Seeds_P Parameter: Age (day) Value: 5 vs. 2
  misc_feature: MA Experiment 108528 PARAMETER Experiment Name: Zm_Imbibed_Seeds_P Parameter: Organism Value: Zea mays
  misc_feature: MA Experiment 108528 PARAMETER Experiment Name: Zm_Imbibed_Seeds_P Parameter: Plant Line Value: 35A19
  misc_feature: MA Experiment 108528 PARAMETER Experiment Name: Zm_Imbibed_Seeds_P Parameter: Tissue Value: Aerial vs. Embryo
  misc_feature: MA Experiment ID: 108529 Result: Down-regulated in Transcription
  misc_feature: MA Experiment 108529 PARAMETER Experiment Name: Zm_Imbibed_Seeds_P Parameter: Age (day) Value: 5 vs. 2
  misc_feature: MA Experiment 108529 PARAMETER Experiment Name: Zm_Imbibed_Seeds_P Parameter: Organism Value: Zea mays
  misc_feature: MA Experiment 108529 PARAMETER Experiment Name: Zm_Imbibed_Seeds_P Parameter: Plant Line Value: 35A19
  misc_feature: MA Experiment 108529 PARAMETER Experiment Name: Zm_Imbibed_Seeds_P Parameter: Tissue Value: Roots vs. Embryo
  misc_feature: MA Experiment ID: 108530 Result: Up-regulated in Transcription
  misc_feature: MA Experiment 108530 PARAMETER Experiment Name: Zm_Imbibed_Seeds_P Parameter: Age (day) Value: 6 vs. 2
  misc_feature: MA Experiment 108530 PARAMETER Experiment Name: Zm_Imbibed_Seeds_P Parameter: Organism Value: Zea mays
  misc_feature: MA Experiment 108530 PARAMETER Experiment Name: Zm_Imbibed_Seeds_P Parameter: Plant Line Value: 35A19
  misc_feature: MA Experiment 108530 PARAMETER Experiment Name: Zm_Imbibed_Seeds_P Parameter: Tissue Value: Aerial vs. Embryo
  misc_feature: MA Experiment ID: 108536 Result: Down-regulated in Transcription
  misc_feature: MA Experiment 108536 PARAMETER Experiment Name: Zm_Meristem_P Parameter: Age (day) Value: 8
  misc_feature: MA Experiment 108536 PARAMETER Experiment Name: Zm_Meristem_P Parameter: Organism Value: Zea mays
  misc_feature: MA Experiment 108536 PARAMETER Experiment Name: Zm_Meristem_P Parameter: Plant Line Value: 35A19
  misc_feature: MA Experiment 108536 PARAMETER Experiment Name: Zm_Meristem_P Parameter: Tissue Value: Shoot Meristem vs. Above Shoot Meristem
  misc_feature: MA Experiment ID: 108545 Result: Up-regulated in Transcription
  misc_feature: MA Experiment 108545 PARAMETER Experiment Name: Zm_Imbibed_Seeds_P Parameter: Age (day) Value: 3 vs. 2
  misc_feature: MA Experiment 108545 PARAMETER Experiment Name: Zm_Imbibed_Seeds_P Parameter: Organism Value: Zea mays
  misc_feature: MA Experiment 108545 PARAMETER Experiment Name: Zm_Imbibed_Seeds_P Parameter: Plant Line Value: 35A19
  misc_feature: MA Experiment 108545 PARAMETER Experiment Name: Zm_Imbibed_Seeds_P Parameter: Tissue Value: Aerial vs. Embryo
  misc_feature: MA Experiment ID: 108546 Result: Down-regulated in Transcription
  misc_feature: MA Experiment 108546 PARAMETER Experiment Name: Zm_Imbibed_Seeds_P Parameter: Age (day) Value: 3 vs. 2
  misc_feature: MA Experiment 108546 PARAMETER Experiment Name: Zm_Imbibed_Seeds_P Parameter: Organism Value: Zea mays
  misc_feature: MA Experiment 108546 PARAMETER Experiment Name: Zm_Imbibed_Seeds_P Parameter: Plant Line Value: 35A19
  misc_feature: MA Experiment 108546 PARAMETER Experiment Name: Zm_Imbibed_Seeds_P Parameter: Tissue Value: Roots vs. Embryo
  misc_feature: MA Experiment ID: 108547 Result: Up-regulated in Transcription
  misc_feature: MA Experiment 108547 PARAMETER Experiment Name: Zm_Imbibed_Seeds_P Parameter: Age (day) Value: 4 vs. 2
  misc_feature: MA Experiment 108547 PARAMETER Experiment Name: Zm_Imbibed_Seeds_P Parameter: Organism Value: Zea mays
  misc_feature: MA Experiment 108547 PARAMETER Experiment Name: Zm_Imbibed_Seeds_P Parameter: Plant Line Value: 35A19
  misc_feature: MA Experiment 108547 PARAMETER Experiment Name: Zm_Imbibed_Seeds_P Parameter: Tissue Value: Aerial vs. Embryo
  misc_feature: MA Experiment ID: 108687 Result: Down-regulated in Transcription
  misc_feature: MA Experiment 108687 PARAMETER Experiment Name: Zm_Embryos-Flowers__P Parameter: Tissue Value: Embryo vs. Aerial+
  misc_feature: MA Experiment ID: 20000477 Result: Down-regulated in Transcription
  misc_feature: MA Experiment 20000477 PARAMETER Experiment Name: Zm_5mM_SA_P Parameter: Age (day) Value: 10
  misc_feature: MA Experiment 20000477 PARAMETER Experiment Name: Zm_5mM_SA_P Parameter: Organism Value: Zea mays
  misc_feature: MA Experiment 20000477 PARAMETER Experiment Name: Zm_5mM_SA_P Parameter: Plant Line Value: 35A19
  misc_feature: MA Experiment 20000477 PARAMETER Experiment Name: Zm_5mM_SA_P Parameter: Timepoint (hr) Value: 48
  misc_feature: MA Experiment 20000477 PARAMETER Experiment Name: Zm_5mM_SA_P Parameter: Tissue Value: Aerial
  misc_feature: MA Experiment 20000477 PARAMETER Experiment Name: Zm_5mM_SA_P Parameter: Treatment Value: 5mM SA vs. No Treatment
  misc_feature: MA Experiment ID: 20000478 Result: Down-regulated in Transcription
  misc_feature: MA Experiment 20000478 PARAMETER Experiment Name: Zm_5mM_SA_P Parameter: Age (day) Value: 11
  misc_feature: MA Experiment 20000478 PARAMETER Experiment Name: Zm_5mM_SA_P Parameter: Organism Value: Zea mays
  misc_feature: MA Experiment 20000478 PARAMETER Experiment Name: Zm_5mM_SA_P Parameter: Plant Line Value: 35A19
  misc_feature: MA Experiment 20000478 PARAMETER Experiment Name: Zm_5mM_SA_P Parameter: Timepoint (hr) Value: 72
  misc_feature: MA Experiment 20000478 PARAMETER Experiment Name: Zm_5mM_SA_P Parameter: Tissue Value: Aerial
  misc_feature: MA Experiment 20000478 PARAMETER Experiment Name: Zm_5mM_SA_P Parameter: Treatment Value: 5mM SA vs. No Treatment
  misc_feature: MA Experiment ID: 20000480 Result: Down-regulated in Transcription
  misc_feature: MA Experiment 20000480 PARAMETER Experiment Name: Zm_Drought_P Parameter: Age (day) Value: 11
  misc_feature: MA Experiment 20000480 PARAMETER Experiment Name: Zm_Drought_P Parameter: Organism Value: Zea mays
  misc_feature: MA Experiment 20000480 PARAMETER Experiment Name: Zm_Drought_P Parameter: Plant Line Value: 35A19
  misc_feature: MA Experiment 20000480 PARAMETER Experiment Name: Zm_Drought_P Parameter: Timepoint (hr) Value: 72
  misc_feature: MA Experiment 20000480 PARAMETER Experiment Name: Zm_Drought_P Parameter: Tissue Value: Aerial
  misc_feature: MA Experiment 20000480 PARAMETER Experiment Name: Zm_Drought_P Parameter: Treatment Value: Drought vs. No Drought
  misc_feature: MA Experiment ID: 20000488 Result: Down-regulated in Transcription
  misc_feature: MA Experiment 20000488 PARAMETER Experiment Name: Zm_50mM_NH4NO3_L_to_H_P Parameter: Organism Value: Zea mays
  misc_feature: MA Experiment 20000488 PARAMETER Experiment Name: Zm_50mM_NH4NO3_L_to_H_P Parameter: Timepoint (hr) Value: 8
  misc_feature: MA Experiment 20000488 PARAMETER Experiment Name: Zm_50mM_NH4NO3_L_to_H_P Parameter: Tissue Value: Leaves
  misc_feature: MA Experiment 20000488 PARAMETER Experiment Name: Zm_50mM_NH4NO3_L_to_H_P Parameter: Treatment Value: 50mM NH4NO3 vs. 100mM Mannitol
  misc_feature: MA Experiment ID: 20000626 Result: Down-regulated in Transcription
  misc_feature: MA Experiment 20000626 PARAMETER Experiment Name: Zm_Herbicide-Treatments_P Parameter: Timepoint (hr) Value: 12
  misc_feature: MA Experiment 20000626 PARAMETER Experiment Name: Zm_Herbicide-Treatments_P Parameter: Tissue Value: Aerial
  misc_feature: MA Experiment 20000626 PARAMETER Experiment Name: Zm_Herbicide-Treatments_P Parameter: Treatment Value: Roundup vs. No Treatment
  misc_feature: MA Experiment ID: 20001612 Result: Up-regulated in Transcription
  misc_feature: MA Experiment 20001612 PARAMETER Experiment Name: Zm_50ppm_KNO3_L-to-H_P Parameter: Age (day) Value: 19
  misc_feature: MA Experiment 20001612 PARAMETER Experiment Name: Zm_50ppm_KNO3_L-to-H_P Parameter: Organism Value: Zea mays
  misc_feature: MA Experiment 20001612 PARAMETER Experiment Name: Zm_50ppm_KNO3_L-to-H_P Parameter: Plant Line Value: 35A19
  misc_feature: MA Experiment 20001612 PARAMETER Experiment Name: Zm_50ppm_KNO3_L-to-H_P Parameter: Timepoint (hr) Value: 8
  misc_feature: MA Experiment 20001612 PARAMETER Experiment Name: Zm_50ppm_KNO3_L-to-H_P Parameter: Tissue Value: Roots
  misc_feature: MA Experiment 20001612 PARAMETER Experiment Name: Zm_50ppm_KNO3_L-to-H_P Parameter: Treatment Value: 50ppm KNO3 vs. 50ppm KCl
atcgccgcctgctctctacctctgcactccaatcagatcatcagatagatcactggccccgtgctgattaccgcgcttcccatctgagcagccagcctcccagggtacagggagagacgcagaagagacagctgctgcctcgctgagacgatggccggaggcggagaccactcccagacgaacggaggccacgtcgaccagagggccttggaggagggcaggaaggaggagttcgctgaccagggctgcgccgccatggtcgtctccgtcccatttatccagaagatcatcgcggagatcttcggcacctacttcctgatgttcgcggggtgcggcgcggtgacgatcaacgcgagcaagaacgggcagatcacgttcccgggcgtggcgatcgtgtgggggctagcggtgatggtgatggtgtacgccgtgggccacatctccggcgcgcacttcaacccggcggtgaccctggccttcgccaccagcgggcggttcccgtggcggcagctgccggcgtacgtgctggcgcagatgctgggcgccacgctcgcctccgggacgctgcgcctcatgttcggcggccggcacgagcacttccccggcacgctgcccacgggctccgaggtgcagtcgctcgtcatcgagatcatcaccacattctacctcatgttcgtcatctccggcgtcgccacggacaacagagcaatcggggagctggctgggctggccgtgggcgcaaccatcctgcttaacgtgctcattgccgggcccgtctccggcgcgtcgatgaacccggcccggagcgtgggcccggcgctggtgagcggggagtacacgtccatctgggtgtacgtggtggggccggtggtgggggccgtggccggggcgtgggcctacaacctcatccgcttcaccaacaagcccctccgcgagatcaccaagagcacgtctttcctcaagagcacgagcaggatgaactccgccgcctccgcctgatggatctccatggccggtaatttagcctacaaaactatatattcacccgtgtcgtcgtgtcagtacgtgagaggatatagatatataattcctgcgtgcgtgtgcgtttgtgtgtggatggaaaacatatgaaagaagaggtatggtttgtgtgtggatggaaaacgtactgtgcctgc

SEQ ID NO: 4203 - protein, 282 aa, Zea mays subsp. mays
  peptide (1)..(282): Ceres Seq. ID no. 12409976
  misc_feature (36)..(250): Pfam Name: Major intrinsic protein Pfam Description: Major intrinsic protein
  misc_feature (39)..(271): Homolog of NCBI NO: 9082287 NR Description: multifunctional transport intrinsic membrane
  misc_feature (38)..(271): Homolog of NCBI NO: 541944 NR Description: nodulin-26 - soybean
  misc_feature (37)..(271): Homolog of NCBI NO: 81800 NR Description: nodulin-26 precursor - soybean
  misc_feature (43)..(271): Homolog of NCBI NO: 5139541 NR Description: nodulin26-like major intrinsic protein [Pisum
  misc_feature (1)..(278): Homolog of NCBI NO: 21536953 NR Description: major intrinsic protein (MIP)- like [Arabidopsis
  misc_feature (1)..(278): Homolog of NCBI NO: 15234059 NR Description: major intrinsic protein (MIP)- like
  misc_feature (38)..(275): Homolog of NCBI NO: 17025880 NR Description: multifunctional aquaporin [Medicago truncatula]
  misc_feature (1)..(279): Homolog of NCBI NO: 1076748 NR Description: major intrinsic protein - rice
  misc_feature (1)..(282): Homolog of NCBI NO: 13447785 NR Description: NOD26-like membrane integral protein ZmNIP1-1
MAGGGDHSQTNGGHVDQRALEEGRKEEFADQGCAAMVVSVPFIQKIIAEIFGTYFLMFAGCGAVTINASKNGQITFPGVAIVWGLAVMVMVYAVGHISGAHFNPAVTLAFATSGRFPWRQLPAYVLAQMLGATLASGTLRLMFGGRHEHFPGTLPTGSEVQSLVIEIITTFYLMFVISGVATDNRAIGELAGLAVGATILLNVLIAGPVSGASMNPARSVGPALVSGEYTSIWVYVVGPVVGAVAGAWAYNLIRFTNKPLREITKSTSFLKSTSRMNSAASA

SEQ ID NO: 4204 - protein, 247 aa, Zea mays subsp. mays
  peptide (1)..(247): Ceres Seq. ID no. 12409977
  misc_feature (1)..(215): Pfam Name: Major intrinsic protein Pfam Description: Major intrinsic protein
  misc_feature (4)..(236): Homolog of NCBI NO: 9082287 NR Description: multifunctional transport intrinsic membrane
  misc_feature (3)..(236): Homolog of NCBI NO: 541944 NR Description: nodulin-26 - soybean
  misc_feature (2)..(236): Homolog of NCBI NO: 81800 NR Description: nodulin-26 precursor - soybean
  misc_feature (8)..(236): Homolog of NCBI NO: 5139541 NR Description: nodulin26-like major intrinsic protein [Pisum
  misc_feature (1)..(243): Homolog of NCBI NO: 21536953 NR Description: major intrinsic protein (MIP)- like [Arabidopsis
  misc_feature (1)..(243): Homolog of NCBI NO: 15234059 NR Description: major intrinsic protein (MIP)- like
  misc_feature (3)..(240): Homolog of NCBI NO: 17025880 NR Description: multifunctional aquaporin [Medicago truncatula]
  misc_feature (1)..(244): Homolog of NCBI NO: 1076748 NR Description: major intrinsic protein - rice
  misc_feature (1)..(247): Homolog of NCBI NO: 13447785 NR Description: NOD26-like membrane integral protein ZmNIP1-1
MVVSVPFIQKIIAEIFGTYFLMFAGCGAVTINASKNGQITFPGVAIVWGLAVMVMVYAVGHISGAHFNPAVTLAFATSGRFPWRQLPAYVLAQMLGATLASGTLRLMFGGRHEHFPGTLPTGSEVQSLVIEIITTFYLMFVISGVATDNRAIGELAGLAVGATILLNVLIAGPVSGASMNPARSVGPALVSGEYTSIWVYVVGPVVGAVAGAWAYNLIRFTNKPLREITKSTSFLKSTSRMNSAASA

SEQ ID NO: 4205 - protein, 226 aa, Zea mays subsp. mays
  peptide (1)..(226): Ceres Seq. ID no. 12409978
  misc_feature (1)..(194): Pfam Name: Major intrinsic protein Pfam Description: Major intrinsic protein
  misc_feature (1)..(215): Homolog of NCBI NO: 9082287 NR Description: multifunctional transport intrinsic membrane
  misc_feature (1)..(215): Homolog of NCBI NO: 541944 NR Description: nodulin-26 - soybean
  misc_feature (1)..(215): Homolog of NCBI NO: 81800 NR Description: nodulin-26 precursor - soybean
  misc_feature (1)..(215): Homolog of NCBI NO: 5139541 NR Description: nodulin26-like major intrinsic protein [Pisum
  misc_feature (1)..(222): Homolog of NCBI NO: 21536953 NR Description: major intrinsic protein (MIP)- like [Arabidopsis
  misc_feature (1)..(222): Homolog of NCBI NO: 15234059 NR Description: major intrinsic protein (MIP)- like
  misc_feature (1)..(219): Homolog of NCBI NO: 17025880 NR Description: multifunctional aquaporin [Medicago truncatula]
  misc_feature (1)..(223): Homolog of NCBI NO: 1076748 NR Description: major intrinsic protein - rice
  misc_feature (1)..(226): Homolog of NCBI NO: 13447785 NR Description: NOD26-like membrane integral protein ZmNIP1-1
MFAGCGAVTINASKNGQITFPGVAIVWGLAVMVMVYAVGHISGAHFNPAVTLAFATSGRFPWRQLPAYVLAQMLGATLASGTLRLMFGGRHEHFPGTLPTGSEVQSLVIEIITTFYLMFVISGVATDNRAIGELAGLAVGATILLNVLIAGPVSGASMNPARSVGPALVSGEYTSIWVYVVGPVVGAVAGAWAYNLIRFTNKPLREITKSTSFLKSTSRMNSAASA

SEQ ID NO: 4206 - DNA, 1167 bp, Zea mays subsp. mays
  misc_feature (1)..(1167): Ceres Seq. ID no. 12365393
  misc_feature: MA Experiment ID: 108522 Result: Up-regulated in Transcription
  misc_feature: MA Experiment 108522 PARAMETER Experiment Name: Zm_42deg_Heat_P Parameter: Age (day) Value: 8
  misc_feature: MA Experiment 108522 PARAMETER Experiment Name: Zm_42deg_Heat_P Parameter: Organism Value: Zea mays
  misc_feature: MA Experiment 108522 PARAMETER Experiment Name: Zm_42deg_Heat_P Parameter: Plant Line Value: 35A19
  misc_feature: MA Experiment 108522 PARAMETER Experiment Name: Zm_42deg_Heat_P Parameter: Temperature (deg C) Value: 42 vs. 22
  misc_feature: MA Experiment 108522 PARAMETER Experiment Name: Zm_42deg_Heat_P Parameter: Timepoint (hr) Value: 1
  misc_feature: MA Experiment 108522 PARAMETER Experiment Name: Zm_42deg_Heat_P Parameter: Tissue Value: Aerial
  misc_feature: MA Experiment ID: 108523 Result: Up-regulated in Transcription
  misc_feature: MA Experiment 108523 PARAMETER Experiment Name: Zm_42deg_Heat_P Parameter: Age (day) Value: 8
  misc_feature: MA Experiment 108523 PARAMETER Experiment Name: Zm_42deg_Heat_P Parameter: Organism Value: Zea mays
  misc_feature: MA Experiment 108523 PARAMETER Experiment Name: Zm_42deg_Heat_P Parameter: Plant Line Value: 35A19
  misc_feature: MA Experiment 108523 PARAMETER Experiment Name: Zm_42deg_Heat_P Parameter: Temperature (deg C) Value: 42 vs. 22
  misc_feature: MA Experiment 108523 PARAMETER Experiment Name: Zm_42deg_Heat_P Parameter: Timepoint (hr) Value: 6
  misc_feature: MA Experiment 108523 PARAMETER Experiment Name: Zm_42deg_Heat_P Parameter: Tissue Value: Aerial
  misc_feature: MA Experiment ID: 20000492 Result: Up-regulated in Transcription
  misc_feature: MA Experiment 20000492 PARAMETER Experiment Name: Zm_Hybrid_Seed_Dev_P Parameter: DAP Value: 12
  misc_feature: MA Experiment 20000492 PARAMETER Experiment Name: Zm_Hybrid_Seed_Dev_P Parameter: Organism Value: Zea mays
  misc_feature: MA Experiment 20000492 PARAMETER Experiment Name: Zm_Hybrid_Seed_Dev_P Parameter: Plant Line Value: 35A19
  misc_feature: MA Experiment 20000492 PARAMETER Experiment Name: Zm_Hybrid_Seed_Dev_P Parameter: Tissue Value: Fert Kernel vs. Unfert Floret
  misc_feature: MA Experiment ID: 20000534 Result: Down-regulated in Transcription
  misc_feature: MA Experiment 20000534 PARAMETER Experiment Name: Zm_Hybrid_Pollen_P Parameter: Age (day) Value: 8
  misc_feature: MA Experiment 20000534 PARAMETER Experiment Name: Zm_Hybrid_Pollen_P Parameter: Organism Value: Zea mays
  misc_feature: MA Experiment 20000534 PARAMETER Experiment Name: Zm_Hybrid_Pollen_P Parameter: Plant Line Value: 35A19
  misc_feature: MA Experiment 20000534 PARAMETER Experiment Name: Zm_Hybrid_Pollen_P Parameter: Tissue Value: Pollen vs. Aerial
aaattctacatgggcctggccgtcttcagttcttcacccttcaccaccagaagcttctaggaagtaggaactcgaacggccggcagcattccgacgagacgagtcacgaatccggatagagcgccgccccccaacctgctgcgccgaccctgctcgccgccggcccgagtagagagagagagagaggagagaaggaagcatgacgacaatccgtcggttctgctgcgacgacctcctccgcttcgcctccgtcaacctggaccacctcaccgagacgttcaacatgtcgttctacatgacgtacctggcgcgctggcccgactacttccacgccgccgtcagccctggcggccgcgtcatgggttacatcatgggtaaagttgaaggccaaggtgaatcttggcatggacatgtcacagcggtttctgttgcctctgaatttcgtaggcagaagttagccaaaaaacttatgaacttactggaggaaatcagtgataagatggataaggcctacttcgtggatctctttgtaagggcatctaacatgccagcgataaggatgtatgaaaagcttggttatgtggtttatcgaagggtgctccggtactactcaggggaagaagatggcctcgatatgagaaaagcattatcacaagatgttgagaagaagtccatcataccactcaagaggccaattacgcctgatgaacttgaatatgattgatgttagctacctggtgcttacgttggatgctccggtggggaatttgacaggctttgaaaatctggtagtgagtgtattgttgtcgtttttacgcctgctaggggacaggttttgatggtgaattcgatgacaagaccaacgtcaaggccgcctggggtaaggtcggcgcgcacgctggcgagtatggtgcggaggccctggagaggatgttcctgtccttccccaccaccaagacctacttcccgcacttcgacctgagccacggctctgccccaggttaagggccacggcaagaaggtggccgacgcgctgaccaacgccgtggcgcacgtggacgacatgcccaacgcgctgtccgccctgagcgacctgcacgcgcacaagcttcgggtggacccggtcaacttcaagctcctaagccactgcctgctggtgagcccatc

SEQ ID NO: 4207 - protein, 174 aa, Zea mays subsp. mays
  peptide (1)..(174): Ceres Seq. ID no. 12365394
  misc_feature (45)..(128): Pfam Name: Acetyltransferase (GNAT) family Pfam Description: Acetyltransferase (GNAT) family
  misc_feature (1)..(172): Homolog of NCBI NO: 38566006 NR Description: N-acetyltransferase 5 [Silurana tropicalis]
  misc_feature (1)..(172): Homolog of NCBI NO: 28278699 NR Description: Unknown (protein for MGC:53877) [Xenopus laevis]
  misc_feature (1)..(172): Homolog of NCBI NO: 7705823 NR Description: N-terminal acetyltransferase complex ard1subunit
  misc_feature (1)..(172): Homolog of NCBI NO: 12052808 NR Description: hypothetical protein [Homo sapiens]
  misc_feature (124)..(174): Homolog of NCBI NO: 25518612 NR Description: hypothetical protein F10O3.2 [imported] -
  misc_feature (1)..(124): Homolog of NCBI NO: 25518612 NR Description: hypothetical protein F10O3.2 [imported] -
  misc_feature (1)..(174): Homolog of NCBI NO: 14423552 NR Description: Unknown protein [Arabidopsis thaliana]
  misc_feature (1)..(174): Homolog of NCBI NO: 18379062 NR Description: expressed protein
  misc_feature (1)..(174): Homolog of NCBI NO: 28273362 NR Description: silencing group B protein [Oryza sativa (japonica
  misc_feature (1)..(174): Homolog of NCBI NO: 14550118 NR Description: silencing group B protein [Zea mays]
MTTIRRFCCDDLLRFASVNLDHLTETFNMSFYMTYLARWPDYFHAAVSPGGRVMGYIMGKVEGQGESWHGHVTAVSVASEFRRQKLAKKLMNLLEEISDKMDKAYFVDLFVRASNMPAIRMYEKLGYVVYRRVLRYYSGEEDGLDMRKALSQDVEKKSIIPLKRPITPDELEYD

SEQ ID NO: 4208 - protein, 146 aa, Zea mays subsp. mays
  peptide (1)..(146): Ceres Seq. ID no. 12365395
  misc_feature (17)..(100): Pfam Name: Acetyltransferase (GNAT) family Pfam Description: Acetyltransferase (GNAT) family
  misc_feature (1)..(144): Homolog of NCBI NO: 38566006 NR Description: N-acetyltransferase 5 [Silurana tropicalis]
  misc_feature (1)..(144): Homolog of NCBI NO: 28278699 NR Description: Unknown (protein for MGC:53877) [Xenopus laevis]
  misc_feature (1)..(144): Homolog of NCBI NO: 7705823 NR Description: N-terminal acetyltransferase complex ard1subunit
  misc_feature (1)..(144): Homolog of NCBI NO: 12052808 NR Description: hypothetical protein [Homo sapiens]
  misc_feature (96)..(146): Homolog of NCBI NO: 25518612 NR Description: hypothetical protein F10O3.2 [imported] -
  misc_feature (1)..(96): Homolog of NCBI NO: 25518612 NR Description: hypothetical protein F10O3.2 [imported] -
  misc_feature (1)..(146): Homolog of NCBI NO: 14423552 NR Description: Unknown protein [Arabidopsis thaliana]
  misc_feature (1)..(146): Homolog of NCBI NO: 18379062 NR Description: expressed protein
  misc_feature (1)..(146): Homolog of NCBI NO: 28273362 NR Description: silencing group B protein [Oryza sativa (japonica
  misc_feature (1)..(146): Homolog of NCBI NO: 14550118 NR Description: silencing group B protein [Zea mays]
MSFYMTYLARWPDYFHAAVSPGGRVMGYIMGKVEGQGESWHGHVTAVSVASEFRRQKLAKKLMNLLEEISDKMDKAYFVDLFVRASNMPAIRMYEKLGYVVYRRVLRYYSGEEDGLDMRKALSQDVEKKSIIPLKRPITPDELEYD

SEQ ID NO: 4209 - protein, 142 aa, Zea mays subsp. mays
  peptide (1)..(142): Ceres Seq. ID no. 12365396
  misc_feature (13)..(96): Pfam Name: Acetyltransferase (GNAT) family Pfam Description: Acetyltransferase (GNAT) family
  misc_feature (1)..(140): Homolog of NCBI NO: 12052808 NR Description: hypothetical protein [Homo sapiens]
  misc_feature (92)..(142): Homolog of NCBI NO: 25518612 NR Description: hypothetical protein F10O3.2 [imported] -
  misc_feature (1)..(92): Homolog of NCBI NO: 25518612 NR Description: hypothetical protein F10O3.2 [imported] -
  misc_feature (1)..(142): Homolog of NCBI NO: 14423552 NR Description: Unknown protein [Arabidopsis thaliana]
  misc_feature (1)..(140): Homolog of NCBI NO: 28278699 NR Description: Unknown (protein for MGC:53877) [Xenopus laevis]
  misc_feature (1)..(140): Homolog of NCBI NO: 7705823 NR Description: N-terminal acetyltransferase complex ard1subunit
  misc_feature (1)..(140): Homolog of NCBI NO: 38566006 NR Description: N-acetyltransferase 5 [Silurana tropicalis]
  misc_feature (1)..(142): Homolog of NCBI NO: 18379062 NR Description: expressed protein
  misc_feature (1)..(142): Homolog of NCBI NO: 28273362 NR Description: silencing group B protein [Oryza sativa (japonica
  misc_feature (1)..(142): Homolog of NCBI NO: 14550118 NR Description: silencing group B protein [Zea mays]
MTYLARWPDYFHAAVSPGGRVMGYIMGKVEGQGESWHGHVTAVSVASEFRRQKLAKKLMNLLEEISDKMDKAYFVDLFVRASNMPAIRMYEKLGYVVYRRVLRYYSGEEDGLDMRKALSQDVEKKSIIPLKRPITPDELEYD

SEQ ID NO: 4210 - DNA, 1635 bp, Zea mays subsp. mays
  misc_feature (1)..(1635): Ceres Seq. ID no. 13577792
  misc_feature: MA Experiment ID: 108529 Result: Up-regulated in Transcription
  misc_feature: MA Experiment 108529 PARAMETER Experiment Name: Zm_Imbibed_Seeds_P Parameter: Age (day) Value: 5 vs. 2
  misc_feature: MA Experiment 108529 PARAMETER Experiment Name: Zm_Imbibed_Seeds_P Parameter: Organism Value: Zea mays
  misc_feature: MA Experiment 108529 PARAMETER Experiment Name: Zm_Imbibed_Seeds_P Parameter: Plant Line Value: 35A19
  misc_feature: MA Experiment 108529 PARAMETER Experiment Name: Zm_Imbibed_Seeds_P Parameter: Tissue Value: Roots vs. Embryo
  misc_feature: MA Experiment ID: 108530 Result: Up-regulated in Transcription
  misc_feature: MA Experiment 108530 PARAMETER Experiment Name: Zm_Imbibed_Seeds_P Parameter: Age (day) Value: 6 vs. 2
  misc_feature: MA Experiment 108530 PARAMETER Experiment Name: Zm_Imbibed_Seeds_P Parameter: Organism Value: Zea mays
  misc_feature: MA Experiment 108530 PARAMETER Experiment Name: Zm_Imbibed_Seeds_P Parameter: Plant Line Value: 35A19
  misc_feature: MA Experiment 108530 PARAMETER Experiment Name: Zm_Imbibed_Seeds_P Parameter: Tissue Value: Aerial vs. Embryo
  misc_feature: MA Experiment ID: 108535 Result: Down-regulated in Transcription
  misc_feature: MA Experiment 108535 PARAMETER Experiment Name: Zm_Meristem_P Parameter: Age (day) Value: 8
  misc_feature: MA Experiment 108535 PARAMETER Experiment Name: Zm_Meristem_P Parameter: Organism Value: Zea mays
  misc_feature: MA Experiment 108535 PARAMETER Experiment Name: Zm_Meristem_P Parameter: Plant Line Value: 35A19
  misc_feature: MA Experiment 108535 PARAMETER Experiment Name: Zm_Meristem_P Parameter: Tissue Value: Root Meristem vs. Above Root Meristem
  misc_feature: MA Experiment ID: 20000492 Result: Down-regulated in Transcription
  misc_feature: MA Experiment 20000492 PARAMETER Experiment Name: Zm_Hybrid_Seed_Dev_P Parameter: DAP Value: 12
  misc_feature: MA Experiment 20000492 PARAMETER Experiment Name: Zm_Hybrid_Seed_Dev_P Parameter: Organism Value: Zea mays
  misc_feature: MA Experiment 20000492 PARAMETER Experiment Name: Zm_Hybrid_Seed_Dev_P Parameter: Plant Line Value: 35A19
  misc_feature: MA Experiment 20000492 PARAMETER Experiment Name: Zm_Hybrid_Seed_Dev_P Parameter: Tissue Value: Fert Kernel vs. Unfert Floret
  misc_feature: MA Experiment ID: 20000535 Result: Down-regulated in Transcription
  misc_feature: MA Experiment 20000535 PARAMETER Experiment Name: Zm_Hybrid_Seed_Dev_P Parameter: DAP Value: 30 vs. 12
  misc_feature: MA Experiment 20000535 PARAMETER Experiment Name: Zm_Hybrid_Seed_Dev_P Parameter: Organism Value: Zea mays
  misc_feature: MA Experiment 20000535 PARAMETER Experiment Name: Zm_Hybrid_Seed_Dev_P Parameter: Plant Line Value: 35A19
  misc_feature: MA Experiment 20000535 PARAMETER Experiment Name: Zm_Hybrid_Seed_Dev_P Parameter: Tissue Value: Embryo vs. Unfert Floret
gcaccaaccttgttgttgttgttcttctatttcttagtatcatagcacagtatttcgtgctctcgcttcgctcccttaatttatcaccattcctaatttattctatttcttagtatcatagcacagtatttcgctcgccccgatttcccaactcttcccgtgcctcagacagcatcggattgcttgatctcgattgtcagaataagattcagcgcaggtttggattcaccgaatccaccgattgcttgcgccccgcggtcgcgcgcggcggaatttcggccgccgccaattcgggcctctccggaagggtgtccccggtgtggttcgcctaatatccgctgccctcgtgcgggactcctcgtgattttcggctgtgcgcttggcttttccagtcccgtgttgtggttccagcctttcaggggatggggcgccgcgggttgctcaaggctgcgcttctgctgtgcttccttgctgcttgctccgggagagaacttacgatcaaacagaacccttccactaccatatacaactcgactcttgccaagatactcgtggaatatgcttctgcaatctatactgctgatttgacgcaattgtttacttggacatgtgccagatgcggtgacttgatcgaggggttcgagatgatagagatcattgtggatgtcgagaactgcttgcaggcatattttggttttgccagtgacataaacgcagtcgttgttgtttttagaggaactcaagagaacagcatccagaattggatagaggacttgttatggaaacaacttgatcttgactaccctggcatgcctgaagcaatggttcaccgagggttttattctgcatatcacaacacgacactacgtgatggagtagtcagtggtattcagaggactaggaaagcttacggagacattccaatcatgatcacgggtcattcaatgggtggagctatggcttcattctgtgcgctcgatcttgttgttaactacggactggatggcgtaaacctgatgacatttgggcagcctcgtattggcaatgctgcatttgcttcttatttcaagacatacttgcctcaagcgatccgagttactcatgcccatgatattgtgcctcacctgccaccatatttctcattcttcccacagaagacctaccatcacttcccaagagaggtatggacccacaatattggactaggaaccctagtgtaccccgtagaaaagatctgtgacgattctggtgaagaccctacatgctgcagatcagtaagtggaagtagcgtgcgagaccatatatactatcttggcgtcagcatgcatgcagaagactggagcagctgcagaatcgtcatggactacagcaaattgcagtatcagatggacctcaacggtaatctcgtattgtcgaagcagcccggtttgtcaaacgccagaggattcagtgctcagtgaaccagtctatgatttgtacagtataatagcttcacgaatcagtaatgttcaattgttaatggatcaaaggagaagggttggaaccagcatgccgattcggagatgcttattgtacatgtgattacgtaatgtattgttcagtttgcaaatatatattcacacacgccgatatttg

SEQ ID NO: 4211 - protein, 345 aa, Zea mays subsp. mays
  peptide (1)..(345): Ceres Seq. ID no. 13577793
  misc_feature (60)..(300): Homolog of NCBI NO: 230348 NR Description: Triacylglycerol Acylhydrolase (E.C.3.1.1.3)
  misc_feature (29)..(302): Homolog of NCBI NO: 21166167 NR Description: triacylglycerol lipase-like protein
  misc_feature (1)..(283): Homolog of NCBI NO: 30686925 NR Description: lipase (class 3) family [Arabidopsis thaliana]
  misc_feature (10)..(332): Homolog of NCBI NO: 34899296 NR Description: putative triacylglycerol lipase
  misc_feature (10)..(332): Homolog of NCBI NO: 34395192 NR Description: putative triacylglycerol lipase
  misc_feature (1)..(332): Homolog of NCBI NO: 18418946 NR Description: lipase (class 3) family [Arabidopsis thaliana]
  misc_feature (1)..(332): Homolog of NCBI NO: 15238889 NR Description: lipase (class 3) family [Arabidopsis thaliana]
  misc_feature (75)..(337): Homolog of NCBI NO: 34907212 NR Description: P0492G09.26 [Oryza sativa (japonica
  misc_feature (1)..(345): Homolog of NCBI NO: 21425569 NR Description: triacylglycerol Lipase [Triticum aestivum]
  misc_feature (1)..(345): Homolog of NCBI NO: 21425571 NR Description: triacylglycerol lipase [Triticum aestivum]
MGRRGLLKAALLLCFLAACSGRELTIKQNPSTTIYNSTLAKILVEYASAIYTADLTQLFTWTCARCGDLIEGFEMIEIIVDVENCLQAYFGFASDINAVVVVFRGTQENSIQNWIEDLLWKQLDLDYPGMPEAMVHRGFYSAYHNTTLRDGVVSGIQRTRKAYGDIPIMITGHSMGGAMASFCALDLVVNYGLDGVNLMTFGQPRIGNAAFASYFKTYLPQAIRVTHAHDIVPHLPPYFSFFPQKTYHHFPREVWTHNIGLGTLVYPVEKICDDSGEDPTCCRSVSGSSVRDHIYYLGVSMHAEDWSSCRIVMDYSKLQYQMDLNGNLVLSKQPGLSNARGFSAQ

SEQ ID NO: 4212 - protein, 271 aa, Zea mays subsp. mays
  peptide (1)..(271): Ceres Seq. ID no. 13577794
  misc_feature (1)..(226): Homolog of NCBI NO: 230348 NR Description: Triacylglycerol Acylhydrolase (E.C.3.1.1.3)
  misc_feature (1)..(228): Homolog of NCBI NO: 21166167 NR Description: triacylglycerol lipase-like protein
  misc_feature (1)..(209): Homolog of NCBI NO: 30686925 NR Description: lipase (class 3) family [Arabidopsis thaliana]
  misc_feature (1)..(258): Homolog of NCBI NO: 34899296 NR Description: putative triacylglycerol lipase
  misc_feature (1)..(258): Homolog of NCBI NO: 34395192 NR Description: putative triacylglycerol lipase
  misc_feature (1)..(258): Homolog of NCBI NO: 18418946 NR Description: lipase (class 3) family [Arabidopsis thaliana]
  misc_feature (1)..(258): Homolog of NCBI NO: 15238889 NR Description: lipase (class 3) family [Arabidopsis thaliana]
  misc_feature (1)..(263): Homolog of NCBI NO: 34907212 NR Description: P0492G09.26 [Oryza sativa (japonica
  misc_feature (1)..(271): Homolog of NCBI NO: 21425569 NR Description: triacylglycerol Lipase [Triticum aestivum]
  misc_feature (1)..(271): Homolog of NCBI NO: 21425571 NR Description: triacylglycerol lipase [Triticum aestivum]
MIEIIVDVENCLQAYFGFASDINAVVVVFRGTQENSIQNWIEDLLWKQLDLDYPGMPEAMVHRGFYSAYHNTTLRDGVVSGIQRTRKAYGDIPIMITGHSMGGAMASFCALDLVVNYGLDGVNLMTFGQPRIGNAAFASYFKTYLPQAIRVTHAHDIVPHLPPYFSFFPQKTYHHFPREVWTHNIGLGTLVYPVEKICDDSGEDPTCCRSVSGSSVRDHIYYLGVSMHAEDWSSCRIVMDYSKLQYQMDLNGNLVLSKQPGLSNARGFSAQ

SEQ ID NO: 4213 - protein, 216 aa, Zea mays subsp. mays
  peptide (1)..(216): Ceres Seq. ID no. 13577795
  misc_feature (1)..(171): Homolog of NCBI NO: 230348 NR Description: Triacylglycerol Acylhydrolase (E.C.3.1.1.3)
  misc_feature (1)..(173): Homolog of NCBI NO: 21166167 NR Description: triacylglycerol lipase-like protein
  misc_feature (1)..(154): Homolog of NCBI NO: 30686925 NR Description: lipase (class 3) family [Arabidopsis thaliana]
  misc_feature (1)..(203): Homolog of NCBI NO: 34899296 NR Description: putative triacylglycerol lipase
  misc_feature (1)..(203): Homolog of NCBI NO: 34395192 NR Description: putative triacylglycerol lipase
  misc_feature (1)..(203): Homolog of NCBI NO: 18418946 NR Description: lipase (class 3) family [Arabidopsis thaliana]
  misc_feature (1)..(203): Homolog of NCBI NO: 15238889 NR Description: lipase (class 3) family [Arabidopsis thaliana]
  misc_feature (1)..(208): Homolog of NCBI NO: 34907212 NR Description: P0492G09.26 [Oryza sativa (japonica
  misc_feature (1)..(216): Homolog of NCBI NO: 21425569 NR Description: triacylglycerol Lipase [Triticum aestivum]
  misc_feature (1)..(216): Homolog of NCBI NO: 21425571 NR Description: triacylglycerol lipase [Triticum aestivum]
MPEAMVHRGFYSAYHNTTLRDGVVSGIQRTRKAYGDIPIMITGHSMGGAMASFCALDLVVNYGLDGVNLMTFGQPRIGNAAFASYFKTYLPQAIRVTHAHDIVPHLPPYFSFFPQKTYHHFPREVWTHNIGLGTLVYPVEKICDDSGEDPTCCRSVSGSSVRDHIYYLGVSMHAEDWSSCRIVMDYSKLQYQMDLNGNLVLSKQPGLSNARGFSAQ

SEQ ID NO: 4214 - DNA, 973 bp, Zea mays subsp. mays
  misc_feature (1)..(973): Ceres Seq. ID no. 12401449
  misc_feature: MA Experiment ID: 108547 Result: Down-regulated in Transcription
  misc_feature: MA Experiment 108547 PARAMETER Experiment Name: Zm_Imbibed_Seeds_P Parameter: Age (day) Value: 4 vs. 2
  misc_feature: MA Experiment 108547 PARAMETER Experiment Name: Zm_Imbibed_Seeds_P Parameter: Organism Value: Zea mays
  misc_feature: MA Experiment 108547 PARAMETER Experiment Name: Zm_Imbibed_Seeds_P Parameter: Plant Line Value: 35A19
  misc_feature: MA Experiment 108547 PARAMETER Experiment Name: Zm_Imbibed_Seeds_P Parameter: Tissue Value: Aerial vs. Embryo
acacatccgccgccgtttcttctcccatcatcttcctcgcagcgccggcgctccctctcccgctcccttccttactcgcgctcggcacacaggcggcggcgctcgggctctcagcgacggcgtcagcggcttaccctcgcgccctcgcctccggtcctccgcacaccggccggtgaccctgcgacaacattgcatctgaactgcattggatcctaagagatgatggatgagtcttttcttgataggatggtttcccaacttcggtcaacatgcaagtactacactggatatcccaaggacttagggcgatcaagaattataccattcacatctgagcgtcagtttgtgcagctattacatgaaggcaggcctgtagtcgttgcctttactattaagtgcacatatacacagcatcttgataaagttctggaagaggccgcagctaaattttatccacatatcaagtttgtccgagttgagtgcccgaagtaccctgggttttgcctcacaaggcaaaggaacgaatatccatttgttgaagtattctacaacccagaacaggctgcaagcccaggaaagagcgtggatcctaacatcaccaagtattctgtaaaagtgctaccgttcaactatgaccaaagcgtgtatggatttcgagaatatttcaagaagcatggtttcaagtattctgaaacaaactagatctgttgttaaagatctgcctcgagagtagtcctagggacttgagtagcatgtggaggcagttgttgtatggagttgaaatggcgtgaggctctaatgggaggccttgactagttcattcgagaatgcctgtcatgtattcatttgtatacgggctactgctcatgcctagagatttgcttttccgtacctatgaaccattggatttggtaatgttttacctctcaaagcccggagtgagcaatttgcatcattttttcaagcactgtcg

SEQ ID NO: 4215 - protein, 160 aa, Zea mays subsp. mays
  peptide (1)..(160): Ceres Seq. ID no. 12401450
  misc_feature (1)..(158): Homolog of NCBI NO: 15242070 NR Description: unknown protein; protein id: At5g57230.1
MMDESFLDRMVSQLRSTCKYYTGYPKDLGRSRIIPFTSERQFVQLLHEGRPVVVAFTIKCTYTQHLDKVLEEAAAKFYPHIKFVRVECPKYPGFCLTRQRNEYPFVEVFYNPEQAASPGKSVDPNITKYSVKVLPFNYDQSVYGFREYFKKHGFKYSETN

SEQ ID NO: 4216 - protein, 159 aa, Zea mays subsp. mays
  peptide (1)..(159): Ceres Seq. ID no. 12401451
  misc_feature (1)..(157): Homolog of NCBI NO: 15242070 NR Description: unknown protein; protein id: At5g57230.1
MDESFLDRMVSQLRSTCKYYTGYPKDLGRSRIIPFTSERQFVQLLHEGRPVVVAFTIKCTYTQHLDKVLEEAAAKFYPHIKFVRVECPKYPGFCLTRQRNEYPFVEVFYNPEQAASPGKSVDPNITKYSVKVLPFNYDQSVYGFREYFKKHGFKYSETN

SEQ ID NO: 4217 - protein, 151 aa, Zea mays subsp. mays
  peptide (1)..(151): Ceres Seq. ID no. 12401452
  misc_feature (1)..(149): Homolog of NCBI NO: 15242070 NR Description: unknown protein; protein id: At5g57230.1
MVSQLRSTCKYYTGYPKDLGRSRIIPFTSERQFVQLLHEGRPVVVAFTIKCTYTQHLDKVLEEAAAKFYPHIKFVRVECPKYPGFCLTRQRNEYPFVEVFYNPEQAASPGKSVDPNITKYSVKVLPFNYDQSVYGFREYFKKHGFKYSETN

SEQ ID NO: 4218 - DNA, 1150 bp, Zea mays subsp. mays
  misc_feature (1)..(1150): Ceres Seq. ID no. 12356179
  misc_feature: MA Experiment ID: 108526 Result: Up-regulated in Transcription
  misc_feature: MA Experiment 108526 PARAMETER Experiment Name: Zm_5mM_NO_P Parameter: Age (day) Value: 8
  misc_feature: MA Experiment 108526 PARAMETER Experiment Name: Zm_5mM_NO_P Parameter: Organism Value: Zea mays
  misc_feature: MA Experiment 108526 PARAMETER Experiment Name: Zm_5mM_NO_P Parameter: Plant Line Value: 35A19
  misc_feature: MA Experiment 108526 PARAMETER Experiment Name: Zm_5mM_NO_P Parameter: Timepoint (hr) Value: 1
  misc_feature: MA Experiment 108526 PARAMETER Experiment Name: Zm_5mM_NO_P Parameter: Tissue Value: Aerial
  misc_feature: MA Experiment 108526 PARAMETER Experiment Name: Zm_5mM_NO_P Parameter: Treatment Value: 5mM NO vs. No Treatment
  misc_feature: MA Experiment ID: 108527 Result: Up-regulated in Transcription
  misc_feature: MA Experiment 108527 PARAMETER Experiment Name: Zm_5mM_NO_P Parameter: Age (day) Value: 8
  misc_feature: MA Experiment 108527 PARAMETER Experiment Name: Zm_5mM_NO_P Parameter: Organism Value: Zea mays
  misc_feature: MA Experiment 108527 PARAMETER Experiment Name: Zm_5mM_NO_P Parameter: Plant Line Value: 35A19
  misc_feature: MA Experiment 108527 PARAMETER Experiment Name: Zm_5mM_NO_P Parameter: Timepoint (hr) Value: 6
  misc_feature: MA Experiment 108527 PARAMETER Experiment Name: Zm_5mM_NO_P Parameter: Tissue Value: Aerial
  misc_feature: MA Experiment 108527 PARAMETER Experiment Name: Zm_5mM_NO_P Parameter: Treatment Value: 5mM NO vs. No Treatment
  misc_feature: MA Experiment ID: 108528 Result: Down-regulated in Transcription
  misc_feature: MA Experiment 108528 PARAMETER Experiment Name: Zm_Imbibed_Seeds_P Parameter: Age (day) Value: 5 vs. 2
  misc_feature: MA Experiment 108528 PARAMETER Experiment Name: Zm_Imbibed_Seeds_P Parameter: Organism Value: Zea mays
  misc_feature: MA Experiment 108528 PARAMETER Experiment Name: Zm_Imbibed_Seeds_P Parameter: Plant Line Value: 35A19
  misc_feature: MA Experiment 108528 PARAMETER Experiment Name: Zm_Imbibed_Seeds_P Parameter: Tissue Value: Aerial vs. Embryo
  misc_feature: MA Experiment ID: 108530 Result: Down-regulated in Transcription
  misc_feature: MA Experiment 108530 PARAMETER Experiment Name: Zm_Imbibed_Seeds_P Parameter: Age (day) Value: 6 vs. 2
  misc_feature: MA Experiment 108530 PARAMETER Experiment Name: Zm_Imbibed_Seeds_P Parameter: Organism Value: Zea mays
  misc_feature: MA Experiment 108530 PARAMETER Experiment Name: Zm_Imbibed_Seeds_P Parameter: Plant Line Value: 35A19
  misc_feature: MA Experiment 108530 PARAMETER Experiment Name: Zm_Imbibed_Seeds_P Parameter: Tissue Value: Aerial vs. Embryo
  misc_feature: MA Experiment ID: 108534 Result: Up-regulated in Transcription
  misc_feature: MA Experiment 108534 PARAMETER Experiment Name: Zm_4deg_Cold_P Parameter: Age (hr) Value: 8
  misc_feature: MA Experiment 108534 PARAMETER Experiment Name: Zm_4deg_Cold_P Parameter: Organism Value: Zea mays
  misc_feature: MA Experiment 108534 PARAMETER Experiment Name: Zm_4deg_Cold_P Parameter: Plant Line Value: 35A19
  misc_feature: MA Experiment 108534 PARAMETER Experiment Name: Zm_4deg_Cold_P Parameter: Temperature (deg C) Value: 4 vs. 22
  misc_feature: MA Experiment 108534 PARAMETER Experiment Name: Zm_4deg_Cold_P Parameter: Timepoint (hr) Value: 6
  misc_feature: MA Experiment 108534 PARAMETER Experiment Name: Zm_4deg_Cold_P Parameter: Tissue Value: Aerial
  misc_feature: MA Experiment ID: 108543 Result: Up-regulated in Transcription
  misc_feature: MA Experiment ID: 108544 Result: Down-regulated in Transcription
  misc_feature: MA Experiment ID: 108545 Result: Down-regulated in Transcription
  misc_feature: MA Experiment 108545 PARAMETER Experiment Name: Zm_Imbibed_Seeds_P Parameter: Age (day) Value: 3 vs. 2
  misc_feature: MA Experiment 108545 PARAMETER Experiment Name: Zm_Imbibed_Seeds_P Parameter: Organism Value: Zea mays
  misc_feature: MA Experiment 108545 PARAMETER Experiment Name: Zm_Imbibed_Seeds_P Parameter: Plant Line Value: 35A19
  misc_feature: MA Experiment 108545 PARAMETER Experiment Name: Zm_Imbibed_Seeds_P Parameter: Tissue Value: Aerial vs. Embryo
  misc_feature: MA Experiment ID: 108547 Result: Down-regulated in Transcription
  misc_feature: MA Experiment 108547 PARAMETER Experiment Name: Zm_Imbibed_Seeds_P Parameter: Age (day) Value: 4 vs. 2
  misc_feature: MA Experiment 108547 PARAMETER Experiment Name: Zm_Imbibed_Seeds_P Parameter: Organism Value: Zea mays
  misc_feature: MA Experiment 108547 PARAMETER Experiment Name: Zm_Imbibed_Seeds_P Parameter: Plant Line Value: 35A19
  misc_feature: MA Experiment 108547 PARAMETER Experiment Name: Zm_Imbibed_Seeds_P Parameter: Tissue Value: Aerial vs. Embryo
  misc_feature: MA Experiment ID: 108559 Result: Down-regulated in Transcription
  misc_feature: MA Experiment 108559 PARAMETER Experiment Name: Zm_5mM_NO_P Parameter: Age (day) Value: 8
  misc_feature: MA Experiment 108559 PARAMETER Experiment Name: Zm_5mM_NO_P Parameter: Organism Value: Zea mays
  misc_feature: MA Experiment 108559 PARAMETER Experiment Name: Zm_5mM_NO_P Parameter: Plant Line Value: 35A19
  misc_feature: MA Experiment 108559 PARAMETER Experiment Name: Zm_5mM_NO_P Parameter: Timepoint (hr) Value: 12
  misc_feature: MA Experiment 108559 PARAMETER Experiment Name: Zm_5mM_NO_P Parameter: Tissue Value: Aerial
  misc_feature: MA Experiment 108559 PARAMETER Experiment Name: Zm_5mM_NO_P Parameter: Treatment Value: 5mM NO vs. No Treatment
  misc_feature: MA Experiment ID: 20000477 Result: Down-regulated in Transcription
  misc_feature: MA Experiment 20000477 PARAMETER Experiment Name: Zm_5mM_SA_P Parameter: Age (day) Value: 10
  misc_feature: MA Experiment 20000477 PARAMETER Experiment Name: Zm_5mM_SA_P Parameter: Organism Value: Zea mays
  misc_feature: MA Experiment 20000477 PARAMETER Experiment Name: Zm_5mM_SA_P Parameter: Plant Line Value: 35A19
  misc_feature: MA Experiment 20000477 PARAMETER Experiment Name: Zm_5mM_SA_P Parameter: Timepoint (hr) Value: 48
  misc_feature: MA Experiment 20000477 PARAMETER Experiment Name: Zm_5mM_SA_P Parameter: Tissue Value: Aerial
  misc_feature: MA Experiment 20000477 PARAMETER Experiment Name: Zm_5mM_SA_P Parameter: Treatment Value: 5mM SA vs. No Treatment
  misc_feature: MA Experiment ID: 20000478 Result: Down-regulated in Transcription
  misc_feature: MA Experiment 20000478 PARAMETER Experiment Name: Zm_5mM_SA_P Parameter: Age (day) Value: 11
  misc_feature: MA Experiment 20000478 PARAMETER Experiment Name: Zm_5mM_SA_P Parameter: Organism Value: Zea mays
  misc_feature: MA Experiment 20000478 PARAMETER Experiment Name: Zm_5mM_SA_P Parameter: Plant Line Value: 35A19
  misc_feature: MA Experiment 20000478 PARAMETER Experiment Name: Zm_5mM_SA_P Parameter: Timepoint (hr) Value: 72
  misc_feature: MA Experiment 20000478 PARAMETER Experiment Name: Zm_5mM_SA_P Parameter: Tissue Value: Aerial
  misc_feature: MA Experiment 20000478 PARAMETER Experiment Name: Zm_5mM_SA_P Parameter: Treatment Value: 5mM SA vs. No Treatment
  misc_feature: MA Experiment ID: 20000479 Result: Down-regulated in Transcription
  misc_feature: MA Experiment 20000479 PARAMETER Experiment Name: Zm_Drought_P Parameter: Age (day) Value: 10
  misc_feature: MA Experiment 20000479 PARAMETER Experiment Name: Zm_Drought_P Parameter: Organism Value: Zea mays
  misc_feature: MA Experiment 20000479 PARAMETER Experiment Name: Zm_Drought_P Parameter: Plant Line Value: 35A19
  misc_feature: MA Experiment 20000479 PARAMETER Experiment Name: Zm_Drought_P Parameter: Timepoint (hr) Value: 48
  misc_feature: MA Experiment 20000479 PARAMETER Experiment Name: Zm_Drought_P Parameter: Tissue Value: Aerial
  misc_feature: MA Experiment 20000479 PARAMETER Experiment Name: Zm_Drought_P Parameter: Treatment Value: Drought vs. No Drought
  misc_feature: MA Experiment ID: 20000480 Result: Down-regulated in Transcription
  misc_feature: MA Experiment 20000480 PARAMETER Experiment Name: Zm_Drought_P Parameter: Age (day) Value: 11
  misc_feature: MA Experiment 20000480 PARAMETER Experiment Name: Zm_Drought_P Parameter: Organism Value: Zea mays
  misc_feature: MA Experiment 20000480 PARAMETER Experiment Name: Zm_Drought_P Parameter: Plant Line Value: 35A19
  misc_feature: MA Experiment 20000480 PARAMETER Experiment Name: Zm_Drought_P Parameter: Timepoint (hr) Value: 72
  misc_feature: MA Experiment 20000480 PARAMETER Experiment Name: Zm_Drought_P Parameter: Tissue Value: Aerial
  misc_feature: MA Experiment 20000480 PARAMETER Experiment Name: Zm_Drought_P Parameter: Treatment Value: Drought vs. No Drought
  misc_feature: MA Experiment ID: 20000533 Result: Down-regulated in Transcription
  misc_feature: MA Experiment 20000533 PARAMETER Experiment Name: Zm_0.001percent_MeJA_P Parameter: Age (day) Value: 11
  misc_feature: MA Experiment 20000533 PARAMETER Experiment Name: Zm_0.001percent_MeJA_P Parameter: Organism Value: Zea mays
  misc_feature: MA Experiment 20000533 PARAMETER Experiment Name: Zm_0.001percent_MeJA_P Parameter: Plant Line Value: 35A19
  misc_feature: MA Experiment 20000533 PARAMETER Experiment Name: Zm_0.001percent_MeJA_P Parameter: Timepoint (hr) Value: 72
  misc_feature: MA Experiment 20000533 PARAMETER Experiment Name: Zm_0.001percent_MeJA_P Parameter: Tissue Value: Aerial
  misc_feature: MA Experiment 20000533 PARAMETER Experiment Name: Zm_0.001percent_MeJA_P Parameter: Treatment Value: 0.001percent MeJA vs. No Treatment
  misc_feature: MA Experiment ID: 20000535 Result: Up-regulated in Transcription
  misc_feature: MA Experiment 20000535 PARAMETER Experiment Name: Zm_Hybrid_Seed_Dev_P Parameter: DAP Value: 30 vs. 12
  misc_feature: MA Experiment 20000535 PARAMETER Experiment Name: Zm_Hybrid_Seed_Dev_P Parameter: Organism Value: Zea mays
  misc_feature: MA Experiment 20000535 PARAMETER Experiment Name: Zm_Hybrid_Seed_Dev_P Parameter: Plant Line Value: 35A19
  misc_feature: MA Experiment 20000535 PARAMETER Experiment Name: Zm_Hybrid_Seed_Dev_P Parameter: Tissue Value: Embryo vs. Unfert Floret
  misc_feature: MA Experiment ID: 20000626 Result: Down-regulated in Transcription
  misc_feature: MA Experiment 20000626 PARAMETER Experiment Name: Zm_Herbicide-Treatments_P Parameter: Timepoint (hr) Value: 12
  misc_feature: MA Experiment 20000626 PARAMETER Experiment Name: Zm_Herbicide-Treatments_P Parameter: Tissue Value: Aerial
  misc_feature: MA Experiment 20000626 PARAMETER Experiment Name: Zm_Herbicide-Treatments_P Parameter: Treatment Value: Roundup vs. No Treatment
  misc_feature: MA Experiment ID: 20000629 Result: Up-regulated in Transcription
  misc_feature: MA Experiment 20000629 PARAMETER Experiment Name: Zm_Herbicide-Treatments_P Parameter: Timepoint (hr) Value: 12
  misc_feature: MA Experiment 20000629 PARAMETER Experiment Name: Zm_Herbicide-Treatments_P Parameter: Tissue Value: Aerial
  misc_feature: MA Experiment 20000629 PARAMETER Experiment Name: Zm_Herbicide-Treatments_P Parameter: Treatment Value: Trimec vs. No Treatment
acacacaacaccagtcaccagctcatcacatccatctcattctactactgcctcagagaccaagctgctgcaaccggagaaggagatctattctacaaagtgaagtacttggcttgggacatggaaaccgtcgtgggagacctcatggcgaccgagctgaggcttggcctgccgggcaccgtggacgactgcagccagcaccagcagcagacccagctgaaggtggccgcgccgccgtccaaccctactaggggcaagaagcgcgccgccgccgaggaggaggcagacaagcgcgacgcggaggcagcacccccggcggccaaggcgcccgtggtcggatggccaccggtgaggtcgtaccgggaagagctgcttccagcaggcaaagcagcaggccgtcagcagcagcagcagcaaggcggccgacaaagaggatgctgcggcgccggcgccgaggctgcacggcttccgcagccgcctcaaacgccaccgccggcgccggggccggctcattcgtcaaggttagcatggacggcgccccgtacctgcggaagctcgacctgaggatgtacaagggctaccgggagctccgggaggccctggaggccatgttcgtctcctccggcagcgccaacgacaaaaacctgtcggagtttgccgtcacctaccaggacaaggacggcgacctcatgctcgtcggagacgtgccgttcgagatgttcgctagcacctgcaggaagctgaggatcatgaagagatctgaagccacaggcctgggatcggcgaggcaatgaagaaggtctgaccacgaccgagggcccgacaacgttcatgtcgatctctctctctctctctctctctctcttctttttttttttgccccattattttattttgttcttcttgttcgggagaccccaagccaaaaggatgagcttggtggcgcatcaatctacaaagcgcatgcatatacgcggatgtgtgtgcggctttggttctgtaagacgacgactagtagagctaggtctttttttagcagcagcacagaaggagatgcatgctgatgacgaggttgtttcggcttagctctccatatgctgtgtttgtacaaaccaaacaatacagttatcttcaccgtcgttgatccctt

SEQ ID NO: 4219 - protein, 187 aa, Zea mays subsp. mays
  peptide (1)..(187): Ceres Seq. ID no. 12356180
  misc_feature (47)..(129): Pfam Name: AUX/IAA family Pfam Description: AUX/IAA family
  misc_feature (47)..(130): Homolog of NCBI NO: 4887018 NR Description: Nt-iaa4.5 deduced protein [Nicotiana tabacum]
  misc_feature (47)..(135): Homolog of NCBI NO: 15239950 NR Description: auxin-induced protein AUX2-11 (sp P33077)
  misc_feature (50)..(132): Homolog of NCBI NO: 18071490 NR Description: auxin-induced AUX/IAA1 [Antirrhinum majus]
  misc_feature (68)..(149): Homolog of NCBI NO: 30962267 NR Description: Aux/IAA protein [Oryza sativa (indica
  misc_feature (47)..(122): Homolog of NCBI NO: 11131103 NR Description: Auxin-induced protein 22D (Indole-3-acetic acid
  misc_feature (68)..(149): Homolog of NCBI NO: 17154533 NR Description: putative IAA1 protein [Oryza sativa (indica
  misc_feature (47)..(132): Homolog of NCBI NO: 1352057 NR Description: AUXIN-INDUCED PROTEIN IAA4
  misc_feature (47)..(129): Homolog of NCBI NO: 34550779 NR Description: Gbiaa-Re [Gossypium barbadense]
  misc_feature (47)..(132): Homolog of NCBI NO: 416641 NR Description: Auxin-induced protein 22B (Indole-3-acetic acid
  misc_feature (47)..(129): Homolog of NCBI NO: 20269063 NR Description: aux/IAA protein [Populus tremula x Populus
THNTSHQLITSISFYYCLRDQAAATGEGDLFYKVKYLAWDMETVVGDLMATELRLGLPGTVDDCSQHQQQTQLKVAAPPSNPTRGKKRAAAEEEADKRDAEAAPPAAKAPVVGWPPVRSYREELLPAGKAAGRQQQQQQGGRQRGCCGAGAEAARLPQPPQTPPPAPGPAHSSRLAWTAPRTCGSST

SEQ ID NO: 4220 - protein, 151 aa, Zea mays subsp. mays
  peptide (1)..(151): Ceres Seq. ID no. 12356181
  misc_feature (34)..(149): Pfam Name: AUX/IAA family Pfam Description: AUX/IAA family
  misc_feature (56)..(150): Homolog of NCBI NO: 4887018 NR Description: Nt-iaa4.5 deduced protein [Nicotiana tabacum]
  misc_feature (55)..(147): Homolog of NCBI NO: 15239950 NR Description: auxin-induced protein AUX2-11 (sp P33077)
  misc_feature (50)..(139): Homolog of NCBI NO: 18071490 NR Description: auxin-induced AUX/IAA1 [Antirrhinum majus]
  misc_feature (47)..(146): Homolog of NCBI NO: 30962267 NR Description: Aux/IAA protein [Oryza sativa (indica
  misc_feature (55)..(147): Homolog of NCBI NO: 11131103 NR Description: Auxin-induced protein 22D (Indole-3-acetic acid
  misc_feature (47)..(146): Homolog of NCBI NO: 17154533 NR Description: putative IAA1 protein [Oryza sativa (indica
  misc_feature (57)..(147): Homolog of NCBI NO: 1352057 NR Description: AUXIN-INDUCED PROTEIN IAA4
  misc_feature (55)..(147): Homolog of NCBI NO: 34550779 NR Description: Gbiaa-Re [Gossypium barbadense]
  misc_feature (53)..(147): Homolog of NCBI NO: 416641 NR Description: Auxin-induced protein 22B (Indole-3-acetic acid
  misc_feature (34)..(149): Homolog of NCBI NO: 20269063 NR Description: aux/IAA protein [Populus tremula x Populus
MATGEVVPGRAASSRQSSRPSAAAAARRPTKRMLRRRRRGCTASAAASNATAGAGAGSFVKVSMDGAPYLRKLDLRMYKGYRELREALEAMFVSSGSANDKNLSEFAVTYQDKDGDLMLVGDVPFEMFASTCRKLRIMKRSEATGLGSARQ

SEQ ID NO: 4221 - protein, 147 aa, Zea mays subsp. mays
  peptide (1)..(147): Ceres Seq. ID no. 12356182
  misc_feature (7)..(89): Pfam Name: AUX/IAA family Pfam Description: AUX/IAA family
  misc_feature (7)..(90): Homolog of NCBI NO: 4887018 NR Description: Nt-iaa4.5 deduced protein [Nicotiana tabacum]
  misc_feature (7)..(95): Homolog of NCBI NO: 15239950 NR Description: auxin-induced protein AUX2-11 (sp P33077)
  misc_feature (10)..(92): Homolog of NCBI NO: 18071490 NR Description: auxin-induced AUX/IAA1 [Antirrhinum majus]
  misc_feature (28)..(109): Homolog of NCBI NO: 30962267 NR Description: Aux/IAA protein [Oryza sativa (indica
  misc_feature (7)..(82): Homolog of NCBI NO: 11131103 NR Description: Auxin-induced protein 22D (Indole-3-acetic acid
  misc_feature (28)..(109): Homolog of NCBI NO: 17154533 NR Description: putative IAA1 protein [Oryza sativa (indica
  misc_feature (7)..(92): Homolog of NCBI NO: 1352057 NR Description: AUXIN-INDUCED PROTEIN IAA4
  misc_feature (7)..(89): Homolog of NCBI NO: 34550779 NR Description: Gbiaa-Re [Gossypium barbadense]
  misc_feature (7)..(92): Homolog of NCBI NO: 416641 NR Description: Auxin-induced protein 22B (Indole-3-acetic acid
  misc_feature (7)..(89): Homolog of NCBI NO: 20269063 NR Description: aux/IAA protein [Populus tremula x Populus
METVVGDLMATELRLGLPGTVDDCSQHQQQTQLKVAAPPSNPTRGKKRAAAEEEADKRDAEAAPPAAKAPVVGWPPVRSYREELLPAGKAAGRQQQQQQGGRQRGCCGAGAEAARLPQPPQTPPPAPGPAHSSRLAWTAPRTCGSST

SEQ ID NO: 4222 - DNA, 1021 bp, Zea mays subsp. mays
  misc_feature (1)..(1021): Ceres Seq. ID no. 12403002
  misc_feature: MA Experiment ID: 108535 Result: Up-regulated in Transcription
  misc_feature: MA Experiment 108535 PARAMETER Experiment Name: Zm_Meristem_P Parameter: Age (day) Value: 8
  misc_feature: MA Experiment 108535 PARAMETER Experiment Name: Zm_Meristem_P Parameter: Organism Value: Zea mays
  misc_feature: MA Experiment 108535 PARAMETER Experiment Name: Zm_Meristem_P Parameter: Plant Line Value: 35A19
  misc_feature: MA Experiment 108535 PARAMETER Experiment Name: Zm_Meristem_P Parameter: Tissue Value: Root Meristem vs. Above Root Meristem
  misc_feature: MA Experiment ID: 108544 Result: Down-regulated in Transcription
  misc_feature: MA Experiment ID: 20000487 Result: Up-regulated in Transcription
  misc_feature: MA Experiment 20000487 PARAMETER Experiment Name: Zm_50mM_NH4NO3_L_to_H_P Parameter: Organism Value: Zea mays
  misc_feature: MA Experiment 20000487 PARAMETER Experiment Name: Zm_50mM_NH4NO3_L_to_H_P Parameter: Timepoint (hr) Value: 4
  misc_feature: MA Experiment 20000487 PARAMETER Experiment Name: Zm_50mM_NH4NO3_L_to_H_P Parameter: Tissue Value: Leaves
  misc_feature: MA Experiment 20000487 PARAMETER Experiment Name: Zm_50mM_NH4NO3_L_to_H_P Parameter: Treatment Value: 50mM NH4NO3 vs. 100mM Mannitol
  misc_feature: MA Experiment ID: 20000488 Result: Up-regulated in Transcription
  misc_feature: MA Experiment 20000488 PARAMETER Experiment Name: Zm_50mM_NH4NO3_L_to_H_P Parameter: Organism Value: Zea mays
  misc_feature: MA Experiment 20000488 PARAMETER Experiment Name: Zm_50mM_NH4NO3_L_to_H_P Parameter: Timepoint (hr) Value: 8
  misc_feature: MA Experiment 20000488 PARAMETER Experiment Name: Zm_50mM_NH4NO3_L_to_H_P Parameter: Tissue Value: Leaves
  misc_feature: MA Experiment 20000488 PARAMETER Experiment Name: Zm_50mM_NH4NO3_L_to_H_P Parameter: Treatment Value: 50mM NH4NO3 vs. 100mM Mannitol
  misc_feature: MA Experiment ID: 20000535 Result: Up-regulated in Transcription
  misc_feature: MA Experiment 20000535 PARAMETER Experiment Name: Zm_Hybrid_Seed_Dev_P Parameter: DAP Value: 30 vs. 12
  misc_feature: MA Experiment 20000535 PARAMETER Experiment Name: Zm_Hybrid_Seed_Dev_P Parameter: Organism Value: Zea mays
  misc_feature: MA Experiment 20000535 PARAMETER Experiment Name: Zm_Hybrid_Seed_Dev_P Parameter: Plant Line Value: 35A19
  misc_feature: MA Experiment 20000535 PARAMETER Experiment Name: Zm_Hybrid_Seed_Dev_P Parameter: Tissue Value: Embryo vs. Unfert Floret
  misc_feature: MA Experiment ID: 20000626 Result: Up-regulated in Transcription
  misc_feature: MA Experiment 20000626 PARAMETER Experiment Name: Zm_Herbicide-Treatments_P Parameter: Timepoint (hr) Value: 12
  misc_feature: MA Experiment 20000626 PARAMETER Experiment Name: Zm_Herbicide-Treatments_P Parameter: Tissue Value: Aerial
  misc_feature: MA Experiment 20000626 PARAMETER Experiment Name: Zm_Herbicide-Treatments_P Parameter: Treatment Value: Roundup vs. No Treatment
ctctcctctcatcctaccctaaccgccgccgccgccgcccgccgtcctttcctgtataataaaacctcaaatcgtctctctcccgtcctcccctccaccgccgcagccgccgccgtacctcctcctcccgcgcagcagccaccgccaccgccggaaatgaagaccatcctggccacggagacgatggacatccccgagggggtcacggtcacggtggcggccaagctggtgacggtggaggggccgcgcggtaagctcacccgcaacttcaagcacctcaacctcgacttccagctgcaggacggcggtcgcaagctcaaggtcgacgcctggtttggcacccgccgaaccatggccgccatccgcaccgccatctcccacgtccagaacctcatcgcaggcgtcaccaagggtttccgctacaagatgcggttcgtctacgctcactttcccatcaacgcctccatcaccaacgccaactccgccattgagatcagaaacttcctcggggagaagaaggtcaggaaggttgatatgcttgaaggtgtgaccatcttgcgttcagagaaggtcaaggatgagcttgttcttgaaggcaatgatgttgagcttgtctctcgctccgctgctctcataaaccagaaatgccatgtcaagaagaaggatatccggaagttcttggacggtatctatgtgagtgacaagggccccatctttgatgagcaatgagctgccctttgttcctggctagcaaaagccgtgttaggctgtggccagtagactgtttgcggagtggatgtagttggaaataggagatgggatgagtaaggttgctggagataagctttagcaagagtttatgagatggacctttattttgtgttgtgtttttttttgtttgagttcagttaactacatctttgcaagttggttggatctgaagttctgtactgtcttaggatgttattatgtaacccgaggtggacattgtttgtgatcatattcttcacctaagtacctc

SEQ ID NO: 4223 - protein, 242 aa, Zea mays subsp. mays
  peptide (1)..(242): Ceres Seq. ID no. 12403003
  misc_feature (150)..(229): Pfam Name: Ribosomal protein L6 Pfam Description: Ribosomal protein L6
  misc_feature (53)..(242): Homolog of NCBI NO: 21759391 NR Description: 60S ribosomal protein L9
  misc_feature (53)..(241): Homolog of NCBI NO: 21759393 NR Description: 60S ribosomal protein L9
  misc_feature (53)..(242): Homolog of NCBI NO: 2129720 NR Description: ribosomal protein L9, cytosolic - Arabidopsis
  misc_feature (53)..(242): Homolog of NCBI NO: 15235114 NR Description: putative ribosomal protein L9, cytosolic
  misc_feature (53)..(242): Homolog of NCBI NO: 21554945 NR Description: ribosomal protein L9, putative [Arabidopsis
  misc_feature (53)..(242): Homolog of NCBI NO: 18398753 NR Description: ribosomal protein L9, putative
  misc_feature (53)..(242): Homolog of NCBI NO: 6015604 NR Description: ribosomal protein L9 [Pisum sativum]
  misc_feature (53)..(242): Homolog of NCBI NO: 266945 NR Description: 60S ribosomal protein L9 (Gibberellin-regulated
  misc_feature (53)..(241): Homolog of NCBI NO: 6174959 NR Description: 60S RIBOSOMAL PROTEIN L9
  misc_feature (53)..(241): Homolog of NCBI NO: 33087067 NR Description: ribosomal L9-like protein [Oryza sativa (japonica
LSSHPTLTAAAAARRPFLYNKTSNRLSPVLPSTAAAAAVPPPPAQQPPPPPEMKTILATETMDIPEGVTVTVAAKLVTVEGPRGKLTRNFKHLNLDFQLQDGGRKLKVDAWFGTRRTMAAIRTAISHVQNLIAGVTKGFRYKMRFVYAHFPINASITNANSAIEIRNFLGEKKVRKVDMLEGVTILRSEKVKDELVLEGNDVELVSRSAALINQKCHVKKKDIRKFLDGIYVSDKGPIFDEQ

SEQ ID NO: 4224 - protein, 190 aa, Zea mays subsp. mays
  peptide (1)..(190): Ceres Seq. ID no. 12403004
  misc_feature (98)..(177): Pfam Name: Ribosomal protein L6 Pfam Description: Ribosomal protein L6
  misc_feature (1)..(190): Homolog of NCBI NO: 21759391 NR Description: 60S ribosomal protein L9
  misc_feature (1)..(189): Homolog of NCBI NO: 21759393 NR Description: 60S ribosomal protein L9
  misc_feature (1)..(190): Homolog of NCBI NO: 2129720 NR Description: ribosomal protein L9, cytosolic - Arabidopsis
  misc_feature (1)..(190): Homolog of NCBI NO: 15235114 NR Description: putative ribosomal protein L9, cytosolic
  misc_feature (1)..(190): Homolog of NCBI NO: 21554945 NR Description: ribosomal protein L9, putative [Arabidopsis
  misc_feature (1)..(190): Homolog of NCBI NO: 18398753 NR Description: ribosomal protein L9, putative
  misc_feature (1)..(190): Homolog of NCBI NO: 6015604 NR Description: ribosomal protein L9 [Pisum sativum]
  misc_feature (1)..(190): Homolog of NCBI NO: 266945 NR Description: 60S ribosomal protein L9 (Gibberellin-regulated
  misc_feature (1)..(189): Homolog of NCBI NO: 6174959 NR Description: 60S RIBOSOMAL PROTEIN L9
  misc_feature (1)..(189): Homolog of NCBI NO: 33087067 NR Description: ribosomal L9-like protein [Oryza sativa (japonica
MKTILATETMDIPEGVTVTVAAKLVTVEGPRGKLTRNFKHLNLDFQLQDGGRKLKVDAWFGTRRTMAAIRTAISHVQNLIAGVTKGFRYKMRFVYAHFPINASITNANSAIEIRNFLGEKKVRKVDMLEGVTILRSEKVKDELVLEGNDVELVSRSAALINQKCHVKKKDIRKFLDGIYVSDKGPIFDEQ

SEQ ID NO: 4225 - protein, 181 aa, Zea mays subsp. mays
  peptide (1)..(181): Ceres Seq. ID no. 12403005
  misc_feature (89)..(168): Pfam Name: Ribosomal protein L6 Pfam Description: Ribosomal protein L6
  misc_feature (1)..(181): Homolog of NCBI NO: 21759391 NR Description: 60S ribosomal protein L9
  misc_feature (1)..(180): Homolog of NCBI NO: 21759393 NR Description: 60S ribosomal protein L9
  misc_feature (1)..(181): Homolog of NCBI NO: 2129720 NR Description: ribosomal protein L9, cytosolic - Arabidopsis
  misc_feature (1)..(181): Homolog of NCBI NO: 15235114 NR Description: putative ribosomal protein L9, cytosolic
  misc_feature (1)..(181): Homolog of NCBI NO: 21554945 NR Description: ribosomal protein L9, putative [Arabidopsis
  misc_feature (1)..(181): Homolog of NCBI NO: 18398753 NR Description: ribosomal protein L9, putative
  misc_feature (1)..(181): Homolog of NCBI NO: 6015604 NR Description: ribosomal protein L9 [Pisum sativum]
  misc_feature (1)..(181): Homolog of NCBI NO: 266945 NR Description: 60S ribosomal protein L9 (Gibberellin-regulated
  misc_feature (1)..(180): Homolog of NCBI NO: 6174959 NR Description: 60S RIBOSOMAL PROTEIN L9
  misc_feature (1)..(180): Homolog of NCBI NO: 33087067 NR Description: ribosomal L9-like protein [Oryza sativa (japonica
MDIPEGVTVTVAAKLVTVEGPRGKLTRNFKHLNLDFQLQDGGRKLKVDAWFGTRRTMAAIRTAISHVQNLIAGVTKGFRYKMRFVYAHFPINASITNANSAIEIRNFLGEKKVRKVDMLEGVTILRSEKVKDELVLEGNDVELVSRSAALINQKCHVKKKDIRKFLDGIYVSDKGPIFDEQ

SEQ ID NO: 4226 - DNA, 1006 bp, Zea mays subsp. mays
  misc_feature (1)..(1006): Ceres Seq. ID no. 13495435
  misc_feature: MA Experiment ID: 20000477 Result: Down-regulated in Transcription
  misc_feature: MA Experiment 20000477 PARAMETER Experiment Name: Zm_5mM_SA_P Parameter: Age (day) Value: 10
  misc_feature: MA Experiment 20000477 PARAMETER Experiment Name: Zm_5mM_SA_P Parameter: Organism Value: Zea mays
  misc_feature: MA Experiment 20000477 PARAMETER Experiment Name: Zm_5mM_SA_P Parameter: Plant Line Value: 35A19
  misc_feature: MA Experiment 20000477 PARAMETER Experiment Name: Zm_5mM_SA_P Parameter: Timepoint (hr) Value: 48
  misc_feature: MA Experiment 20000477 PARAMETER Experiment Name: Zm_5mM_SA_P Parameter: Tissue Value: Aerial
  misc_feature: MA Experiment 20000477 PARAMETER Experiment Name: Zm_5mM_SA_P Parameter: Treatment Value: 5mM SA vs. No Treatment
  misc_feature: MA Experiment ID: 20000478 Result: Down-regulated in Transcription
  misc_feature: MA Experiment 20000478 PARAMETER Experiment Name: Zm_5mM_SA_P Parameter: Age (day) Value: 11
  misc_feature: MA Experiment 20000478 PARAMETER Experiment Name: Zm_5mM_SA_P Parameter: Organism Value: Zea mays
  misc_feature: MA Experiment 20000478 PARAMETER Experiment Name: Zm_5mM_SA_P Parameter: Plant Line Value: 35A19
  misc_feature: MA Experiment 20000478 PARAMETER Experiment Name: Zm_5mM_SA_P Parameter: Timepoint (hr) Value: 72
  misc_feature: MA Experiment 20000478 PARAMETER Experiment Name: Zm_5mM_SA_P Parameter: Tissue Value: Aerial
  misc_feature: MA Experiment 20000478 PARAMETER Experiment Name: Zm_5mM_SA_P Parameter: Treatment Value: 5mM SA vs. No Treatment
  misc_feature: MA Experiment ID: 20000479 Result: Down-regulated in Transcription
  misc_feature: MA Experiment 20000479 PARAMETER Experiment Name: Zm_Drought_P Parameter: Age (day) Value: 10
  misc_feature: MA Experiment 20000479 PARAMETER Experiment Name: Zm_Drought_P Parameter: Organism Value: Zea mays
  misc_feature: MA Experiment 20000479 PARAMETER Experiment Name: Zm_Drought_P Parameter: Plant Line Value: 35A19
  misc_feature: MA Experiment 20000479 PARAMETER Experiment Name: Zm_Drought_P Parameter: Timepoint (hr) Value: 48
  misc_feature: MA Experiment 20000479 PARAMETER Experiment Name: Zm_Drought_P Parameter: Tissue Value: Aerial
  misc_feature: MA Experiment 20000479 PARAMETER Experiment Name: Zm_Drought_P Parameter: Treatment Value: Drought vs. No Drought
aaacatggaatggtagtgggggggtggtttcggatcgggactccacagcttttggcggcgtattctagtatacaccaaaaaagagaaagaaaagcaccgaaaaactagcaaaccctacctcctctcctcccctcccctcctcggcggcggaatgtccgaccgccgccgcgacaaggagaagccccgcgaccgcgacatcgaccgtcatcgcgaccgagaccgcgacatcgaccgtcatcgcgaccgagaccgcgaccgggaccgggacagggacagggacagggatcgcgagcgagaccaccgccgcgagcgcgagcgcgagcggaagcgctcccgctcccggtccccgtcggcggatcgggaccgctcccaccgccgccactctcattcgcaccgaggccgtccttccccctctcccgacgccggccgccacaagcgccgccgcgaggcgtcccctgcctccgcggaccatcaccataaggaggataagaaggctgccgactctcacgcgacacccggcggaggggacatcgcggccgcggccgctgcggtgggtgacggcgacgtgaatgcggaggaactggagatgatgaagatgatgggcattcccgtcggtttcgactccaccaaggggaagcacgtgcccgacgccgacgtcagcggggtgcgtgccgtcaccaagcgccagccgcgccagtacatgaaccgccgcggcggattcaaccgccctctgccgcctgagcgcaaccgctaaggatgggaaaaggatcatgcgccaacacaaggatgtgctgatttctgggtagcagttactctgttactggacagtgtagtgagcatgtataaaccttgatggctatttaatttgcaaaacactgtagaatgatttcccgttcccttttgtcatcgtttattctgtgggcattccaggaaaacagaatttggtggatcattttgaaactgtggctttacagctttaacatgatgtttctggctttctgcgtgc

SEQ ID NO: 4227 - protein, 200 aa, Zea mays subsp. mays
  peptide (1)..(200): Ceres Seq. ID no. 13495436
  misc_feature (4)..(117): Pfam Name: SART-1 family Pfam Description: SART-1 family
  misc_feature (4)..(117): Pfam Name: SART-1 family Pfam Description: SART-1 family
  misc_feature (22)..(194): Homolog of NCBI NO: 7513213 NR Description: nucleic acid binding protein - human (fragment)
  misc_feature (30)..(194): Homolog of NCBI NO: 34856367 NR Description: similar to putative nucleic acid binding protein
  misc_feature (3)..(113): Homolog of NCBI NO: 23508822 NR Description: eukaryotic translation initiation factor 3
  misc_feature (3)..(117): Homolog of NCBI NO: 23510137 NR Description: Plasmodium falciparum protein kinase, putative
  misc_feature (8)..(198): Homolog of NCBI NO: 40738944 NR Description: hypothetical protein AN6605.2 [Aspergillus
  misc_feature (3)..(161): Homolog of NCBI NO: 23479655 NR Description: eukaryotic translation initiation factor 3
  misc_feature (3)..(161): Homolog of NCBI NO: 23482058 NR Description: hypothetical protein [Plasmodium yoelii yoelii]
  misc_feature (1)..(196): Homolog of NCBI NO: 23478750 NR Description: cyclophilin-RNA interacting protein [Plasmodium
  misc_feature (3)..(200): Homolog of NCBI NO: 21592725 NR Description: unknown [Arabidopsis thaliana]
  misc_feature (3)..(200): Homolog of NCBI NO: 18423973 NR Description: expressed protein [Arabidopsis thaliana]
  misc_feature (22)..(194): Homolog of NCBI NO: 7513213 NR Description: nucleic acid binding protein - human (fragment)
  misc_feature (30)..(194): Homolog of NCBI NO: 34856367 NR Description: similar to putative nucleic acid binding protein
  misc_feature (3)..(113): Homolog of NCBI NO: 23508822 NR Description: eukaryotic translation initiation factor 3
  misc_feature (3)..(117): Homolog of NCBI NO: 23510137 NR Description: Plasmodium falciparum protein kinase, putative
  misc_feature (8)..(198): Homolog of NCBI NO: 40738944 NR Description: hypothetical protein AN6605.2 [Aspergillus
  misc_feature (3)..(161): Homolog of NCBI NO: 23479655 NR Description: eukaryotic translation initiation factor 3
  misc_feature (3)..(161): Homolog of NCBI NO: 23482058 NR Description: hypothetical protein [Plasmodium yoelii yoelii]
  misc_feature (1)..(196): Homolog of NCBI NO: 23478750 NR Description: cyclophilin-RNA interacting protein [Plasmodium
  misc_feature (3)..(200): Homolog of NCBI NO: 21592725 NR Description: unknown [Arabidopsis thaliana]
  misc_feature (3)..(200): Homolog of NCBI NO: 18423973 NR Description: expressed protein [Arabidopsis thaliana]
MSDRRRDKEKPRDRDIDRHRDRDRDIDRHRDRDRDRDRDRDRDRDRERDHRRERERERKRSRSRSPSADRDRSHRRHSHSHRGRPSPSPDAGRHKRRREASPASADHHHKEDKKAADSHATPGGGDIAAAAAAVGDGDVNAEELEMMKMMGIPVGFDSTKGKHVPDADVSGVRAVTKRQPRQYMNRRGGFNRPLPPERNR

SEQ ID NO: 4228 - DNA, 985 bp, Zea mays subsp. mays
  misc_feature (1)..(985): Ceres Seq. ID no. 13495278
  misc_feature: MA Experiment ID: 108543 Result: Up-regulated in Transcription
acagaagggcggagcagtgccagtgtactggccgccaccactcgccactcgtccccctccccccgaaagccggcacgagccctcccttcccttcctccaacctgttccgatccgccccgagccggctggccatggcgatcagggctggccgctcggccctccacctccacgctctcgctttcctcatcctcgccgcctccccctgcctccaagtccaagctctagtggaccatcgcaaacagatatctgactggggtaggcaacccaactttgaactgcagaatatgtcctcgagtcaaagggatggctctcatctcttgggcagatcaaaggaaataacacacaggaaactaagggtgagaattggtgtaaggaacaaaatggaagtagtgcagcaggatgatgaagcattagttaaacttgagaacacaggtattgaacgctcaaaagctgttgattctgcagtgctgggaaaatatagcatctggagacgtgaaaatgaaaatgagaaggcagattcaagggttcgtctgatgcgagatcaaatgatcatggccagaatatattctgttcttgccaaatctagggacaaacttgatctctatcaggagctgctagcaagactcaaggaaagccagcgctcccttggggaagctactgctgatgccgaacttccgaagagtgcttcagatagaatcaaagcaatgggccaagttttatcaaaagcaagggatctgttgtatgattgcaaggaaattacccagcgtttgagagcaatgcttcagtcagcagatgagcaggtccggagcttgaagaagcagagcaccttccttagccagcttgcagctaagacaatcccaaatggcatccattgtctttctatgcgcttaacaattgattattaccttctctctccagagaaaagaaagttccccaatagcgagaacttggaaaatcctgatctttaccattatgctcttttctc

SEQ ID NO: 4229 - protein, 327 aa, Zea mays subsp. mays
  peptide (1)..(327): Ceres Seq. ID no. 13495279
  misc_feature (172)..(326): Homolog of NCBI NO: 38423965 NR Description: putative glycosyltransferase
  misc_feature (105)..(326): Homolog of NCBI NO: 37533460 NR Description: hypothetical protein [Oryza sativa (japonica
  misc_feature (172)..(326): Homolog of NCBI NO: 18422837 NR Description: glycosyltransferase family 8 [Arabidopsis
  misc_feature (172)..(326): Homolog of NCBI NO: 10177914 NR Description: emb|CAB71043.1~gene_id:MCA23.10~strong similarity
  misc_feature (111)..(326): Homolog of NCBI NO: 15227235 NR Description: glycosyltransferase family 8 [Arabidopsis
  misc_feature (120)..(326): Homolog of NCBI NO: 30691875 NR Description: glycosyltransferase family 8 [Arabidopsis
  misc_feature (120)..(326): Homolog of NCBI NO: 7485958 NR Description: hypothetical protein F22I13.40 - Arabidopsis
  misc_feature (87)..(326): Homolog of NCBI NO: 7271113 NR Description: 68 kDa protein [Cicer arietinum]
  misc_feature (93)..(326): Homolog of NCBI NO: 15233046 NR Description: glycosyltransferase family 8 [Arabidopsis
  misc_feature (93)..(326): Homolog of NCBI NO: 14517362 NR Description: AT3g61130/T20K12_30 [Arabidopsis thaliana]
  misc_feature (93)..(326): Homolog of NCBI NO: 14517362 NR Description: AT3g61130/T20K12_30 [Arabidopsis thaliana]
  misc_feature (172)..(326): Homolog of NCBI NO: 38423965 NR Description: putative glycosyltransferase
  misc_feature (105)..(326): Homolog of NCBI NO: 37533460 NR Description: hypothetical protein [Oryza sativa (japonica
  misc_feature (172)..(326): Homolog of NCBI NO: 18422837 NR Description: glycosyltransferase family 8 [Arabidopsis
  misc_feature (172)..(326): Homolog of NCBI NO: 10177914 NR Description: emb|CAB71043.1~gene_id:MCA23.10~strong similarity
  misc_feature (111)..(326): Homolog of NCBI NO: 15227235 NR Description: glycosyltransferase family 8 [Arabidopsis
  misc_feature (120)..(326): Homolog of NCBI NO: 30691875 NR Description: glycosyltransferase family 8 [Arabidopsis
  misc_feature (120)..(326): Homolog of NCBI NO: 7485958 NR Description: hypothetical protein F22I13.40 - Arabidopsis
  misc_feature (87)..(326): Homolog of NCBI NO: 7271113 NR Description: 68 kDa protein [Cicer arietinum]
  misc_feature (93)..(326): Homolog of NCBI NO: 15233046 NR Description: glycosyltransferase family 8 [Arabidopsis
RRAEQCQCTGRHHSPLVPLPPKAGTSPPFPSSNLFRSAPSRLAMAIRAGRSALHLHALAFLILAASPCLQVQALVDHRKQISDWGRQPNFELQNMSSSQRDGSHLLGRSKEITHRKLRVRIGVRNKMEVVQQDDEALVKLENTGIERSKAVDSAVLGKYSIWRRENENEKADSRVRLMRDQMIMARIYSVLAKSRDKLDLYQELLARLKESQRSLGEATADAELPKSASDRIKAMGQVLSKARDLLYDCKEITQRLRAMLQSADEQVRSLKKQSTFLSQLAAKTIPNGIHCLSMRLTIDYYLLSPEKRKFPNSENLENPDLYHYALF

SEQ ID NO: 4230 - protein, 284 aa, Zea mays subsp. mays
  peptide (1)..(284): Ceres Seq. ID no. 13495280
  misc_feature (129)..(283): Homolog of NCBI NO: 38423965 NR Description: putative glycosyltransferase
  misc_feature (62)..(283): Homolog of NCBI NO: 37533460 NR Description: hypothetical protein [Oryza sativa (japonica
  misc_feature (129)..(283): Homolog of NCBI NO: 18422837 NR Description: glycosyltransferase family 8 [Arabidopsis
  misc_feature (129)..(283): Homolog of NCBI NO: 10177914 NR Description: emb|CAB71043.1~gene_id:MCA23.10~strong similarity
  misc_feature (68)..(283): Homolog of NCBI NO: 15227235 NR Description: glycosyltransferase family 8 [Arabidopsis
  misc_feature (77)..(283): Homolog of NCBI NO: 30691875 NR Description: glycosyltransferase family 8 [Arabidopsis
  misc_feature (77)..(283): Homolog of NCBI NO: 7485958 NR Description: hypothetical protein F22I13.40 - Arabidopsis
  misc_feature (44)..(283): Homolog of NCBI NO: 7271113 NR Description: 68 kDa protein [Cicer arietinum]
  misc_feature (50)..(283): Homolog of NCBI NO: 15233046 NR Description: glycosyltransferase family 8 [Arabidopsis
  misc_feature (50)..(283): Homolog of NCBI NO: 14517362 NR Description: AT3g61130/T20K12_30 [Arabidopsis thaliana]
  misc_feature (129)..(283): Homolog of NCBI NO: 38423965 NR Description: putative glycosyltransferase
  misc_feature (62)..(283): Homolog of NCBI NO: 37533460 NR Description: hypothetical protein [Oryza sativa (japonica
  misc_feature (129)..(283): Homolog of NCBI NO: 18422837 NR Description: glycosyltransferase family 8 [Arabidopsis
  misc_feature (129)..(283): Homolog of NCBI NO: 10177914 NR Description: emb|CAB71043.1~gene_id:MCA23.10~strong similarity
  misc_feature (68)..(283): Homolog of NCBI NO: 15227235 NR Description: glycosyltransferase family 8 [Arabidopsis
  misc_feature (77)..(283): Homolog of NCBI NO: 30691875 NR Description: glycosyltransferase family 8 [Arabidopsis
  misc_feature (77)..(283): Homolog of NCBI NO: 7485958 NR Description: hypothetical protein F22I13.40 - Arabidopsis
  misc_feature (44)..(283): Homolog of NCBI NO: 7271113 NR Description: 68 kDa protein [Cicer arietinum]
  misc_feature (50)..(283): Homolog of NCBI NO: 15233046 NR Description: glycosyltransferase family 8 [Arabidopsis
  misc_feature (50)..(283): Homolog of NCBI NO: 14517362 NR Description: AT3g61130/T20K12_30 [Arabidopsis thaliana]
MAIRAGRSALHLHALAFLILAASPCLQVQALVDHRKQISDWGRQPNFELQNMSSSQRDGSHLLGRSKEITHRKLRVRIGVRNKMEVVQQDDEALVKLENTGIERSKAVDSAVLGKYSIWRRENENEKADSRVRLMRDQMIMARIYSVLAKSRDKLDLYQELLARLKESQRSLGEATADAELPKSASDRIKAMGQVLSKARDLLYDCKEITQRLRAMLQSADEQVRSLKKQSTFLSQLAAKTIPNGIHCLSMRLTIDYYLLSPEKRKFPNSENLENPDLYHYALF

SEQ ID NO: 4231 - protein, 233 aa, Zea mays subsp. mays
  peptide (1)..(233): Ceres Seq. ID no. 13495281
  misc_feature (78)..(232): Homolog of NCBI NO: 38423965 NR Description: putative glycosyltransferase
  misc_feature (11)..(232): Homolog of NCBI NO: 37533460 NR Description: hypothetical protein [Oryza sativa (japonica
  misc_feature (78)..(232): Homolog of NCBI NO: 18422837 NR Description: glycosyltransferase family 8 [Arabidopsis
  misc_feature (78)..(232): Homolog of NCBI NO: 10177914 NR Description: emb|CAB71043.1~gene_id:MCA23.10~strong similarity
  misc_feature (17)..(232): Homolog of NCBI NO: 15227235 NR Description: glycosyltransferase family 8 [Arabidopsis
  misc_feature (26)..(232): Homolog of NCBI NO: 30691875 NR Description: glycosyltransferase family 8 [Arabidopsis
  misc_feature (26)..(232): Homolog of NCBI NO: 7485958 NR Description: hypothetical protein F22I13.40 - Arabidopsis
  misc_feature (1)..(232): Homolog of NCBI NO: 7271113 NR Description: 68 kDa protein [Cicer arietinum]
  misc_feature (1)..(232): Homolog of NCBI NO: 15233046 NR Description: glycosyltransferase family 8 [Arabidopsis
  misc_feature (1)..(232): Homolog of NCBI NO: 14517362 NR Description: AT3g61130/T20K12_30 [Arabidopsis thaliana]
  misc_feature (78)..(232): Homolog of NCBI NO: 38423965 NR Description: putative glycosyltransferase
  misc_feature (11)..(232): Homolog of NCBI NO: 37533460 NR Description: hypothetical protein [Oryza sativa (japonica
  misc_feature (78)..(232): Homolog of NCBI NO: 18422837 NR Description: glycosyltransferase family 8 [Arabidopsis
  misc_feature (78)..(232): Homolog of NCBI NO: 10177914 NR Description: emb|CAB71043.1~gene_id:MCA23.10~strong similarity
  misc_feature (17)..(232): Homolog of NCBI NO: 15227235 NR Description: glycosyltransferase family 8 [Arabidopsis
  misc_feature (26)..(232): Homolog of NCBI NO: 30691875 NR Description: glycosyltransferase family 8 [Arabidopsis
  misc_feature (26)..(232): Homolog of NCBI NO: 7485958 NR Description: hypothetical protein F22I13.40 - Arabidopsis
  misc_feature (1)..(232): Homolog of NCBI NO: 7271113 NR Description: 68 kDa protein [Cicer arietinum]
  misc_feature (1)..(232): Homolog of NCBI NO: 15233046 NR Description: glycosyltransferase family 8 [Arabidopsis
  misc_feature (1)..(232): Homolog of NCBI NO: 14517362 NR Description: AT3g61130/T20K12_30 [Arabidopsis thaliana]
MSSSQRDGSHLLGRSKEITHRKLRVRIGVRNKMEVVQQDDEALVKLENTGIERSKAVDSAVLGKYSIWRRENENEKADSRVRLMRDQMIMARIYSVLAKSRDKLDLYQELLARLKESQRSLGEATADAELPKSASDRIKAMGQVLSKARDLLYDCKEITQRLRAMLQSADEQVRSLKKQSTFLSQLAAKTIPNGIHCLSMRLTIDYYLLSPEKRKFPNSENLENPDLYHYALF

SEQ ID NO: 4232 - DNA, 1233 bp, Zea mays subsp. mays
  misc_feature (1)..(1233): Ceres Seq. ID no. 12372784
  misc_feature: MA Experiment ID: 108559 Result: Up-regulated in Transcription
  misc_feature: MA Experiment 108559 PARAMETER Experiment Name: Zm_5mM_NO_P Parameter: Age (day) Value: 8
  misc_feature: MA Experiment 108559 PARAMETER Experiment Name: Zm_5mM_NO_P Parameter: Organism Value: Zea mays
  misc_feature: MA Experiment 108559 PARAMETER Experiment Name: Zm_5mM_NO_P Parameter: Plant Line Value: 35A19
  misc_feature: MA Experiment 108559 PARAMETER Experiment Name: Zm_5mM_NO_P Parameter: Timepoint (hr) Value: 12
  misc_feature: MA Experiment 108559 PARAMETER Experiment Name: Zm_5mM_NO_P Parameter: Tissue Value: Aerial
  misc_feature: MA Experiment 108559 PARAMETER Experiment Name: Zm_5mM_NO_P Parameter: Treatment Value: 5mM NO vs. No Treatment
ccgagtcgtcttcccgttgatcggcaaagagactttagggttttagcggcttctatttctgagcgagggtttatccgccaggggcggcgcgacgcggcggcagttgagctgggatttccttcccatcccgttcccttccaggcgaggcgatggacgaggcggcggtcgacgacctcatccggcggctcctcgaggcccgcggcgggcgcaccccgcgcaacgcgcaggtgaccgacgctgagatccggcgcctctgcgccgccgccaaggatgtgttcctctcccagcccaacctcctggagctcgaggcccccatcaagatatgcggggatgtccatggtcagtattcagaccttcttcgattatttgagtatggtggctatccaccagatgcaaattatctgttcctcggtgactatgttgatagggggaaacagagcatagaaacaatatgccttctcttggcatacaagataaagtacccagaaaacttctttcttctcaggggaaaccatgaatgcgcctcaatcaaccgaatatatgggttttttgatgagtgtaagaggagattcaatgttcgtatctggaagatattcaccgagtgttttaactgcctcccagtggctgcgcttattgatgacaagatcttttgcatgcatggagggttgtctcctgagctaaagagcatggaccaaatacgtaacatttctcgtcctgtggatgttcctgatgttggtctcctatgtgatctgttatggtcggaccctgataaggagattgataggtggggtgagaatgacaggggtgtttcctacacctttggagctgacgtagttgccgagtttcttcagaaacatgatctagatttgatctgcagggcccaccaggtcgtagaggatggttatgaatttttcgcaaaacgccagcttgtaacaatattctcagctccgaactactgtggagagttcgacaatgctggtgcactgatgagcattgacaactccctagtatgctcgttccagatactcaagccttctgagaagaaaggaaaagcaggaaatgggaacatgccaaagcccggtacacctcccaggaagataaaaataagtgttacccatatttagccaggttctcgctatcaatctgcatttgcgaagttgtgattaagtgctcccccaaacttgtggtagtttttttttttggtgagcttaacacgattttaaattgtggacc

SEQ ID NO: 4233 - protein, 324 aa, Zea mays subsp. mays
  peptide (1)..(324): Ceres Seq. ID no. 12372785
  misc_feature (54)..(249): Pfam Name: Calcineurin-like phosphoesterase Pfam Description: Calcineurin-like phosphoesterase
  misc_feature (1)..(315): Homolog of NCBI NO: 27884151 NR Description: SI:zC214P16.4 (novel protein similar to human
  misc_feature (1)..(315): Homolog of NCBI NO: 1346750 NR Description: SERINE/THREONINE PROTEIN PHOSPHATASE PP1 ISOZYME
  misc_feature (1)..(318): Homolog of NCBI NO: 7435129 NR Description: phosphoprotein phosphatase (EC 3.1.3.16),
  misc_feature (1)..(315): Homolog of NCBI NO: 1346753 NR Description: SERINE/THREONINE PROTEIN PHOSPHATASE PP1 ISOZYME
  misc_feature (1)..(319): Homolog of NCBI NO: 25752372 NR Description: phosphoprotein phosphatase (EC 3.1.3.16) 1
  misc_feature (1)..(316): Homolog of NCBI NO: 15222607 NR Description: phosphoprotein phosphatase-type 1 catalytic
  misc_feature (1)..(316): Homolog of NCBI NO: 1346763 NR Description: SERINE/THREONINE PROTEIN PHOSPHATASE PP1
  misc_feature (1)..(316): Homolog of NCBI NO: 1346760 NR Description: Serine/threonine protein phosphatase PP1 isozyme
  misc_feature (1)..(316): Homolog of NCBI NO: 18413493 NR Description: protein phosphatase type 1 (AtPP1bg)
  misc_feature (1)..(317): Homolog of NCBI NO: 7435131 NR Description: phosphoprotein phosphatase (EC 3.1.3.16) PP1BG -
MDEAAVDDLIRRLLEARGGRTPRNAQVTDAEIRRLCAAAKDVFLSQPNLLELEAPIKICGDVHGQYSDLLRLFEYGGYPPDANYLFLGDYVDRGKQSIETICLLLAYKIKYPENFFLLRGNHECASINRIYGFFDECKRRFNVRIWKIFTECFNCLPVAALIDDKIFCMHGGLSPELKSMDQIRNISRPVDVPDVGLLCDLLWSDPDKEIDRWGENDRGVSYTFGADVVAEFLQKHDLDLICRAHQVVEDGYEFFAKRQLVTIFSAPNYCGEFDNAGALMSIDNSLVCSFQILKPSEKKGKAGNGNMPKPGTPPRKIKISVTHI

SEQ ID NO: 4234 - DNA, 506 bp, Zea mays subsp. mays
  misc_feature (1)..(506): Ceres Seq. ID no. 12637912
  misc_feature: MA Experiment ID: 108522 Result: Down-regulated in Transcription
  misc_feature: MA Experiment 108522 PARAMETER Experiment Name: Zm_42deg_Heat_P Parameter: Age (day) Value: 8
  misc_feature: MA Experiment 108522 PARAMETER Experiment Name: Zm_42deg_Heat_P Parameter: Organism Value: Zea mays
  misc_feature: MA Experiment 108522 PARAMETER Experiment Name: Zm_42deg_Heat_P Parameter: Plant Line Value: 35A19
  misc_feature: MA Experiment 108522 PARAMETER Experiment Name: Zm_42deg_Heat_P Parameter: Temperature (deg C) Value: 42 vs. 22
  misc_feature: MA Experiment 108522 PARAMETER Experiment Name: Zm_42deg_Heat_P Parameter: Timepoint (hr) Value: 1
  misc_feature: MA Experiment 108522 PARAMETER Experiment Name: Zm_42deg_Heat_P Parameter: Tissue Value: Aerial
  misc_feature: MA Experiment ID: 108535 Result: Up-regulated in Transcription
  misc_feature: MA Experiment 108535 PARAMETER Experiment Name: Zm_Meristem_P Parameter: Age (day) Value: 8
  misc_feature: MA Experiment 108535 PARAMETER Experiment Name: Zm_Meristem_P Parameter: Organism Value: Zea mays
  misc_feature: MA Experiment 108535 PARAMETER Experiment Name: Zm_Meristem_P Parameter: Plant Line Value: 35A19
  misc_feature: MA Experiment 108535 PARAMETER Experiment Name: Zm_Meristem_P Parameter: Tissue Value: Root Meristem vs. Above Root Meristem
  misc_feature: MA Experiment ID: 20000487 Result: Up-regulated in Transcription
  misc_feature: MA Experiment 20000487 PARAMETER Experiment Name: Zm_50mM_NH4NO3_L_to_H_P Parameter: Organism Value: Zea mays
  misc_feature: MA Experiment 20000487 PARAMETER Experiment Name: Zm_50mM_NH4NO3_L_to_H_P Parameter: Timepoint (hr) Value: 4
  misc_feature: MA Experiment 20000487 PARAMETER Experiment Name: Zm_50mM_NH4NO3_L_to_H_P Parameter: Tissue Value: Leaves
  misc_feature: MA Experiment 20000487 PARAMETER Experiment Name: Zm_50mM_NH4NO3_L_to_H_P Parameter: Treatment Value: 50mM NH4NO3 vs. 100mM Mannitol
gttagggttattttttctactctgcctctgctctcacctgtttcgctgctcgcccgatctcgcgctgccggcagcgatctgagatcgagcgaagctaagctttttcatcgagatggcgcttgtactgcatgctaacagtggtaacaaaaatgcattcaaaacactaattgccgcagaatacagcggtgtcaaggttgagttggtgaaggactttcaaatgggtgtctcccacaaaactccagagttcctcaagatgaaccctattgggaagattcccgtcctggagactcctgatgatcctgtttttgagagcaatgcaattgcaagatatgttactcgcttgaaggctgataacccactttatggatcttcactgactgattatgcccatattgagcaatggattgactttgctgcnnnagagattgatgcaaacattggaaagtggttgtacccacggatggggttttatccccatgctggtgtggtagaagaatcaactattg

SEQ ID NO: 4235 - protein, 131 aa, Zea mays subsp. mays
  peptide (1)..(131): Ceres Seq. ID no. 13624424
  misc_feature (1)..(130): Homolog of NCBI NO: 13626392 NR Description: Elongation factor 1-gamma (EF-1-gamma) (eEF-1B
  misc_feature (4)..(130): Homolog of NCBI NO: 29367381 NR Description: elongation factor 1 gamma-like protein
  misc_feature (10)..(130): Homolog of NCBI NO: 29367403 NR Description: elongation factor 1 gamma-like protein
  misc_feature (1)..(130): Homolog of NCBI NO: 13626515 NR Description: Elongation factor 1-gamma (EF-1-gamma) (eEF-1B
  misc_feature (102)..(102): Xaa is any aa, unknown or other
  misc_feature (103)..(103): Xaa is any aa, unknown or other
MALVLHANSGNKNAFKTLIAAEYSGVKVELVKDFQMGVSHKTPEFLKMNPIGKIPVLETPDDPVFESNAIARYVTRLKADNPLYGSSLTDYAHIEQWIDFAXXEIDANIGKWLYPRMGFYPHAGVVEESTI

SEQ ID NO: 4236 - protein, 96 aa, Zea mays subsp. mays
  peptide (1)..(96): Ceres Seq. ID no. 13624425
  misc_feature (1)..(95): Homolog of NCBI NO: 13626392 NR Description: Elongation factor 1-gamma (EF-1-gamma) (eEF-1B
  misc_feature (1)..(95): Homolog of NCBI NO: 29367381 NR Description: elongation factor 1 gamma-like protein
  misc_feature (1)..(95): Homolog of NCBI NO: 29367403 NR Description: elongation factor 1 gamma-like protein
  misc_feature (1)..(95): Homolog of NCBI NO: 13626515 NR Description: Elongation factor 1-gamma (EF-1-gamma) (eEF-1B
  misc_feature (67)..(67): Xaa is any aa, unknown or other
  misc_feature (68)..(68): Xaa is any aa, unknown or other
MGVSHKTPEFLKMNPIGKIPVLETPDDPVFESNAIARYVTRLKADNPLYGSSLTDYAHIEQWIDFAXXEIDANIGKWLYPRMGFYPHAGVVEESTI

SEQ ID NO: 4237 - protein, 84 aa, Zea mays subsp. mays
  peptide (1)..(84): Ceres Seq. ID no. 13624426
  misc_feature (1)..(83): Homolog of NCBI NO: 13626392 NR Description: Elongation factor 1-gamma (EF-1-gamma) (eEF-1B
  misc_feature (1)..(83): Homolog of NCBI NO: 29367381 NR Description: elongation factor 1 gamma-like protein
  misc_feature (1)..(83): Homolog of NCBI NO: 29367403 NR Description: elongation factor 1 gamma-like protein
  misc_feature (1)..(83): Homolog of NCBI NO: 13626515 NR Description: Elongation factor 1-gamma (EF-1-gamma) (eEF-1B
  misc_feature (55)..(55): Xaa is any aa, unknown or other
  misc_feature (56)..(56): Xaa is any aa, unknown or other
MNPIGKIPVLETPDDPVFESNAIARYVTRLKADNPLYGSSLTDYAHIEQWIDFAXXEIDANIGKWLYPRMGFYPHAGVVEESTI

SEQ ID NO: 4238 - DNA, 1454 bp, Zea mays subsp. mays
  misc_feature (1)..(1454): Ceres Seq. ID no. 12409971
  misc_feature: MA Experiment ID: 108522 Result: Down-regulated in Transcription
  misc_feature: MA Experiment 108522 PARAMETER Experiment Name: Zm_42deg_Heat_P Parameter: Age (day) Value: 8
  misc_feature: MA Experiment 108522 PARAMETER Experiment Name: Zm_42deg_Heat_P Parameter: Organism Value: Zea mays
  misc_feature: MA Experiment 108522 PARAMETER Experiment Name: Zm_42deg_Heat_P Parameter: Plant Line Value: 35A19
  misc_feature: MA Experiment 108522 PARAMETER Experiment Name: Zm_42deg_Heat_P Parameter: Temperature (deg C) Value: 42 vs. 22
  misc_feature: MA Experiment 108522 PARAMETER Experiment Name: Zm_42deg_Heat_P Parameter: Timepoint (hr) Value: 1
  misc_feature: MA Experiment 108522 PARAMETER Experiment Name: Zm_42deg_Heat_P Parameter: Tissue Value: Aerial
  misc_feature: MA Experiment ID: 108527 Result: Down-regulated in Transcription
  misc_feature: MA Experiment 108527 PARAMETER Experiment Name: Zm_5mM_NO_P Parameter: Age (day) Value: 8
  misc_feature: MA Experiment 108527 PARAMETER Experiment Name: Zm_5mM_NO_P Parameter: Organism Value: Zea mays
  misc_feature: MA Experiment 108527 PARAMETER Experiment Name: Zm_5mM_NO_P Parameter: Plant Line Value: 35A19
  misc_feature: MA Experiment 108527 PARAMETER Experiment Name: Zm_5mM_NO_P Parameter: Timepoint (hr) Value: 6
  misc_feature: MA Experiment 108527 PARAMETER Experiment Name: Zm_5mM_NO_P Parameter: Tissue Value: Aerial
  misc_feature: MA Experiment 108527 PARAMETER Experiment Name: Zm_5mM_NO_P Parameter: Treatment Value: 5mM NO vs. No Treatment
  misc_feature: MA Experiment ID: 108536 Result: Down-regulated in Transcription
  misc_feature: MA Experiment 108536 PARAMETER Experiment Name: Zm_Meristem_P Parameter: Age (day) Value: 8
  misc_feature: MA Experiment 108536 PARAMETER Experiment Name: Zm_Meristem_P Parameter: Organism Value: Zea mays
  misc_feature: MA Experiment 108536 PARAMETER Experiment Name: Zm_Meristem_P Parameter: Plant Line Value: 35A19
  misc_feature: MA Experiment 108536 PARAMETER Experiment Name: Zm_Meristem_P Parameter: Tissue Value: Shoot Meristem vs. Above Shoot Meristem
  misc_feature: MA Experiment ID: 108543 Result: Up-regulated in Transcription
  misc_feature: MA Experiment ID: 108544 Result: Down-regulated in Transcription
  misc_feature: MA Experiment ID: 108556 Result: Down-regulated in Transcription
  misc_feature: MA Experiment 108556 PARAMETER Experiment Name: Zm_Drought_P Parameter: Age (day) Value: 9
  misc_feature: MA Experiment 108556 PARAMETER Experiment Name: Zm_Drought_P Parameter: Organism Value: Zea mays
  misc_feature: MA Experiment 108556 PARAMETER Experiment Name: Zm_Drought_P Parameter: Plant Line Value: 35A19
  misc_feature: MA Experiment 108556 PARAMETER Experiment Name: Zm_Drought_P Parameter: Timepoint (hr) Value: 24
  misc_feature: MA Experiment 108556 PARAMETER Experiment Name: Zm_Drought_P Parameter: Tissue Value: Aerial
  misc_feature: MA Experiment 108556 PARAMETER Experiment Name: Zm_Drought_P Parameter: Treatment Value: Drought vs. No Drought
  misc_feature: MA Experiment ID: 108559 Result: Down-regulated in Transcription
  misc_feature: MA Experiment 108559 PARAMETER Experiment Name: Zm_5mM_NO_P Parameter: Age (day) Value: 8
  misc_feature: MA Experiment 108559 PARAMETER Experiment Name: Zm_5mM_NO_P Parameter: Organism Value: Zea mays
  misc_feature: MA Experiment 108559 PARAMETER Experiment Name: Zm_5mM_NO_P Parameter: Plant Line Value: 35A19
  misc_feature: MA Experiment 108559 PARAMETER Experiment Name: Zm_5mM_NO_P Parameter: Timepoint (hr) Value: 12
  misc_feature: MA Experiment 108559 PARAMETER Experiment Name: Zm_5mM_NO_P Parameter: Tissue Value: Aerial
  misc_feature: MA Experiment 108559 PARAMETER Experiment Name: Zm_5mM_NO_P Parameter: Treatment Value: 5mM NO vs. No Treatment
  misc_feature: MA Experiment ID: 108597 Result: Down-regulated in Transcription
  misc_feature: MA Experiment 108597 PARAMETER Experiment Name: Zm_100uM_ABA_P Parameter: Age (day) Value: 9
  misc_feature: MA Experiment 108597 PARAMETER Experiment Name: Zm_100uM_ABA_P Parameter: Organism Value: Zea mays
  misc_feature: MA Experiment 108597 PARAMETER Experiment Name: Zm_100uM_ABA_P Parameter: Plant Line Value: 35A19
  misc_feature: MA Experiment 108597 PARAMETER Experiment Name: Zm_100uM_ABA_P Parameter: Timepoint (hr) Value: 24
  misc_feature: MA Experiment 108597 PARAMETER Experiment Name: Zm_100uM_ABA_P Parameter: Tissue Value: Aerial
  misc_feature: MA Experiment 108597 PARAMETER Experiment Name: Zm_100uM_ABA_P Parameter: Treatment Value: 100uM ABA vs. No Treatment
  misc_feature: MA Experiment ID: 108687 Result: Down-regulated in Transcription
  misc_feature: MA Experiment 108687 PARAMETER Experiment Name: Zm_Embryos-Flowers__P Parameter: Tissue Value: Embryo vs. Aerial+
  misc_feature: MA Experiment ID: 20000108 Result: Up-regulated in Transcription
  misc_feature: MA Experiment 20000108 PARAMETER Experiment Name: Zm_Root-Tips_P Parameter: Age (day) Value: 12
  misc_feature: MA Experiment 20000108 PARAMETER Experiment Name: Zm_Root-Tips_P Parameter: Organism Value: Zea mays
  misc_feature: MA Experiment 20000108 PARAMETER Experiment Name: Zm_Root-Tips_P Parameter: Tissue Value: Root tips vs. Root mid region    35
  misc_feature: MA Experiment 20000108 PARAMETER Experiment Name: Zm_Root-Tips_P Parameter: Tissue Value: Root tips vs. Root mid region   Sequence Listing-Misc Features (4)
  misc_feature: MA Experiment ID: 20000477 Result: Down-regulated in Transcription
  misc_feature: MA Experiment 20000477 PARAMETER Experiment Name: Zm_5mM_SA_P Parameter: Age (day) Value: 10
  misc_feature: MA Experiment 20000477 PARAMETER Experiment Name: Zm_5mM_SA_P Parameter: Organism Value: Zea mays
  misc_feature: MA Experiment 20000477 PARAMETER Experiment Name: Zm_5mM_SA_P Parameter: Plant Line Value: 35A19
  misc_feature: MA Experiment 20000477 PARAMETER Experiment Name: Zm_5mM_SA_P Parameter: Timepoint (hr) Value: 48
  misc_feature: MA Experiment 20000477 PARAMETER Experiment Name: Zm_5mM_SA_P Parameter: Tissue Value: Aerial
  misc_feature: MA Experiment 20000477 PARAMETER Experiment Name: Zm_5mM_SA_P Parameter: Treatment Value: 5mM SA vs. No Treatment
  misc_feature: MA Experiment ID: 20000479 Result: Down-regulated in Transcription
  misc_feature: MA Experiment 20000479 PARAMETER Experiment Name: Zm_Drought_P Parameter: Age (day) Value: 10
  misc_feature: MA Experiment 20000479 PARAMETER Experiment Name: Zm_Drought_P Parameter: Organism Value: Zea mays
  misc_feature: MA Experiment 20000479 PARAMETER Experiment Name: Zm_Drought_P Parameter: Plant Line Value: 35A19
  misc_feature: MA Experiment 20000479 PARAMETER Experiment Name: Zm_Drought_P Parameter: Timepoint (hr) Value: 48
  misc_feature: MA Experiment 20000479 PARAMETER Experiment Name: Zm_Drought_P Parameter: Tissue Value: Aerial
  misc_feature: MA Experiment 20000479 PARAMETER Experiment Name: Zm_Drought_P Parameter: Treatment Value: Drought vs. No Drought
  misc_feature: MA Experiment ID: 20000480 Result: Down-regulated in Transcription
  misc_feature: MA Experiment 20000480 PARAMETER Experiment Name: Zm_Drought_P Parameter: Age (day) Value: 11
  misc_feature: MA Experiment 20000480 PARAMETER Experiment Name: Zm_Drought_P Parameter: Organism Value: Zea mays
  misc_feature: MA Experiment 20000480 PARAMETER Experiment Name: Zm_Drought_P Parameter: Plant Line Value: 35A19
  misc_feature: MA Experiment 20000480 PARAMETER Experiment Name: Zm_Drought_P Parameter: Timepoint (hr) Value: 72
  misc_feature: MA Experiment 20000480 PARAMETER Experiment Name: Zm_Drought_P Parameter: Tissue Value: Aerial
  misc_feature: MA Experiment 20000480 PARAMETER Experiment Name: Zm_Drought_P Parameter: Treatment Value: Drought vs. No Drought
  misc_feature: MA Experiment ID: 20000535 Result: Down-regulated in Transcription
  misc_feature: MA Experiment 20000535 PARAMETER Experiment Name: Zm_Hybrid_Seed_Dev_P Parameter: DAP Value: 30 vs. 12
  misc_feature: MA Experiment 20000535 PARAMETER Experiment Name: Zm_Hybrid_Seed_Dev_P Parameter: Organism Value: Zea mays
  misc_feature: MA Experiment 20000535 PARAMETER Experiment Name: Zm_Hybrid_Seed_Dev_P Parameter: Plant Line Value: 35A19
  misc_feature: MA Experiment 20000535 PARAMETER Experiment Name: Zm_Hybrid_Seed_Dev_P Parameter: Tissue Value: Embryo vs. Unfert Floret
  misc_feature: MA Experiment ID: 20000626 Result: Down-regulated in Transcription
  misc_feature: MA Experiment 20000626 PARAMETER Experiment Name: Zm_Herbicide-Treatments_P Parameter: Timepoint (hr) Value: 12
  misc_feature: MA Experiment 20000626 PARAMETER Experiment Name: Zm_Herbicide-Treatments_P Parameter: Tissue Value: Aerial
  misc_feature: MA Experiment 20000626 PARAMETER Experiment Name: Zm_Herbicide-Treatments_P Parameter: Treatment Value: Roundup vs. No Treatment
  misc_feature: MA Experiment ID: 20001614 Result: Up-regulated in Transcription
  misc_feature: MA Experiment 20001614 PARAMETER Experiment Name: Zm_50ppm_KNO3_L-to-H_P Parameter: Age (day) Value: 21
  misc_feature: MA Experiment 20001614 PARAMETER Experiment Name: Zm_50ppm_KNO3_L-to-H_P Parameter: Organism Value: Zea mays
  misc_feature: MA Experiment 20001614 PARAMETER Experiment Name: Zm_50ppm_KNO3_L-to-H_P Parameter: Plant Line Value: 35A19
  misc_feature: MA Experiment 20001614 PARAMETER Experiment Name: Zm_50ppm_KNO3_L-to-H_P Parameter: Timepoint (hr) Value: 48
  misc_feature: MA Experiment 20001614 PARAMETER Experiment Name: Zm_50ppm_KNO3_L-to-H_P Parameter: Tissue Value: Roots
  misc_feature: MA Experiment 20001614 PARAMETER Experiment Name: Zm_50ppm_KNO3_L-to-H_P Parameter: Treatment Value: 50ppm KNO3 vs. 50ppm KCl
aagagctaagagggaagaacaatcgagctactaataaggtcgtatacatatcttctatatactcctctgaaagttgtgaactccggtcgagcttaaaaacagcagcaatggcgaagctttggacattgctgctggctgcagtggtggtcctctcactcctagtgagccccattgcttgcacccgaaagctcaacaaacccaagccgaagccgggcagctacaggcggccggtcaagccgaagccaaaaccggtcacgggcagctacaagccggcgcctgtggccgccagaagaaaccacacagctacacccacgccatcgccgactgtctacggccccggtggctggctgtcaggcgccggcgccacgtactacggcgcgaccaacggcgacgggagcgacggcggcgcgtgcggctaccagacggccgtcggaaagaagccattcgactcgatgatcgccgccgggagcacgccactgtacaggggaggcgagggctgcggcgcctgctacgaggtgaaatgcacgaccaacgccgcgtgctccggccagcccgtgaccatcgtaatcaccgaccagtcccctggcgggctgttccccggcgaggtcgagcactttgacatgagcggcaccgccatgggcgccatggcccggcccggcatggccgacaagctccgcgctggcggcgtgctcaggatcctgtacaggagggtgccgtgcaagtacaccggcgtcaacatcgcgttcaaggtggatcagggcgcgaacccgtactacttcgacgtgctcatcgagttcgaggacgacgacggcgacctcagcgccgtggacctcatggaggccggcagcggcgtctggactcctatggcgcacaactggggcgccacgtggcgcctcaacaacggcaggaagctcaaagcgccgttcgggctccggctcacctccgactcccgcagggtgctcgtcgccaacaacgccatcccggccgcgtggaagcccggcaagacctaccgctccttggtcaactacccctgaaaagagaaataccgacaagtggatggcgtgtattgtgcgtccgggtgttgcgagtggcggcggtgtactactggtgtcggaaaacagaagagaatgaaagaggaggttgaagaagagaataatgtccttcttccctccctggacggtctctgcagtccccaaaagtgatgtgtgacggtgttagtcaaatcatgccggtaatttgatacttcatctcgatttgagttttactgctatactactgtgattgaggtaagacagaatcttatttcttgaccacgtagtacataaactacaaagcatgcccgttgcgttggtaattagactcttgtagtggtttttgccaatatcaagatgtatgtagaatgtgtgtgcatgcgttcacagtgatgagaatatacatgcgtgtatctgatcctg

SEQ ID NO: 4239 - protein, 343 aa, Zea mays subsp. mays
  peptide (1)..(343): Ceres Seq. ID no. 12409972
  misc_feature (246)..(327): Pfam Name: Pollen allergen Pfam Description: Pollen allergen
  misc_feature (40)..(342): Homolog of NCBI NO: 8118432 NR Description: beta-expansin [Oryza sativa]
  misc_feature (114)..(337): Homolog of NCBI NO: 16517017 NR Description: beta-expansin [Oryza sativa]
  misc_feature (114)..(337): Homolog of NCBI NO: 16303233 NR Description: beta-expansin [Oryza sativa]
  misc_feature (91)..(342): Homolog of NCBI NO: 34101047 NR Description: beta-expansin 1 precursor [Hordeum vulgare]
  misc_feature (115)..(342): Homolog of NCBI NO: 21666630 NR Description: beta-expansin [Oryza sativa]
  misc_feature (92)..(342): Homolog of NCBI NO: 8118428 NR Description: beta-expansin [Oryza sativa]
  misc_feature (92)..(342): Homolog of NCBI NO: 16303229 NR Description: beta-expansin 5 [Oryza sativa]
  misc_feature (74)..(342): Homolog of NCBI NO: 16517013 NR Description: beta-expansin [Oryza sativa]
  misc_feature (84)..(343): Homolog of NCBI NO: 40363749 NR Description: putative beta-expansin [Triticum aestivum]
  misc_feature (36)..(343): Homolog of NCBI NO: 14193767 NR Description: beta-expansin 4 [Zea mays]
ELRGKNNRATNKVVYISSIYSSESCELRSSLKTAAMAKLWTLLLAAVVVLSLLVSPIACTRKLNKPKPKPGSYRRPVKPKPKPVTGSYKPAPVAARRNHTATPTPSPTVYGPGGWLSGAGATYYGATNGDGSDGGACGYQTAVGKKPFDSMIAAGSTPLYRGGEGCGACYEVKCTTNAACSGQPVTIVITDQSPGGLFPGEVEHFDMSGTAMGAMARPGMADKLRAGGVLRILYRRVPCKYTGVNIAFKVDQGANPYYFDVLIEFEDDDGDLSAVDLMEAGSGVWTPMAHNWGATWRLNNGRKLKAPFGLRLTSDSRRVLVANNAIPAAWKPGKTYRSLVNYP

SEQ ID NO: 4240 - protein, 308 aa, Zea mays subsp. mays
  peptide (1)..(308): Ceres Seq. ID no. 12409973
  misc_feature (211)..(292): Pfam Name: Pollen allergen Pfam Description: Pollen allergen
  misc_feature (5)..(307): Homolog of NCBI NO: 8118432 NR Description: beta-expansin [Oryza sativa]
  misc_feature (79)..(302): Homolog of NCBI NO: 16517017 NR Description: beta-expansin [Oryza sativa]
  misc_feature (79)..(302): Homolog of NCBI NO: 16303233 NR Description: beta-expansin [Oryza sativa]
  misc_feature (56)..(307): Homolog of NCBI NO: 34101047 NR Description: beta-expansin 1 precursor [Hordeum vulgare]
  misc_feature (80)..(307): Homolog of NCBI NO: 21666630 NR Description: beta-expansin [Oryza sativa]
  misc_feature (57)..(307): Homolog of NCBI NO: 8118428 NR Description: beta-expansin [Oryza sativa]
  misc_feature (57)..(307): Homolog of NCBI NO: 16303229 NR Description: beta-expansin 5 [Oryza sativa]
  misc_feature (39)..(307): Homolog of NCBI NO: 16517013 NR Description: beta-expansin [Oryza sativa]
  misc_feature (49)..(308): Homolog of NCBI NO: 40363749 NR Description: putative beta-expansin [Triticum aestivum]
  misc_feature (1)..(308): Homolog of NCBI NO: 14193767 NR Description: beta-expansin 4 [Zea mays]
MAKLWTLLLAAVVVLSLLVSPIACTRKLNKPKPKPGSYRRPVKPKPKPVTGSYKPAPVAARRNHTATPTPSPTVYGPGGWLSGAGATYYGATNGDGSDGGACGYQTAVGKKPFDSMIAAGSTPLYRGGEGCGACYEVKCTTNAACSGQPVTIVITDQSPGGLFPGEVEHFDMSGTAMGAMARPGMADKLRAGGVLRILYRRVPCKYTGVNIAFKVDQGANPYYFDVLIEFEDDDGDLSAVDLMEAGSGVWTPMAHNWGATWRLNNGRKLKAPFGLRLTSDSRRVLVANNAIPAAWKPGKTYRSLVNYP

SEQ ID NO: 4241 - protein, 193 aa, Zea mays subsp. mays
  peptide (1)..(193): Ceres Seq. ID no. 12409974
  misc_feature (96)..(177): Pfam Name: Pollen allergen Pfam Description: Pollen allergen
  misc_feature (1)..(192): Homolog of NCBI NO: 8118432 NR Description: beta-expansin [Oryza sativa]
  misc_feature (1)..(187): Homolog of NCBI NO: 16517017 NR Description: beta-expansin [Oryza sativa]
  misc_feature (1)..(187): Homolog of NCBI NO: 16303233 NR Description: beta-expansin [Oryza sativa]
  misc_feature (1)..(192): Homolog of NCBI NO: 34101047 NR Description: beta-expansin 1 precursor [Hordeum vulgare]
  misc_feature (1)..(192): Homolog of NCBI NO: 21666630 NR Description: beta-expansin [Oryza sativa]
  misc_feature (1)..(192): Homolog of NCBI NO: 8118428 NR Description: beta-expansin [Oryza sativa]
  misc_feature (1)..(192): Homolog of NCBI NO: 16303229 NR Description: beta-expansin 5 [Oryza sativa]
  misc_feature (1)..(192): Homolog of NCBI NO: 16517013 NR Description: beta-expansin [Oryza sativa]
  misc_feature (1)..(193): Homolog of NCBI NO: 40363749 NR Description: putative beta-expansin [Triticum aestivum]
  misc_feature (1)..(193): Homolog of NCBI NO: 14193767 NR Description: beta-expansin 4 [Zea mays]
MIAAGSTPLYRGGEGCGACYEVKCTTNAACSGQPVTIVITDQSPGGLFPGEVEHFDMSGTAMGAMARPGMADKLRAGGVLRILYRRVPCKYTGVNIAFKVDQGANPYYFDVLIEFEDDDGDLSAVDLMEAGSGVWTPMAHNWGATWRLNNGRKLKAPFGLRLTSDSRRVLVANNAIPAAWKPGKTYRSLVNYP

SEQ ID NO: 4242 - DNA, 1895 bp, Zea mays subsp. mays
  misc_feature (1)..(1895): Ceres Seq. ID no. 12409967
  misc_feature: MA Experiment ID: 108522 Result: Up-regulated in Transcription
  misc_feature: MA Experiment 108522 PARAMETER Experiment Name: Zm_42deg_Heat_P Parameter: Age (day) Value: 8
  misc_feature: MA Experiment 108522 PARAMETER Experiment Name: Zm_42deg_Heat_P Parameter: Organism Value: Zea mays
  misc_feature: MA Experiment 108522 PARAMETER Experiment Name: Zm_42deg_Heat_P Parameter: Plant Line Value: 35A19
  misc_feature: MA Experiment 108522 PARAMETER Experiment Name: Zm_42deg_Heat_P Parameter: Temperature (deg C) Value: 42 vs. 22
  misc_feature: MA Experiment 108522 PARAMETER Experiment Name: Zm_42deg_Heat_P Parameter: Timepoint (hr) Value: 1
  misc_feature: MA Experiment 108522 PARAMETER Experiment Name: Zm_42deg_Heat_P Parameter: Tissue Value: Aerial
  misc_feature: MA Experiment ID: 108523 Result: Up-regulated in Transcription
  misc_feature: MA Experiment 108523 PARAMETER Experiment Name: Zm_42deg_Heat_P Parameter: Age (day) Value: 8
  misc_feature: MA Experiment 108523 PARAMETER Experiment Name: Zm_42deg_Heat_P Parameter: Organism Value: Zea mays
  misc_feature: MA Experiment 108523 PARAMETER Experiment Name: Zm_42deg_Heat_P Parameter: Plant Line Value: 35A19
  misc_feature: MA Experiment 108523 PARAMETER Experiment Name: Zm_42deg_Heat_P Parameter: Temperature (deg C) Value: 42 vs. 22
  misc_feature: MA Experiment 108523 PARAMETER Experiment Name: Zm_42deg_Heat_P Parameter: Timepoint (hr) Value: 6
  misc_feature: MA Experiment 108523 PARAMETER Experiment Name: Zm_42deg_Heat_P Parameter: Tissue Value: Aerial
  misc_feature: MA Experiment ID: 108556 Result: Up-regulated in Transcription
  misc_feature: MA Experiment 108556 PARAMETER Experiment Name: Zm_Drought_P Parameter: Age (day) Value: 9
  misc_feature: MA Experiment 108556 PARAMETER Experiment Name: Zm_Drought_P Parameter: Organism Value: Zea mays
  misc_feature: MA Experiment 108556 PARAMETER Experiment Name: Zm_Drought_P Parameter: Plant Line Value: 35A19
  misc_feature: MA Experiment 108556 PARAMETER Experiment Name: Zm_Drought_P Parameter: Timepoint (hr) Value: 24
  misc_feature: MA Experiment 108556 PARAMETER Experiment Name: Zm_Drought_P Parameter: Tissue Value: Aerial
  misc_feature: MA Experiment 108556 PARAMETER Experiment Name: Zm_Drought_P Parameter: Treatment Value: Drought vs. No Drought
accctcataccacactcaaactcgcatcctgtggagtttttacatagaagtcgtcacttattgcgccgtggtggatgggcagggggctcgtgtcgaacactcgaacagaaccaccgccattctagaggcatccagtattccagcccaatcctatctttgtattcctctccctcgtctcggaagtctggttcgccgaacagtcccgaacccccgattcactgccgctgccccgtctcgtcctcttcgccagcgaaaaccctagtctaggggacgggagcgcaatccacgcacggcaacatggacgccatccgcaagcagctcgaccagctcatgggggccaaccgcaacggcgatgtacgggaggtcagccgcaagtactatgatcgcgacgtctgccgcctctacctcgccggcctctgcccccacgacctcttccagcttaccaagatggacatgggcccgtgcccgaagctgcactcgctgcaactgcgcaaagaatatgaagaagccaaagccaaagattcagagagcccttaagcggttggaggaagaggatgctaaggcagctattgctatttctgttactgaggttacacagactaaagaagtaatggagttatccaaacaaattaggcagaagatgaaggatattgatgcttttgatcttgagggtaacaccgaggggaaaattcgggccactgaagaacttgacaagctaaaagaacaaagggcagaagagcaggcaaagatgttacttgaagctttcaacaaagaccgtgcttctttaataaactctcttcaaaatgccactcaaacaactacacctgtcccccctgctgctccggatgcacggacacaagaaatgataaacgagaaactgaaaaaggcagaagaactaggtgagaatgggatggttgatgaagcccaaaaattgttggatgaggcggaagctctgaagaagctggccacccgaccacaggctgttccagactctacaaaaatgagcgctcatgtccagataactgaccaaaagctgcgcctgtgtgacatatgtggagcattcttgagcgtatatgacagtgaccgtcgcttggcagatcattttggagggaaacttcatatgggttatatgcttatacgtgagagattgtctgaactgcaggaagagaagaacaaaaaacggaagctagaccgagctgagtatgacagaaggtccagggaaaggagcggggaacgtgccagggattcgagcagggatcgctacatagaccgcagcagcagccgtgacagggagtatgaccgcagaagaagccatgatcgctaccatgacagggaaagagagagagattccaggcagtctcgtagttatgattccagaagccaccgcaggtcatattcaccaaggggaagttctagggattatgatcgatctgggcgtcatgaacgccgtgatcggtactaggagcaaggaagcctccttgaaatttagggtactagattgcgttgcctcagggctagtttggccacctcatttttccaaggattgacaaccttatttttttaagggatttctattttcctaagaaaaattagttcattttcccctgggagggaataccttggggaaatggaggtgccaaactagcctaagtgttgttcgggaattctaagagggggcttaggtccaactggagaaaggcatcagctctttgcattataactaagggataggatctgacgtaatctatgcgtatcatattgttgtgttagctggtgttcatcgtgtaaacacaatgtggtggcgacgtgtcatgctttaatacgcttatatgcatttgaattaagttaatctgcccttgccatgtgtcttttattctggtaataagtttgtactc

SEQ ID NO: 4243 - protein, 369 aa, Zea mays subsp. mays
  peptide (1)..(369): Ceres Seq. ID no. 12409968
  misc_feature (56)..(313): Pfam Name: LUC7 N_terminus Pfam Description: LUC7 N_terminus
  misc_feature (113)..(368): Homolog of NCBI NO: 7022826 NR Description: unnamed protein product [Homo sapiens]
  misc_feature (113)..(368): Homolog of NCBI NO: 20373167 NR Description: CGI-74-like SR-rich [Mus musculus]
  misc_feature (113)..(368): Homolog of NCBI NO: 33604140 NR Description: LUC7-like 2 [Mus musculus]
  misc_feature (56)..(369): Homolog of NCBI NO: 21595481 NR Description: unknown [Arabidopsis thaliana]
  misc_feature (56)..(365): Homolog of NCBI NO: 11357938 NR Description: hypothetical protein K3M16_10 - Arabidopsis
  misc_feature (113)..(368): Homolog of NCBI NO: 7022757 NR Description: unnamed protein product [Homo sapiens]
  misc_feature (41)..(369): Homolog of NCBI NO: 6017114 NR Description: unknown protein [Arabidopsis thaliana]
  misc_feature (56)..(369): Homolog of NCBI NO: 30678827 NR Description: expressed protein [Arabidopsis thaliana]
  misc_feature (56)..(359): Homolog of NCBI NO: 29367401 NR Description: sarcoplasmic reticulum protein-like protein
  misc_feature (56)..(365): Homolog of NCBI NO: 18418301 NR Description: putative protein
MYGRSAASTMIATSAASTSPASAPTTSSSLPRWTWARARSCTRCNCAKNMKKPKPKIQRALKRLEEEDAKAAIAISVTEVTQTKEVMELSKQIRQKMKDIDAFDLEGNTEGKIRATEELDKLKEQRAEEQAKMLLEAFNKDRASLINSLQNATQTTTPVPPAAPDARTQEMINEKLKKAEELGENGMVDEAQKLLDEAEALKKLATRPQAVPDSTKMSAHVQITDQKLRLCDICGAFLSVYDSDRRLADHFGGKLHMGYMLIRERLSELQEEKNKKRKLDRAEYDRRSRERSGERARDSSRDRYIDRSSSRDREYDRRRSHDRYHDRERERDSRQSRSYDSRSHRRSYSPRGSSRDYDRSGRHERRDRY

SEQ ID NO: 4244 - protein, 360 aa, Zea mays subsp. mays
  peptide (1)..(360): Ceres Seq. ID no. 12409969
  misc_feature (47)..(304): Pfam Name: LUC7 N_terminus Pfam Description: LUC7 N_terminus
  misc_feature (104)..(359): Homolog of NCBI NO: 7022757 NR Description: unnamed protein product [Homo sapiens]
  misc_feature (104)..(359): Homolog of NCBI NO: 7022826 NR Description: unnamed protein product [Homo sapiens]
  misc_feature (104)..(359): Homolog of NCBI NO: 20373167 NR Description: CGI-74-like SR-rich [Mus musculus]
  misc_feature (104)..(359): Homolog of NCBI NO: 33604140 NR Description: LUC7-like 2 [Mus musculus]
  misc_feature (47)..(360): Homolog of NCBI NO: 21595481 NR Description: unknown [Arabidopsis thaliana]
  misc_feature (47)..(356): Homolog of NCBI NO: 11357938 NR Description: hypothetical protein K3M16_10 - Arabidopsis
  misc_feature (32)..(360): Homolog of NCBI NO: 6017114 NR Description: unknown protein [Arabidopsis thaliana]
  misc_feature (47)..(360): Homolog of NCBI NO: 30678827 NR Description: expressed protein [Arabidopsis thaliana]
  misc_feature (47)..(350): Homolog of NCBI NO: 29367401 NR Description: sarcoplasmic reticulum protein-like protein
  misc_feature (47)..(356): Homolog of NCBI NO: 18418301 NR Description: putative protein
MIATSAASTSPASAPTTSSSLPRWTWARARSCTRCNCAKNMKKPKPKIQRALKRLEEEDAKAAIAISVTEVTQTKEVMELSKQIRQKMKDIDAFDLEGNTEGKIRATEELDKLKEQRAEEQAKMLLEAFNKDRASLINSLQNATQTTTPVPPAAPDARTQEMINEKLKKAEELGENGMVDEAQKLLDEAEALKKLATRPQAVPDSTKMSAHVQITDQKLRLCDICGAFLSVYDSDRRLADHFGGKLHMGYMLIRERLSELQEEKNKKRKLDRAEYDRRSRERSGERARDSSRDRYIDRSSSRDREYDRRRSHDRYHDRERERDSRQSRSYDSRSHRRSYSPRGSSRDYDRSGRHERRDRY

SEQ ID NO: 4245 - protein, 320 aa, Zea mays subsp. mays
  peptide (1)..(320): Ceres Seq. ID no. 12409970
  misc_feature (7)..(264): Pfam Name: LUC7 N_terminus Pfam Description: LUC7 N_terminus
  misc_feature (64)..(319): Homolog of NCBI NO: 7022757 NR Description: unnamed protein product [Homo sapiens]
  misc_feature (64)..(319): Homolog of NCBI NO: 7022826 NR Description: unnamed protein product [Homo sapiens]
  misc_feature (64)..(319): Homolog of NCBI NO: 20373167 NR Description: CGI-74-like SR-rich [Mus musculus]
  misc_feature (64)..(319): Homolog of NCBI NO: 33604140 NR Description: LUC7-like 2 [Mus musculus]
  misc_feature (7)..(320): Homolog of NCBI NO: 21595481 NR Description: unknown [Arabidopsis thaliana]
  misc_feature (7)..(316): Homolog of NCBI NO: 11357938 NR Description: hypothetical protein K3M16_10 - Arabidopsis
  misc_feature (1)..(320): Homolog of NCBI NO: 6017114 NR Description: unknown protein [Arabidopsis thaliana]
  misc_feature (7)..(320): Homolog of NCBI NO: 30678827 NR Description: expressed protein [Arabidopsis thaliana]
  misc_feature (7)..(310): Homolog of NCBI NO: 29367401 NR Description: sarcoplasmic reticulum protein-like protein
  misc_feature (7)..(316): Homolog of NCBI NO: 18418301 NR Description: putative protein
MKKPKPKIQRALKRLEEEDAKAAIAISVTEVTQTKEVMELSKQIRQKMKDIDAFDLEGNTEGKIRATEELDKLKEQRAEEQAKMLLEAFNKDRASLINSLQNATQTTTPVPPAAPDARTQEMINEKLKKAEELGENGMVDEAQKLLDEAEALKKLATRPQAVPDSTKMSAHVQITDQKLRLCDICGAFLSVYDSDRRLADHFGGKLHMGYMLIRERLSELQEEKNKKRKLDRAEYDRRSRERSGERARDSSRDRYIDRSSSRDREYDRRRSHDRYHDRERERDSRQSRSYDSRSHRRSYSPRGSSRDYDRSGRHERRDRY

SEQ ID NO: 4246 - DNA, 770 bp, Zea mays subsp. mays
  misc_feature (1)..(770): Ceres Seq. ID no. 12348995
  misc_feature: MA Experiment ID: 108528 Result: Up-regulated in Transcription
  misc_feature: MA Experiment 108528 PARAMETER Experiment Name: Zm_Imbibed_Seeds_P Parameter: Age (day) Value: 5 vs. 2
  misc_feature: MA Experiment 108528 PARAMETER Experiment Name: Zm_Imbibed_Seeds_P Parameter: Organism Value: Zea mays
  misc_feature: MA Experiment 108528 PARAMETER Experiment Name: Zm_Imbibed_Seeds_P Parameter: Plant Line Value: 35A19
  misc_feature: MA Experiment 108528 PARAMETER Experiment Name: Zm_Imbibed_Seeds_P Parameter: Tissue Value: Aerial vs. Embryo
  misc_feature: MA Experiment ID: 108530 Result: Up-regulated in Transcription
  misc_feature: MA Experiment 108530 PARAMETER Experiment Name: Zm_Imbibed_Seeds_P Parameter: Age (day) Value: 6 vs. 2
  misc_feature: MA Experiment 108530 PARAMETER Experiment Name: Zm_Imbibed_Seeds_P Parameter: Organism Value: Zea mays
  misc_feature: MA Experiment 108530 PARAMETER Experiment Name: Zm_Imbibed_Seeds_P Parameter: Plant Line Value: 35A19
  misc_feature: MA Experiment 108530 PARAMETER Experiment Name: Zm_Imbibed_Seeds_P Parameter: Tissue Value: Aerial vs. Embryo
  misc_feature: MA Experiment ID: 108536 Result: Down-regulated in Transcription
  misc_feature: MA Experiment 108536 PARAMETER Experiment Name: Zm_Meristem_P Parameter: Age (day) Value: 8
  misc_feature: MA Experiment 108536 PARAMETER Experiment Name: Zm_Meristem_P Parameter: Organism Value: Zea mays
  misc_feature: MA Experiment 108536 PARAMETER Experiment Name: Zm_Meristem_P Parameter: Plant Line Value: 35A19
  misc_feature: MA Experiment 108536 PARAMETER Experiment Name: Zm_Meristem_P Parameter: Tissue Value: Shoot Meristem vs. Above Shoot Meristem
  misc_feature: MA Experiment ID: 108543 Result: Up-regulated in Transcription
  misc_feature: MA Experiment ID: 108545 Result: Up-regulated in Transcription
  misc_feature: MA Experiment 108545 PARAMETER Experiment Name: Zm_Imbibed_Seeds_P Parameter: Age (day) Value: 3 vs. 2
  misc_feature: MA Experiment 108545 PARAMETER Experiment Name: Zm_Imbibed_Seeds_P Parameter: Organism Value: Zea mays
  misc_feature: MA Experiment 108545 PARAMETER Experiment Name: Zm_Imbibed_Seeds_P Parameter: Plant Line Value: 35A19
  misc_feature: MA Experiment 108545 PARAMETER Experiment Name: Zm_Imbibed_Seeds_P Parameter: Tissue Value: Aerial vs. Embryo
  misc_feature: MA Experiment ID: 108546 Result: Down-regulated in Transcription
  misc_feature: MA Experiment 108546 PARAMETER Experiment Name: Zm_Imbibed_Seeds_P Parameter: Age (day) Value: 3 vs. 2
  misc_feature: MA Experiment 108546 PARAMETER Experiment Name: Zm_Imbibed_Seeds_P Parameter: Organism Value: Zea mays
  misc_feature: MA Experiment 108546 PARAMETER Experiment Name: Zm_Imbibed_Seeds_P Parameter: Plant Line Value: 35A19
  misc_feature: MA Experiment 108546 PARAMETER Experiment Name: Zm_Imbibed_Seeds_P Parameter: Tissue Value: Roots vs. Embryo
  misc_feature: MA Experiment ID: 108547 Result: Up-regulated in Transcription
  misc_feature: MA Experiment 108547 PARAMETER Experiment Name: Zm_Imbibed_Seeds_P Parameter: Age (day) Value: 4 vs. 2
  misc_feature: MA Experiment 108547 PARAMETER Experiment Name: Zm_Imbibed_Seeds_P Parameter: Organism Value: Zea mays
  misc_feature: MA Experiment 108547 PARAMETER Experiment Name: Zm_Imbibed_Seeds_P Parameter: Plant Line Value: 35A19
  misc_feature: MA Experiment 108547 PARAMETER Experiment Name: Zm_Imbibed_Seeds_P Parameter: Tissue Value: Aerial vs. Embryo
  misc_feature: MA Experiment ID: 20000534 Result: Down-regulated in Transcription
  misc_feature: MA Experiment 20000534 PARAMETER Experiment Name: Zm_Hybrid_Pollen_P Parameter: Age (day) Value: 8
  misc_feature: MA Experiment 20000534 PARAMETER Experiment Name: Zm_Hybrid_Pollen_P Parameter: Organism Value: Zea mays
  misc_feature: MA Experiment 20000534 PARAMETER Experiment Name: Zm_Hybrid_Pollen_P Parameter: Plant Line Value: 35A19
  misc_feature: MA Experiment 20000534 PARAMETER Experiment Name: Zm_Hybrid_Pollen_P Parameter: Tissue Value: Pollen vs. Aerial
  misc_feature: MA Experiment ID: 20000535 Result: Down-regulated in Transcription
  misc_feature: MA Experiment 20000535 PARAMETER Experiment Name: Zm_Hybrid_Seed_Dev_P Parameter: DAP Value: 30 vs. 12
  misc_feature: MA Experiment 20000535 PARAMETER Experiment Name: Zm_Hybrid_Seed_Dev_P Parameter: Organism Value: Zea mays
  misc_feature: MA Experiment 20000535 PARAMETER Experiment Name: Zm_Hybrid_Seed_Dev_P Parameter: Plant Line Value: 35A19
  misc_feature: MA Experiment 20000535 PARAMETER Experiment Name: Zm_Hybrid_Seed_Dev_P Parameter: Tissue Value: Embryo vs. Unfert Floret
attgcacccttggctcctactcactctctctccccatccgcgccagtccaaccaagtcagcacccgcgcgcggcaaggagttcacgcccatggcgagcaccaacatggcgtcggccacctcgcggttcatgctggccgcgggcgtgcccaccgccagtagcggcagcggccgcgtcagcttcgcctcggcgcccaaccggcttggcaggaggcttgtggtccgggccgatgaggagtccccggcagagccggcgccgacggcggaaggggagggcgccgtggccaccaagcccaaggccgagaagccgccgccgatcgggcccaagagaggcgccaaggtgaagatcctgaggcgggagtcctactggtacaacgggatcggcaacgtcgtcaccgtcgatcaggatcctaacacccgttacccggtggtggtgcggttcaacaaggtgaactacgccggcgtgtctaccaacaactacgccttggacgagatcctcgaggtgaaatgagtgaggccagtctgctcaaggaccccatgctcctgtgtgatttgtagttgtgaagtgaggctgctgcctagctgctacgttagctgctagcgtcacaacatcaatcttgtaatagcttaatctccacaatcatcatgtaatttattgcatgcttcattcaccgtggactcaataatctctcttgctctaaaatcgatgtattcgtttttcttgtgattttgtacatgcacataaatttctctctggaaacattgtttgtgc

SEQ ID NO: 4247 - protein, 168 aa, Zea mays subsp. mays
  peptide (1)..(168): Ceres Seq. ID no. 12348996
  misc_feature (107)..(167): Pfam Name: Photosystem I reaction centre subunit IV / PsaE Pfam Description: Photosystem I reaction centre subunit IV / PsaE
  misc_feature (35)..(168): Homolog of NCBI NO: 21555308 NR Description: Photosystem I reaction center subunit IV B,
  misc_feature (35)..(168): Homolog of NCBI NO: 15225331 NR Description: putative photosystem I reaction center subunit IV
  misc_feature (35)..(167): Homolog of NCBI NO: 30688100 NR Description: photosystem I subunit PSI-E - like protein
  misc_feature (35)..(167): Homolog of NCBI NO: 24030202 NR Description: putative photosystem I subunit PSI-E protein
  misc_feature (30)..(168): Homolog of NCBI NO: 7443145 NR Description: photosystem I chain IV - wood tobacco
  misc_feature (30)..(168): Homolog of NCBI NO: 26986114 NR Description: putative photosystem I reaction centre subunit IV
  misc_feature (30)..(168): Homolog of NCBI NO: 2499966 NR Description: Photosystem I reaction center subunit IV A,
  misc_feature (30)..(168): Homolog of NCBI NO: 2499967 NR Description: Photosystem I reaction center subunit IV B,
  misc_feature (30)..(168): Homolog of NCBI NO: 34394725 NR Description: putative Photosystem I reaction center subunit IV
  misc_feature (30)..(167): Homolog of NCBI NO: 131176 NR Description: Photosystem I reaction center subunit IV,
CTLGSYSLSLPIRASPTKSAPARGKEFTPMASTNMASATSRFMLAAGVPTASSGSGRVSFASAPNRLGRRLVVRADEESPAEPAPTAEGEGAVATKPKAEKPPPIGPKRGAKVKILRRESYWYNGIGNVVTVDQDPNTRYPVVVRFNKVNYAGVSTNNYALDEILEVK

SEQ ID NO: 4248 - protein, 139 aa, Zea mays subsp. mays
  peptide (1)..(139): Ceres Seq. ID no. 12348997
  misc_feature (78)..(138): Pfam Name: Photosystem I reaction centre subunit IV / PsaE Pfam Description: Photosystem I reaction centre subunit IV / PsaE
  misc_feature (6)..(139): Homolog of NCBI NO: 21555308 NR Description: Photosystem I reaction center subunit IV B,
  misc_feature (6)..(139): Homolog of NCBI NO: 15225331 NR Description: putative photosystem I reaction center subunit IV
  misc_feature (6)..(138): Homolog of NCBI NO: 30688100 NR Description: photosystem I subunit PSI-E - like protein
  misc_feature (6)..(138): Homolog of NCBI NO: 24030202 NR Description: putative photosystem I subunit PSI-E protein
  misc_feature (1)..(139): Homolog of NCBI NO: 7443145 NR Description: photosystem I chain IV - wood tobacco
  misc_feature (1)..(139): Homolog of NCBI NO: 26986114 NR Description: putative photosystem I reaction centre subunit IV
  misc_feature (1)..(139): Homolog of NCBI NO: 2499966 NR Description: Photosystem I reaction center subunit IV A,
  misc_feature (1)..(139): Homolog of NCBI NO: 2499967 NR Description: Photosystem I reaction center subunit IV B,
  misc_feature (1)..(139): Homolog of NCBI NO: 34394725 NR Description: putative Photosystem I reaction center subunit IV
  misc_feature (1)..(138): Homolog of NCBI NO: 131176 NR Description: Photosystem I reaction center subunit IV,
MASTNMASATSRFMLAAGVPTASSGSGRVSFASAPNRLGRRLVVRADEESPAEPAPTAEGEGAVATKPKAEKPPPIGPKRGAKVKILRRESYWYNGIGNVVTVDQDPNTRYPVVVRFNKVNYAGVSTNNYALDEILEVK

SEQ ID NO: 4249 - protein, 134 aa, Zea mays subsp. mays
  peptide (1)..(134): Ceres Seq. ID no. 12348998
  misc_feature (73)..(133): Pfam Name: Photosystem I reaction centre subunit IV / PsaE Pfam Description: Photosystem I reaction centre subunit IV / PsaE
  misc_feature (1)..(134): Homolog of NCBI NO: 21555308 NR Description: Photosystem I reaction center subunit IV B,
  misc_feature (1)..(134): Homolog of NCBI NO: 15225331 NR Description: putative photosystem I reaction center subunit IV
  misc_feature (1)..(133): Homolog of NCBI NO: 30688100 NR Description: photosystem I subunit PSI-E - like protein
  misc_feature (1)..(133): Homolog of NCBI NO: 24030202 NR Description: putative photosystem I subunit PSI-E protein
  misc_feature (1)..(134): Homolog of NCBI NO: 7443145 NR Description: photosystem I chain IV - wood tobacco
  misc_feature (1)..(134): Homolog of NCBI NO: 26986114 NR Description: putative photosystem I reaction centre subunit IV
  misc_feature (1)..(134): Homolog of NCBI NO: 2499966 NR Description: Photosystem I reaction center subunit IV A,
  misc_feature (1)..(134): Homolog of NCBI NO: 2499967 NR Description: Photosystem I reaction center subunit IV B,
  misc_feature (1)..(134): Homolog of NCBI NO: 34394725 NR Description: putative Photosystem I reaction center subunit IV
  misc_feature (1)..(133): Homolog of NCBI NO: 131176 NR Description: Photosystem I reaction center subunit IV,
MASATSRFMLAAGVPTASSGSGRVSFASAPNRLGRRLVVRADEESPAEPAPTAEGEGAVATKPKAEKPPPIGPKRGAKVKILRRESYWYNGIGNVVTVDQDPNTRYPVVVRFNKVNYAGVSTNNYALDEILEVK

SEQ ID NO: 4250 - DNA, 1320 bp, Zea mays subsp. mays
  misc_feature (1)..(1320): Ceres Seq. ID no. 12381241
  misc_feature: MA Experiment ID: 108523 Result: Down-regulated in Transcription
  misc_feature: MA Experiment 108523 PARAMETER Experiment Name: Zm_42deg_Heat_P Parameter: Age (day) Value: 8
  misc_feature: MA Experiment 108523 PARAMETER Experiment Name: Zm_42deg_Heat_P Parameter: Organism Value: Zea mays
  misc_feature: MA Experiment 108523 PARAMETER Experiment Name: Zm_42deg_Heat_P Parameter: Plant Line Value: 35A19
  misc_feature: MA Experiment 108523 PARAMETER Experiment Name: Zm_42deg_Heat_P Parameter: Temperature (deg C) Value: 42 vs. 22
  misc_feature: MA Experiment 108523 PARAMETER Experiment Name: Zm_42deg_Heat_P Parameter: Timepoint (hr) Value: 6
  misc_feature: MA Experiment 108523 PARAMETER Experiment Name: Zm_42deg_Heat_P Parameter: Tissue Value: Aerial
  misc_feature: MA Experiment ID: 108559 Result: Up-regulated in Transcription
  misc_feature: MA Experiment 108559 PARAMETER Experiment Name: Zm_5mM_NO_P Parameter: Age (day) Value: 8
  misc_feature: MA Experiment 108559 PARAMETER Experiment Name: Zm_5mM_NO_P Parameter: Organism Value: Zea mays
  misc_feature: MA Experiment 108559 PARAMETER Experiment Name: Zm_5mM_NO_P Parameter: Plant Line Value: 35A19
  misc_feature: MA Experiment 108559 PARAMETER Experiment Name: Zm_5mM_NO_P Parameter: Timepoint (hr) Value: 12
  misc_feature: MA Experiment 108559 PARAMETER Experiment Name: Zm_5mM_NO_P Parameter: Tissue Value: Aerial
  misc_feature: MA Experiment 108559 PARAMETER Experiment Name: Zm_5mM_NO_P Parameter: Treatment Value: 5mM NO vs. No Treatment
ctgcaagaatggatcgcgagacccaagtagagtagaccaaagacaaaggaaagcgagggccaccatcccccaaacccgtgagaaatcgaatcgagaagggaagagcacgcgccgtcgccagcaccgcgtccgccatggccgcctcctccccccgcgcgttgcaatcgctggggtccgccgcctcccgcttcctccacgcgcggggcttcgccgcggcggccgccgccgcgccctcgccggcggtcttcgtcgacaagagcacccgcgtgatctgtcagggcatcacggggaagaacggcaccttccacaccgagcaggccatcgagtacggcaccaacatggttggtggagtgactcctaagaaaggtggaactgaacatttagggctcccagtgtttaactctgtagcagaagctaaggctgaaacaaaagccaatgcaactgttatatatgttccaccaccatttgccgccgccgctataatggaggcaatggaggctgagctcgaccttgccgtctgcattacagaaggaatacctcagcatgacatggtgaaagtgaaggctgcactaaacagccagtctaaaactcgattgattgggccaaattgccctggtatcattaagcctggtgagtgtaaaattggaatcatgccaggttacatccacaagcctgggcgtattgggatcgtatctcgttctggtactttgacatatgaagcggtgtttcaaacaacagctgtaggattgggtcagtcaacttgtgtaggcattggtggtgacccgttcaacggcacaaattttgttgattgccttgaaaagttcgttaacgaccctcagacagaaggtattgttctcattggtgaaattggaggtacggctgaggaggatgctgcgacattcatccaggaaagcaaaacacaaaagcctgttgttgcattcattgctggacttacggcacccccgggccgtcgcatgggtcatgctggagctatcgtggcaggaggaaagggtactgcccaggacaaaatcaaggcactcagagaggcaggtgttaccgttgtcgagtcaccagcgaagattggctctaccatgtttgaaatcttcaagcagcgtggaatggtagaatagacgatggtacagtagagacattgagaaaccgcattttgatgctcatgggcaattgcgagcaattccttccatggcctcaaacaaaactaatgaggctaccttttcttacgtgccttctgtttggaagatggcctgacttcacctggatcaccttccaatgagctcatttccaataagacgtttcagagtc

SEQ ID NO: 4251 - protein, 331 aa, Zea mays subsp. mays
  peptide (1)..(331): Ceres Seq. ID no. 12381242
  misc_feature (38)..(149): Pfam Name: CoA binding domain Pfam Description: CoA binding domain
  misc_feature (11)..(330): Homolog of NCBI NO: 38181885 NR Description: Suclg1 protein [Rattus norvegicus]
  misc_feature (37)..(330): Homolog of NCBI NO: 4104377 NR Description: ATP-specific succinyl-CoA synthetase alpha
  misc_feature (1)..(330): Homolog of NCBI NO: 2258465 NR Description: succinyl-CoA synthetase alpha subunit [Sus scrofa]
  misc_feature (22)..(320): Homolog of NCBI NO: 1711574 NR Description: SUCCINYL-COA LIGASE
  misc_feature (37)..(331): Homolog of NCBI NO: 1076415 NR Description: succinate-CoA ligase (GDP-forming) (EC 6.2.1.4)
  misc_feature (33)..(331): Homolog of NCBI NO: 21593483 NR Description: succinyl-CoA synthetase, alpha subunit
  misc_feature (1)..(331): Homolog of NCBI NO: 15241592 NR Description: succinyl-CoA-ligase alpha subunit
  misc_feature (33)..(331): Homolog of NCBI NO: 15237260 NR Description: succinyl-CoA synthetase, alpha subunit
  misc_feature (31)..(330): Homolog of NCBI NO: 27357175 NR Description: succinyl-CoA ligase alpha subunit [Lycopersicon
  misc_feature (1)..(331): Homolog of NCBI NO: 34393512 NR Description: putative succinyl-CoA ligase alpha subunit
MAASSPRALQSLGSAASRFLHARGFAAAAAAAPSPAVFVDKSTRVICQGITGKNGTFHTEQAIEYGTNMVGGVTPKKGGTEHLGLPVFNSVAEAKAETKANATVIYVPPPFAAAAIMEAMEAELDLAVCITEGIPQHDMVKVKAALNSQSKTRLIGPNCPGIIKPGECKIGIMPGYIHKPGRIGIVSRSGTLTYEAVFQTTAVGLGQSTCVGIGGDPFNGTNFVDCLEKFVNDPQTEGIVLIGEIGGTAEEDAATFIQESKTQKPVVAFIAGLTAPPGRRMGHAGAIVAGGKGTAQDKIKALREAGVTVVESPAKIGSTMFEIFKQRGMVE

SEQ ID NO: 4252 - protein, 263 aa, Zea mays subsp. mays
  peptide (1)..(263): Ceres Seq. ID no. 12381243
  misc_feature (1)..(81): Pfam Name: CoA binding domain Pfam Description: CoA binding domain
  misc_feature (1)..(262): Homolog of NCBI NO: 38181885 NR Description: Suclg1 protein [Rattus norvegicus]
  misc_feature (1)..(262): Homolog of NCBI NO: 4104377 NR Description: ATP-specific succinyl-CoA synthetase alpha
  misc_feature (1)..(262): Homolog of NCBI NO: 2258465 NR Description: succinyl-CoA synthetase alpha subunit [Sus scrofa]
  misc_feature (1)..(252): Homolog of NCBI NO: 1711574 NR Description: SUCCINYL-COA LIGASE
  misc_feature (1)..(263): Homolog of NCBI NO: 1076415 NR Description: succinate-CoA ligase (GDP-forming) (EC 6.2.1.4)
  misc_feature (1)..(263): Homolog of NCBI NO: 21593483 NR Description: succinyl-CoA synthetase, alpha subunit
  misc_feature (1)..(263): Homolog of NCBI NO: 15241592 NR Description: succinyl-CoA-ligase alpha subunit
  misc_feature (1)..(263): Homolog of NCBI NO: 15237260 NR Description: succinyl-CoA synthetase, alpha subunit
  misc_feature (1)..(262): Homolog of NCBI NO: 27357175 NR Description: succinyl-CoA ligase alpha subunit [Lycopersicon
  misc_feature (1)..(263): Homolog of NCBI NO: 34393512 NR Description: putative succinyl-CoA ligase alpha subunit
MVGGVTPKKGGTEHLGLPVFNSVAEAKAETKANATVIYVPPPFAAAAIMEAMEAELDLAVCITEGIPQHDMVKVKAALNSQSKTRLIGPNCPGIIKPGECKIGIMPGYIHKPGRIGIVSRSGTLTYEAVFQTTAVGLGQSTCVGIGGDPFNGTNFVDCLEKFVNDPQTEGIVLIGEIGGTAEEDAATFIQESKTQKPVVAFIAGLTAPPGRRMGHAGAIVAGGKGTAQDKIKALREAGVTVVESPAKIGSTMFEIFKQRGMVE

SEQ ID NO: 4253 - protein, 215 aa, Zea mays subsp. mays
  peptide (1)..(215): Ceres Seq. ID no. 12381244
  misc_feature (1)..(214): Homolog of NCBI NO: 38181885 NR Description: Suclg1 protein [Rattus norvegicus]
  misc_feature (1)..(214): Homolog of NCBI NO: 4104377 NR Description: ATP-specific succinyl-CoA synthetase alpha
  misc_feature (1)..(214): Homolog of NCBI NO: 2258465 NR Description: succinyl-CoA synthetase alpha subunit [Sus scrofa]
  misc_feature (1)..(204): Homolog of NCBI NO: 1711574 NR Description: SUCCINYL-COA LIGASE
  misc_feature (1)..(215): Homolog of NCBI NO: 1076415 NR Description: succinate-CoA ligase (GDP-forming) (EC 6.2.1.4)
  misc_feature (1)..(215): Homolog of NCBI NO: 21593483 NR Description: succinyl-CoA synthetase, alpha subunit
  misc_feature (1)..(215): Homolog of NCBI NO: 15241592 NR Description: succinyl-CoA-ligase alpha subunit
  misc_feature (1)..(215): Homolog of NCBI NO: 15237260 NR Description: succinyl-CoA synthetase, alpha subunit
  misc_feature (1)..(214): Homolog of NCBI NO: 27357175 NR Description: succinyl-CoA ligase alpha subunit [Lycopersicon
  misc_feature (1)..(215): Homolog of NCBI NO: 34393512 NR Description: putative succinyl-CoA ligase alpha subunit
MEAMEAELDLAVCITEGIPQHDMVKVKAALNSQSKTRLIGPNCPGIIKPGECKIGIMPGYIHKPGRIGIVSRSGTLTYEAVFQTTAVGLGQSTCVGIGGDPFNGTNFVDCLEKFVNDPQTEGIVLIGEIGGTAEEDAATFIQESKTQKPVVAFIAGLTAPPGRRMGHAGAIVAGGKGTAQDKIKALREAGVTVVESPAKIGSTMFEIFKQRGMVE

SEQ ID NO: 4254 - DNA, 1163 bp, Zea mays subsp. mays
  misc_feature (1)..(1163): Ceres Seq. ID no. 12406669
  misc_feature: MA Experiment ID: 20000535 Result: Down-regulated in Transcription
  misc_feature: MA Experiment 20000535 PARAMETER Experiment Name: Zm_Hybrid_Seed_Dev_P Parameter: DAP Value: 30 vs. 12
  misc_feature: MA Experiment 20000535 PARAMETER Experiment Name: Zm_Hybrid_Seed_Dev_P Parameter: Organism Value: Zea mays
  misc_feature: MA Experiment 20000535 PARAMETER Experiment Name: Zm_Hybrid_Seed_Dev_P Parameter: Plant Line Value: 35A19
  misc_feature: MA Experiment 20000535 PARAMETER Experiment Name: Zm_Hybrid_Seed_Dev_P Parameter: Tissue Value: Embryo vs. Unfert Floret
ctttttttcggcctttccctcccatatactcgccgtcggccagcggatctaatcggggcgggcgcgatggctgggcagaaccagcggctcaacgtcgtgccgacggtgacgatgctcggcgtcatgaaggctcggctcgtcggcgcgacccgcggccacgcgctgctgaagaagaagtccgacgcgctgacggtccagttccgcgccatcctcaagaagatcgtcgccgccaaggagtcgatgggcgagacgatgcgcgcctcctccttctccctcgccgaggccaagtacgtcgctggcgacggcgtccgccacgtcatcctccagtccgtccgcgcggcatccgtccgcgtccgctcccaccaggagaacgtggccggggtcaagctccccaagttcacccacttcgtcgaccccgccgcggcctccgggggcccctccaacgcgtccccgagcctcacgggcctggcccgcggcgggcagcaggtcgccgcctgcctctccgcgcacgtcaaggccatcgaggtgctcgtcgagctcgcatctctgcaaacctccttcctcactctcgacgaggccatcaagaccaccaaccgccgcgtcaacgcgctcgagaacgtcgtcaagcccaggatcgagaacaccatcagctacatcaagggggagctcgacgagctcgagcgcgaggacttcttcaggctcaagaagatccagggctacaagaagagggagatcgagcgccagatggccgccgccaggctatttgcggaggaacagcttgccgaggatctcgcgcttaagaggggtatctccgtgggggctgcggcaaacctgctggttgctggtggggagaaggacgacgacatcatcttctgaccactccttccatggccatccagtcattcaatcgtggcagaaacaataagttgatgctggagctccagaattgtatctgtttatagaatgatggagattttgattcagtaatctggagtctagccatccgagatcctcaataatctgtacctggaaaccaaacagtgccaagtaacttttacggagcgttatgtgcagctcgtgtagaaaattcaattgaaccgtatttcctgtcgtgtaccttccagtaccgtattatattatatatttattattcaattggacct

SEQ ID NO: 4255 - protein, 291 aa, Zea mays subsp. mays
  peptide (1)..(291): Ceres Seq. ID no. 12406670
  misc_feature (37)..(243): Pfam Name: ATP synthase subunit D Pfam Description: ATP synthase subunit D
  misc_feature (23)..(291): Homolog of NCBI NO: 38344879 NR Description: OSJNBa0033G05.3 [Oryza sativa (japonica
  misc_feature (23)..(291): Homolog of NCBI NO: 21410966 NR Description: ATPase, H+ transporting, lysosomal 34kD, V1
  misc_feature (23)..(291): Homolog of NCBI NO: 7706757 NR Description: ATPase, H+ transporting, lysosomal 34kD, V1
  misc_feature (23)..(291): Homolog of NCBI NO: 40786463 NR Description: ATPase, H+ transporting, lysosomal 34kDa, V1
  misc_feature (23)..(291): Homolog of NCBI NO: 12963799 NR Description: ATPase, H+ transporting, V1 subunit D
  misc_feature (23)..(291): Homolog of NCBI NO: 28278870 NR Description: Similar to ATPase, H+ transporting, lysosomal
  misc_feature (23)..(291): Homolog of NCBI NO: 21355551 NR Description: CG8186-PA [Drosophila melanogaster]
  misc_feature (23)..(250): Homolog of NCBI NO: 28829327 NR Description: similar to Homo sapiens (Human). Vacuolar proton
  misc_feature (23)..(291): Homolog of NCBI NO: 15231126 NR Description: v-ATPase subunit D (vATPD)
  misc_feature (23)..(291): Homolog of NCBI NO: 25529226 NR Description: H+-transporting two-sector ATPase (EC 3.6.3.14)
LFFGLSLPYTRRRPADLIGAGAMAGQNQRLNVVPTVTMLGVMKARLVGATRGHALLKKKSDALTVQFRAILKKIVAAKESMGETMRASSFSLAEAKYVAGDGVRHVILQSVRAASVRVRSHQENVAGVKLPKFTHFVDPAAASGGPSNASPSLTGLARGGQQVAACLSAHVKAIEVLVELASLQTSFLTLDEAIKTTNRRVNALENVVKPRIENTISYIKGELDELEREDFFRLKKIQGYKKREIERQMAAARLFAEEQLAEDLALKRGISVGAAANLLVAGGEKDDDIIF

SEQ ID NO: 4256 - protein, 269 aa, Zea mays subsp. mays
  peptide (1)..(269): Ceres Seq. ID no. 12406671
  misc_feature (15)..(221): Pfam Name: ATP synthase subunit D Pfam Description: ATP synthase subunit D
  misc_feature (1)..(269): Homolog of NCBI NO: 21410966 NR Description: ATPase, H+ transporting, lysosomal 34kD, V1
  misc_feature (1)..(269): Homolog of NCBI NO: 7706757 NR Description: ATPase, H+ transporting, lysosomal 34kD, V1
  misc_feature (1)..(269): Homolog of NCBI NO: 40786463 NR Description: ATPase, H+ transporting, lysosomal 34kDa, V1
  misc_feature (1)..(269): Homolog of NCBI NO: 12963799 NR Description: ATPase, H+ transporting, V1 subunit D
  misc_feature (1)..(269): Homolog of NCBI NO: 28278870 NR Description: Similar to ATPase, H+ transporting, lysosomal
  misc_feature (1)..(269): Homolog of NCBI NO: 21355551 NR Description: CG8186-PA [Drosophila melanogaster]
  misc_feature (1)..(228): Homolog of NCBI NO: 28829327 NR Description: similar to Homo sapiens (Human). Vacuolar proton
  misc_feature (1)..(269): Homolog of NCBI NO: 15231126 NR Description: v-ATPase subunit D (vATPD)
  misc_feature (1)..(269): Homolog of NCBI NO: 25529226 NR Description: H+-transporting two-sector ATPase (EC 3.6.3.14)
  misc_feature (1)..(269): Homolog of NCBI NO: 38344879 NR Description: OSJNBa0033G05.3 [Oryza sativa (japonica
MAGQNQRLNVVPTVTMLGVMKARLVGATRGHALLKKKSDALTVQFRAILKKIVAAKESMGETMRASSFSLAEAKYVAGDGVRHVILQSVRAASVRVRSHQENVAGVKLPKFTHFVDPAAASGGPSNASPSLTGLARGGQQVAACLSAHVKAIEVLVELASLQTSFLTLDEAIKTTNRRVNALENVVKPRIENTISYIKGELDELEREDFFRLKKIQGYKKREIERQMAAARLFAEEQLAEDLALKRGISVGAAANLLVAGGEKDDDIIF

SEQ ID NO: 4257 - protein, 265 aa, Zea mays subsp. mays
  peptide (1)..(265): Ceres Seq. ID no. 12406672
FFRPFPPIYSPSASGSNRGGRDGWAEPAAQRRADGDDARRHEGSARRRDPRPRAAEEEVRRADGPVPRHPQEDRRRQGVDGRDDARLLLLPRRGQVRRWRRRPPRHPPVRPRGIRPRPLPPGERGRGQAPQVHPLRRPRRGLRGPLQRVPEPHGPGPRRAAGRRLPLRARQGHRGARRARISANLLPHSRRGHQDHQPPRQRARERRQAQDREHHQLHQGGARRARARGLLQAQEDPGLQEEGDRAPDGRRQAICGGTACRGSRA

SEQ ID NO: 4258 - DNA, 1006 bp, Zea mays subsp. mays
  misc_feature (1)..(1006): Ceres Seq. ID no. 12403719
  misc_feature: MA Experiment ID: 108504 Result: Down-regulated in Transcription
  misc_feature: MA Experiment 108504 PARAMETER Experiment Name: Zm_Drought_P Parameter: Age (day) Value: 8
  misc_feature: MA Experiment 108504 PARAMETER Experiment Name: Zm_Drought_P Parameter: Organism Value: Zea mays
  misc_feature: MA Experiment 108504 PARAMETER Experiment Name: Zm_Drought_P Parameter: Plant Line Value: 35A19
  misc_feature: MA Experiment 108504 PARAMETER Experiment Name: Zm_Drought_P Parameter: Timepoint (hr) Value: 12
  misc_feature: MA Experiment 108504 PARAMETER Experiment Name: Zm_Drought_P Parameter: Tissue Value: Aerial
  misc_feature: MA Experiment 108504 PARAMETER Experiment Name: Zm_Drought_P Parameter: Treatment Value: Drought vs. No Drought
  misc_feature: MA Experiment ID: 108528 Result: Down-regulated in Transcription
  misc_feature: MA Experiment 108528 PARAMETER Experiment Name: Zm_Imbibed_Seeds_P Parameter: Age (day) Value: 5 vs. 2
  misc_feature: MA Experiment 108528 PARAMETER Experiment Name: Zm_Imbibed_Seeds_P Parameter: Organism Value: Zea mays
  misc_feature: MA Experiment 108528 PARAMETER Experiment Name: Zm_Imbibed_Seeds_P Parameter: Plant Line Value: 35A19
  misc_feature: MA Experiment 108528 PARAMETER Experiment Name: Zm_Imbibed_Seeds_P Parameter: Tissue Value: Aerial vs. Embryo
  misc_feature: MA Experiment ID: 108529 Result: Down-regulated in Transcription
  misc_feature: MA Experiment 108529 PARAMETER Experiment Name: Zm_Imbibed_Seeds_P Parameter: Age (day) Value: 5 vs. 2
  misc_feature: MA Experiment 108529 PARAMETER Experiment Name: Zm_Imbibed_Seeds_P Parameter: Organism Value: Zea mays
  misc_feature: MA Experiment 108529 PARAMETER Experiment Name: Zm_Imbibed_Seeds_P Parameter: Plant Line Value: 35A19
  misc_feature: MA Experiment 108529 PARAMETER Experiment Name: Zm_Imbibed_Seeds_P Parameter: Tissue Value: Roots vs. Embryo
  misc_feature: MA Experiment ID: 108530 Result: Down-regulated in Transcription
  misc_feature: MA Experiment 108530 PARAMETER Experiment Name: Zm_Imbibed_Seeds_P Parameter: Age (day) Value: 6 vs. 2
  misc_feature: MA Experiment 108530 PARAMETER Experiment Name: Zm_Imbibed_Seeds_P Parameter: Organism Value: Zea mays
  misc_feature: MA Experiment 108530 PARAMETER Experiment Name: Zm_Imbibed_Seeds_P Parameter: Plant Line Value: 35A19
  misc_feature: MA Experiment 108530 PARAMETER Experiment Name: Zm_Imbibed_Seeds_P Parameter: Tissue Value: Aerial vs. Embryo
  misc_feature: MA Experiment ID: 108535 Result: Up-regulated in Transcription
  misc_feature: MA Experiment 108535 PARAMETER Experiment Name: Zm_Meristem_P Parameter: Age (day) Value: 8
  misc_feature: MA Experiment 108535 PARAMETER Experiment Name: Zm_Meristem_P Parameter: Organism Value: Zea mays
  misc_feature: MA Experiment 108535 PARAMETER Experiment Name: Zm_Meristem_P Parameter: Plant Line Value: 35A19
  misc_feature: MA Experiment 108535 PARAMETER Experiment Name: Zm_Meristem_P Parameter: Tissue Value: Root Meristem vs. Above Root Meristem
  misc_feature: MA Experiment ID: 108544 Result: Down-regulated in Transcription
  misc_feature: MA Experiment ID: 108556 Result: Down-regulated in Transcription
  misc_feature: MA Experiment 108556 PARAMETER Experiment Name: Zm_Drought_P Parameter: Age (day) Value: 9
  misc_feature: MA Experiment 108556 PARAMETER Experiment Name: Zm_Drought_P Parameter: Organism Value: Zea mays
  misc_feature: MA Experiment 108556 PARAMETER Experiment Name: Zm_Drought_P Parameter: Plant Line Value: 35A19
  misc_feature: MA Experiment 108556 PARAMETER Experiment Name: Zm_Drought_P Parameter: Timepoint (hr) Value: 24
  misc_feature: MA Experiment 108556 PARAMETER Experiment Name: Zm_Drought_P Parameter: Tissue Value: Aerial
  misc_feature: MA Experiment 108556 PARAMETER Experiment Name: Zm_Drought_P Parameter: Treatment Value: Drought vs. No Drought
  misc_feature: MA Experiment ID: 108597 Result: Down-regulated in Transcription
  misc_feature: MA Experiment 108597 PARAMETER Experiment Name: Zm_100uM_ABA_P Parameter: Age (day) Value: 9
  misc_feature: MA Experiment 108597 PARAMETER Experiment Name: Zm_100uM_ABA_P Parameter: Organism Value: Zea mays
  misc_feature: MA Experiment 108597 PARAMETER Experiment Name: Zm_100uM_ABA_P Parameter: Plant Line Value: 35A19
  misc_feature: MA Experiment 108597 PARAMETER Experiment Name: Zm_100uM_ABA_P Parameter: Timepoint (hr) Value: 24
  misc_feature: MA Experiment 108597 PARAMETER Experiment Name: Zm_100uM_ABA_P Parameter: Tissue Value: Aerial
  misc_feature: MA Experiment 108597 PARAMETER Experiment Name: Zm_100uM_ABA_P Parameter: Treatment Value: 100uM ABA vs. No Treatment
  misc_feature: MA Experiment ID: 20000478 Result: Down-regulated in Transcription
  misc_feature: MA Experiment 20000478 PARAMETER Experiment Name: Zm_5mM_SA_P Parameter: Age (day) Value: 11
  misc_feature: MA Experiment 20000478 PARAMETER Experiment Name: Zm_5mM_SA_P Parameter: Organism Value: Zea mays
  misc_feature: MA Experiment 20000478 PARAMETER Experiment Name: Zm_5mM_SA_P Parameter: Plant Line Value: 35A19
  misc_feature: MA Experiment 20000478 PARAMETER Experiment Name: Zm_5mM_SA_P Parameter: Timepoint (hr) Value: 72
  misc_feature: MA Experiment 20000478 PARAMETER Experiment Name: Zm_5mM_SA_P Parameter: Tissue Value: Aerial
  misc_feature: MA Experiment 20000478 PARAMETER Experiment Name: Zm_5mM_SA_P Parameter: Treatment Value: 5mM SA vs. No Treatment
  misc_feature: MA Experiment ID: 20000479 Result: Down-regulated in Transcription
  misc_feature: MA Experiment 20000479 PARAMETER Experiment Name: Zm_Drought_P Parameter: Age (day) Value: 10
  misc_feature: MA Experiment 20000479 PARAMETER Experiment Name: Zm_Drought_P Parameter: Organism Value: Zea mays
  misc_feature: MA Experiment 20000479 PARAMETER Experiment Name: Zm_Drought_P Parameter: Plant Line Value: 35A19
  misc_feature: MA Experiment 20000479 PARAMETER Experiment Name: Zm_Drought_P Parameter: Timepoint (hr) Value: 48
  misc_feature: MA Experiment 20000479 PARAMETER Experiment Name: Zm_Drought_P Parameter: Tissue Value: Aerial
  misc_feature: MA Experiment 20000479 PARAMETER Experiment Name: Zm_Drought_P Parameter: Treatment Value: Drought vs. No Drought
  misc_feature: MA Experiment ID: 20000480 Result: Down-regulated in Transcription
  misc_feature: MA Experiment 20000480 PARAMETER Experiment Name: Zm_Drought_P Parameter: Age (day) Value: 11
  misc_feature: MA Experiment 20000480 PARAMETER Experiment Name: Zm_Drought_P Parameter: Organism Value: Zea mays
  misc_feature: MA Experiment 20000480 PARAMETER Experiment Name: Zm_Drought_P Parameter: Plant Line Value: 35A19
  misc_feature: MA Experiment 20000480 PARAMETER Experiment Name: Zm_Drought_P Parameter: Timepoint (hr) Value: 72
  misc_feature: MA Experiment 20000480 PARAMETER Experiment Name: Zm_Drought_P Parameter: Tissue Value: Aerial
  misc_feature: MA Experiment 20000480 PARAMETER Experiment Name: Zm_Drought_P Parameter: Treatment Value: Drought vs. No Drought
  misc_feature: MA Experiment ID: 20000492 Result: Up-regulated in Transcription
  misc_feature: MA Experiment 20000492 PARAMETER Experiment Name: Zm_Hybrid_Seed_Dev_P Parameter: DAP Value: 12
  misc_feature: MA Experiment 20000492 PARAMETER Experiment Name: Zm_Hybrid_Seed_Dev_P Parameter: Organism Value: Zea mays
  misc_feature: MA Experiment 20000492 PARAMETER Experiment Name: Zm_Hybrid_Seed_Dev_P Parameter: Plant Line Value: 35A19
  misc_feature: MA Experiment 20000492 PARAMETER Experiment Name: Zm_Hybrid_Seed_Dev_P Parameter: Tissue Value: Fert Kernel vs. Unfert Floret
  misc_feature: MA Experiment ID: 20001605 Result: Up-regulated in Transcription
  misc_feature: MA Experiment 20001605 PARAMETER Experiment Name: Zm_50ppm_KNO3_L-to-H_P Parameter: Age (day) Value: 19
  misc_feature: MA Experiment 20001605 PARAMETER Experiment Name: Zm_50ppm_KNO3_L-to-H_P Parameter: Organism Value: Zea mays
  misc_feature: MA Experiment 20001605 PARAMETER Experiment Name: Zm_50ppm_KNO3_L-to-H_P Parameter: Plant Line Value: 35A19
  misc_feature: MA Experiment 20001605 PARAMETER Experiment Name: Zm_50ppm_KNO3_L-to-H_P Parameter: Timepoint (hr) Value: 4
  misc_feature: MA Experiment 20001605 PARAMETER Experiment Name: Zm_50ppm_KNO3_L-to-H_P Parameter: Tissue Value: Shoots
  misc_feature: MA Experiment 20001605 PARAMETER Experiment Name: Zm_50ppm_KNO3_L-to-H_P Parameter: Treatment Value: 50ppm KNO3 vs. 50ppm KCl
  misc_feature: MA Experiment ID: 20001608 Result: Up-regulated in Transcription
  misc_feature: MA Experiment 20001608 PARAMETER Experiment Name: Zm_50ppm_KNO3_L-to-H_P Parameter: Age (day) Value: 21
  misc_feature: MA Experiment 20001608 PARAMETER Experiment Name: Zm_50ppm_KNO3_L-to-H_P Parameter: Organism Value: Zea mays
  misc_feature: MA Experiment 20001608 PARAMETER Experiment Name: Zm_50ppm_KNO3_L-to-H_P Parameter: Plant Line Value: 35A19
  misc_feature: MA Experiment 20001608 PARAMETER Experiment Name: Zm_50ppm_KNO3_L-to-H_P Parameter: Timepoint (hr) Value: 48
  misc_feature: MA Experiment 20001608 PARAMETER Experiment Name: Zm_50ppm_KNO3_L-to-H_P Parameter: Tissue Value: Shoots
  misc_feature: MA Experiment 20001608 PARAMETER Experiment Name: Zm_50ppm_KNO3_L-to-H_P Parameter: Treatment Value: 50ppm KNO3 vs. 50ppm KCl
  misc_feature: MA Experiment ID: 20001612 Result: Up-regulated in Transcription
  misc_feature: MA Experiment 20001612 PARAMETER Experiment Name: Zm_50ppm_KNO3_L-to-H_P Parameter: Age (day) Value: 19
  misc_feature: MA Experiment 20001612 PARAMETER Experiment Name: Zm_50ppm_KNO3_L-to-H_P Parameter: Organism Value: Zea mays
  misc_feature: MA Experiment 20001612 PARAMETER Experiment Name: Zm_50ppm_KNO3_L-to-H_P Parameter: Plant Line Value: 35A19
  misc_feature: MA Experiment 20001612 PARAMETER Experiment Name: Zm_50ppm_KNO3_L-to-H_P Parameter: Timepoint (hr) Value: 8
  misc_feature: MA Experiment 20001612 PARAMETER Experiment Name: Zm_50ppm_KNO3_L-to-H_P Parameter: Tissue Value: Roots
  misc_feature: MA Experiment 20001612 PARAMETER Experiment Name: Zm_50ppm_KNO3_L-to-H_P Parameter: Treatment Value: 50ppm KNO3 vs. 50ppm KCl
  misc_feature: MA Experiment ID: 20001613 Result: Up-regulated in Transcription
  misc_feature: MA Experiment 20001613 PARAMETER Experiment Name: Zm_50ppm_KNO3_L-to-H_P Parameter: Age (day) Value: 20
  misc_feature: MA Experiment 20001613 PARAMETER Experiment Name: Zm_50ppm_KNO3_L-to-H_P Parameter: Organism Value: Zea mays
  misc_feature: MA Experiment 20001613 PARAMETER Experiment Name: Zm_50ppm_KNO3_L-to-H_P Parameter: Plant Line Value: 35A19
  misc_feature: MA Experiment 20001613 PARAMETER Experiment Name: Zm_50ppm_KNO3_L-to-H_P Parameter: Timepoint (hr) Value: 24
  misc_feature: MA Experiment 20001613 PARAMETER Experiment Name: Zm_50ppm_KNO3_L-to-H_P Parameter: Tissue Value: Roots
  misc_feature: MA Experiment 20001613 PARAMETER Experiment Name: Zm_50ppm_KNO3_L-to-H_P Parameter: Treatment Value: 50ppm KNO3 vs. 50ppm KCl
ctagggtttacatcccttataaaatctcgtcttccacccctgcctccctcagtcgcacttcctccggcggcggcaactcgacggccaaccgcgccaccctgccgcggcagccatggtgcatgttaacttctaccgcaactatgggaagactttcaagaagccaaggcggccgtatgagaaggagcgcctagatgctgagctgaagctggttggtgagtatggcctgcggtgcaagcgcgagctgtggcgcgtgcagtatgccctgagccgtatcaggaatgcagccagggagctgctcaccctggatgagaagaacccacgccgtatctttgagggcgaggcgctcctccgccgcatgaacagatatggtcttcttggtgagggacagaacaagcttgattacgtgcttgctctcactgttgagaacttcctccagcgccgcctccagaccatcgtcttcaagaatggcatggccaagtccatccaccatgctcgtgtcctgatcaggcagcgccacatcagggtgggaaggcagctcgtcaacatcccctcgttcatggtcagggtcgaatcagagaagcacatcgacttctccctcaccagccctctgggtggtggtcctgccggaagggtgaagcggaagaaccagaagaaggcctcagggggcggcgacgctgaggaggacgaggagtaaagggggggggggcacgtaggattctgggacggcaattggtttaaatgtgaggtggacactttagttgttgtgcctgagtgtgtttgtgttgtaatgaatacaaattctactgtggtagacaattttgcacccccactactgacactcgtgtttaaatttaaacattggcatcgtgtctggacacgatgaattgtattctggtttgggtggctatttgctagtttggtctttaggccaatgtttaagactgaaacaaattggtagccaactttactatcttatgctctgctggtctgtttggtgatttttttt

SEQ ID NO: 4259 - protein, 193 aa, Zea mays subsp. mays
  peptide (1)..(193): Ceres Seq. ID no. 12403720
  misc_feature (6)..(108): Pfam Name: Ribosomal protein S4/S9 N-terminal domain Pfam Description: Ribosomal protein S4/S9 N-terminal domain
  misc_feature (12)..(193): Homolog of NCBI NO: 1362936 NR Description: ribosomal protein S9, cytosolic - human
  misc_feature (7)..(191): Homolog of NCBI NO: 23613223 NR Description: 40S ribosomal subunit protein S9, putative
  misc_feature (12)..(193): Homolog of NCBI NO: 15294029 NR Description: 40S ribosomal protein S9 [Ictalurus punctatus]
  misc_feature (12)..(193): Homolog of NCBI NO: 13592067 NR Description: ribosomal protein S9 [Rattus norvegicus]
  misc_feature (12)..(193): Homolog of NCBI NO: 14141193 NR Description: ribosomal protein S9; 40S ribosomal protein S9
  misc_feature (8)..(193): Homolog of NCBI NO: 40741183 NR Description: RS9_PODAN 40S ribosomal protein S9 (S7)
  misc_feature (8)..(193): Homolog of NCBI NO: 1710780 NR Description: 40S ribosomal protein S9 (S7)
  misc_feature (1)..(192): Homolog of NCBI NO: 6440857 NR Description: 40S ribosomal protein S9 [Chlamydomonas sp. HS-5]
  misc_feature (1)..(193): Homolog of NCBI NO: 15242241 NR Description: 40S ribosomal protein - like; protein id:
  misc_feature (1)..(193): Homolog of NCBI NO: 15242498 NR Description: 40S ribosomal protein S9-like
MVHVNFYRNYGKTFKKPRRPYEKERLDAELKLVGEYGLRCKRELWRVQYALSRIRNAARELLTLDEKNPRRIFEGEALLRRMNRYGLLGEGQNKLDYVLALTVENFLQRRLQTIVFKNGMAKSIHHARVLIRQRHIRVGRQLVNIPSFMVRVESEKHIDFSLTSPLGGGPAGRVKRKNQKKASGGGDAEEDEE

SEQ ID NO: 4260 - protein, 112 aa, Zea mays subsp. mays
  peptide (1)..(112): Ceres Seq. ID no. 12403721
  misc_feature (28)..(75): Pfam Name: S4 domain Pfam Description: S4 domain
  misc_feature (1)..(112): Homolog of NCBI NO: 1362936 NR Description: ribosomal protein S9, cytosolic - human
  misc_feature (1)..(110): Homolog of NCBI NO: 23613223 NR Description: 40S ribosomal subunit protein S9, putative
  misc_feature (1)..(112): Homolog of NCBI NO: 15294029 NR Description: 40S ribosomal protein S9 [Ictalurus punctatus]
  misc_feature (1)..(112): Homolog of NCBI NO: 13592067 NR Description: ribosomal protein S9 [Rattus norvegicus]
  misc_feature (1)..(112): Homolog of NCBI NO: 14141193 NR Description: ribosomal protein S9; 40S ribosomal protein S9
  misc_feature (1)..(112): Homolog of NCBI NO: 40741183 NR Description: RS9_PODAN 40S ribosomal protein S9 (S7)
  misc_feature (1)..(112): Homolog of NCBI NO: 1710780 NR Description: 40S ribosomal protein S9 (S7)
  misc_feature (1)..(111): Homolog of NCBI NO: 6440857 NR Description: 40S ribosomal protein S9 [Chlamydomonas sp. HS-5]
  misc_feature (1)..(112): Homolog of NCBI NO: 15242241 NR Description: 40S ribosomal protein - like; protein id:
  misc_feature (1)..(112): Homolog of NCBI NO: 15242498 NR Description: 40S ribosomal protein S9-like
MNRYGLLGEGQNKLDYVLALTVENFLQRRLQTIVFKNGMAKSIHHARVLIRQRHIRVGRQLVNIPSFMVRVESEKHIDFSLTSPLGGGPAGRVKRKNQKKASGGGDAEEDEE

SEQ ID NO: 4261 - DNA, 849 bp, Zea mays subsp. mays
  misc_feature (1)..(849): Ceres Seq. ID no. 12434769
  misc_feature: MA Experiment ID: 20000477 Result: Down-regulated in Transcription
  misc_feature: MA Experiment 20000477 PARAMETER Experiment Name: Zm_5mM_SA_P Parameter: Age (day) Value: 10
  misc_feature: MA Experiment 20000477 PARAMETER Experiment Name: Zm_5mM_SA_P Parameter: Organism Value: Zea mays
  misc_feature: MA Experiment 20000477 PARAMETER Experiment Name: Zm_5mM_SA_P Parameter: Plant Line Value: 35A19
  misc_feature: MA Experiment 20000477 PARAMETER Experiment Name: Zm_5mM_SA_P Parameter: Timepoint (hr) Value: 48
  misc_feature: MA Experiment 20000477 PARAMETER Experiment Name: Zm_5mM_SA_P Parameter: Tissue Value: Aerial
  misc_feature: MA Experiment 20000477 PARAMETER Experiment Name: Zm_5mM_SA_P Parameter: Treatment Value: 5mM SA vs. No Treatment
  misc_feature: MA Experiment ID: 20000478 Result: Down-regulated in Transcription
  misc_feature: MA Experiment 20000478 PARAMETER Experiment Name: Zm_5mM_SA_P Parameter: Age (day) Value: 11
  misc_feature: MA Experiment 20000478 PARAMETER Experiment Name: Zm_5mM_SA_P Parameter: Organism Value: Zea mays
  misc_feature: MA Experiment 20000478 PARAMETER Experiment Name: Zm_5mM_SA_P Parameter: Plant Line Value: 35A19
  misc_feature: MA Experiment 20000478 PARAMETER Experiment Name: Zm_5mM_SA_P Parameter: Timepoint (hr) Value: 72
  misc_feature: MA Experiment 20000478 PARAMETER Experiment Name: Zm_5mM_SA_P Parameter: Tissue Value: Aerial
  misc_feature: MA Experiment 20000478 PARAMETER Experiment Name: Zm_5mM_SA_P Parameter: Treatment Value: 5mM SA vs. No Treatment
aagagctccccacctcgcccccccccatccagctccgaccctagggtttccatccggctcttccggaagcttccgaaaatggccaccgacgagctcgcccacgccgtcgcccccgccccggccgggggagaccactccccggccttctcgttcagcatctggccgccgacgcagcgcacgcgggacgcggtggtgcggcgcctcgtggagacgctcgcgggagacaccatcctctgcaagcgctacggtgcggtgccggccgccgacgccgagcccgcggcgcgcgccatcgaggccgaggccttcgacgccgcggcctccacgggaggcgccgccgccgcctccgtggaggaggggatcgaggcgctgcagttctactccaaggaggtgagccgccgcctcctcgacttcgtcaagtcccgctccgcggacgccaaggccggtgacacgccgtcggaggaggcccgggcccctggcgcgcccgaggccgaggccgcccagcccgcggcgtgagcgccggacagccattcgttccgttttgtatttcctgcagcctgtgtttggcttgggtctgagtttgtatgacttgaacgttagctgtttgcacatctatgcaattcttgttcttccatgaatagccccgttctagtgcgtgttcctgtttttctgggaatccctgcccgatcctgaggttgtcaaaccatcgcagcattgacctctgtctgtgtgcagcttcgagtgatggtcgaattgttccggagaccgaattgacaagcaattaagattcctcccatctttcaagccacatttatatgtataataataatctgaccgttgatttgaaattct

SEQ ID NO: 4262 - protein, 170 aa, Zea mays subsp. mays
  peptide (1)..(170): Ceres Seq. ID no. 12434770
  misc_feature (50)..(170): Homolog of NCBI NO: 7546725 NR Description: MFP1 attachment factor 1 [Lycopersicon esculentum]
  misc_feature (33)..(170): Homolog of NCBI NO: 33146512 NR Description: putative MFP1 attachment factor 1
  misc_feature (40)..(155): Homolog of NCBI NO: 37533022 NR Description: hypothetical protein [Oryza sativa (japonica
  misc_feature (27)..(168): Homolog of NCBI NO: 26006500 NR Description: Unknown protein [Oryza sativa (japonica
  misc_feature (27)..(170): Homolog of NCBI NO: 7546727 NR Description: MFP1 attachment factor 1 [Zea mays]
KSSPPRPPPSSSDPRVSIRLFRKLPKMATDELAHAVAPAPAGGDHSPAFSFSIWPPTQRTRDAVVRRLVETLAGDTILCKRYGAVPAADAEPAARAIEAEAFDAAASTGGAAAASVEEGIEALQFYSKEVSRRLLDFVKSRSADAKAGDTPSEEARAPGAPEAEAAQPAA

SEQ ID NO: 4263 - protein, 144 aa, Zea mays subsp. mays
  peptide (1)..(144): Ceres Seq. ID no. 12434771
  misc_feature (24)..(144): Homolog of NCBI NO: 7546725 NR Description: MFP1 attachment factor 1 [Lycopersicon esculentum]
  misc_feature (7)..(144): Homolog of NCBI NO: 33146512 NR Description: putative MFP1 attachment factor 1
  misc_feature (14)..(129): Homolog of NCBI NO: 37533022 NR Description: hypothetical protein [Oryza sativa (japonica
  misc_feature (1)..(142): Homolog of NCBI NO: 26006500 NR Description: Unknown protein [Oryza sativa (japonica
  misc_feature (1)..(144): Homolog of NCBI NO: 7546727 NR Description: MFP1 attachment factor 1 [Zea mays]
MATDELAHAVAPAPAGGDHSPAFSFSIWPPTQRTRDAVVRRLVETLAGDTILCKRYGAVPAADAEPAARAIEAEAFDAAASTGGAAAASVEEGIEALQFYSKEVSRRLLDFVKSRSADAKAGDTPSEEARAPGAPEAEAAQPAA

SEQ ID NO: 4264 - protein, 129 aa, Zea mays subsp. mays
  peptide (1)..(129): Ceres Seq. ID no. 12434772
  misc_feature (7)..(129): Pfam Name: Glycoprotein GG/GX Pfam Description: Glycoprotein GG/GX
  misc_feature (8)..(129): Homolog of NCBI NO: 1076211 NR Description: hypothetical protein VSP-3 - Chlamydomonas
  misc_feature (3)..(129): Homolog of NCBI NO: 23274133 NR Description: Similar to serine/arginine repetitive matrix 1
  misc_feature (1)..(129): Homolog of NCBI NO: 25143299 NR Description: pre-mRNA splicing SR protein related RSR-1 (68.2
  misc_feature (30)..(129): Homolog of NCBI NO: 141449 NR Description: Hypothetical 35.5 kDa protein in transposon
  misc_feature (3)..(129): Homolog of NCBI NO: 5032119 NR Description: Ser/Arg-related nuclear matrix protein (plenty of
  misc_feature (3)..(129): Homolog of NCBI NO: 20138131 NR Description: Vegetative cell wall protein gp1 precursor
  misc_feature (7)..(129): Homolog of NCBI NO: 9630030 NR Description: unknown [Orgyia pseudotsugata multicapsid
  misc_feature (5)..(129): Homolog of NCBI NO: 14599404 NR Description: protease 1 [Pneumocystis carinii]
  misc_feature (2)..(129): Homolog of NCBI NO: 6523547 NR Description: hydroxyproline-rich glycoprotein DZ-HRGP
  misc_feature (1)..(129): Homolog of NCBI NO: 39596044 NR Description: Hypothetical protein CBG15933 [Caenorhabditis
RAPHLAPPHPAPTLGFPSGSSGSFRKWPPTSSPTPSPPPRPGETTPRPSRSASGRRRSARGTRWCGASWRRSRETPSSASATVRCRPPTPSPRRAPSRPRPSTPRPPREAPPPPPWRRGSRRCSSTPRR

SEQ ID NO: 4265 - DNA, 1057 bp, Zea mays subsp. mays
  misc_feature (1)..(1057): Ceres Seq. ID no. 12345982
  misc_feature: MA Experiment ID: 108523 Result: Down-regulated in Transcription
  misc_feature: MA Experiment 108523 PARAMETER Experiment Name: Zm_42deg_Heat_P Parameter: Age (day) Value: 8
  misc_feature: MA Experiment 108523 PARAMETER Experiment Name: Zm_42deg_Heat_P Parameter: Organism Value: Zea mays
  misc_feature: MA Experiment 108523 PARAMETER Experiment Name: Zm_42deg_Heat_P Parameter: Plant Line Value: 35A19
  misc_feature: MA Experiment 108523 PARAMETER Experiment Name: Zm_42deg_Heat_P Parameter: Temperature (deg C) Value: 42 vs. 22
  misc_feature: MA Experiment 108523 PARAMETER Experiment Name: Zm_42deg_Heat_P Parameter: Timepoint (hr) Value: 6
  misc_feature: MA Experiment 108523 PARAMETER Experiment Name: Zm_42deg_Heat_P Parameter: Tissue Value: Aerial
  misc_feature: MA Experiment ID: 108528 Result: Down-regulated in Transcription
  misc_feature: MA Experiment 108528 PARAMETER Experiment Name: Zm_Imbibed_Seeds_P Parameter: Age (day) Value: 5 vs. 2
  misc_feature: MA Experiment 108528 PARAMETER Experiment Name: Zm_Imbibed_Seeds_P Parameter: Organism Value: Zea mays
  misc_feature: MA Experiment 108528 PARAMETER Experiment Name: Zm_Imbibed_Seeds_P Parameter: Plant Line Value: 35A19
  misc_feature: MA Experiment 108528 PARAMETER Experiment Name: Zm_Imbibed_Seeds_P Parameter: Tissue Value: Aerial vs. Embryo
aagaaaaaaaagatggtgtgtccccaaacaggacctttgtttaagccgcgccttggctcgtcacgactcacgaccatgatttggtaaagaaagcacaaagcaggaggaagccggcggtgtaggcgacccatggctccacagacgaggagagagaggttggcgggggaggcgcggccgagctcgtcggggctaacaccggcgaagccgggggcggtcgaggtgcagcgccgacgggcgggcagcggttggacgagccgtcggatctccatctacgcctcccgagtctacttcctcctcatcatgctccagatcccgctcttcagggtcccttgtagagctggcacatgcacaactcctattcaagtaacatcatctcagttggtctcaaatgatatattcccagcagctgttgtgaaggccatgctctaccctggagctaccgtgagcagcctaactaaaagcaagacatttcctagttggaatgacctgtttgacatgtacaacctgacagaagcaaaaaatgcttctgcagtagttgatctccagcgtctagagatacttgccggaagctacttctgtgttgctggagcgctcattggcatcataaatcctgggaggatgactttgtttggtacccttttgattatctggggtatggtgaaagaagcactatttgggaagccagtgaacagtgatctgactcaatcaactcatgtctacccaaccattttgattgcacttatctgtgcattcatgtcgataacttacaacgtaaagaagacagcaagaagtagtactcctgtttctatcgctaagccactgataagttctgccaagtcaaaactgaagtagacttacaagtttaatccttgtaactcttttgaaatatttatttatgtgcaaaaaaacaggtttgaggatgacctgatgatgcttttggtgtatatctgactttcaatactgtaacattcagttttctttattgtattaacaattcgcaaggtcacaccgtctgtaatgtttacaaaaaaaaacagataaatcttggttttctccc

SEQ ID NO: 4266 - protein, 240 aa, Zea mays subsp. mays
  peptide (1)..(240): Ceres Seq. ID no. 12345983
  misc_feature (66)..(229): Homolog of NCBI NO: 15220078 NR Description: hypothetical protein; protein id: At1g80200.1
  misc_feature (87)..(240): Homolog of NCBI NO: 8953390 NR Description: putative protein [Arabidopsis thaliana]
  misc_feature (39)..(240): Homolog of NCBI NO: 17064978 NR Description: putative protein [Arabidopsis thaliana]
  misc_feature (39)..(240): Homolog of NCBI NO: 18416514 NR Description: putative protein
  misc_feature (1)..(240): Homolog of NCBI NO: 34913974 NR Description: B1110C07.25 [Oryza sativa (japonica
MAPQTRRERLAGEARPSSSGLTPAKPGAVEVQRRRAGSGWTSRRISIYASRVYFLLIMLQIPLFRVPCRAGTCTTPIQVTSSQLVSNDIFPAAVVKAMLYPGATVSSLTKSKTFPSWNDLFDMYNLTEAKNASAVVDLQRLEILAGSYFCVAGALIGIINPGRMTLFGTLLIIWGMVKEALFGKPVNSDLTQSTHVYPTILIALICAFMSITYNVKKTARSSTPVSIAKPLISSAKSKLK

SEQ ID NO: 4267 - protein, 183 aa, Zea mays subsp. mays
  peptide (1)..(183): Ceres Seq. ID no. 12345984
  misc_feature (9)..(172): Homolog of NCBI NO: 15220078 NR Description: hypothetical protein; protein id: At1g80200.1
  misc_feature (30)..(183): Homolog of NCBI NO: 8953390 NR Description: putative protein [Arabidopsis thaliana]
  misc_feature (1)..(183): Homolog of NCBI NO: 17064978 NR Description: putative protein [Arabidopsis thaliana]
  misc_feature (1)..(183): Homolog of NCBI NO: 18416514 NR Description: putative protein
  misc_feature (1)..(183): Homolog of NCBI NO: 34913974 NR Description: B1110C07.25 [Oryza sativa (japonica
MLQIPLFRVPCRAGTCTTPIQVTSSQLVSNDIFPAAVVKAMLYPGATVSSLTKSKTFPSWNDLFDMYNLTEAKNASAVVDLQRLEILAGSYFCVAGALIGIINPGRMTLFGTLLIIWGMVKEALFGKPVNSDLTQSTHVYPTILIALICAFMSITYNVKKTARSSTPVSIAKPLISSAKSKLK

SEQ ID NO: 4268 - protein, 143 aa, Zea mays subsp. mays
  peptide (1)..(143): Ceres Seq. ID no. 12345985
  misc_feature (1)..(132): Homolog of NCBI NO: 15220078 NR Description: hypothetical protein; protein id: At1g80200.1
  misc_feature (1)..(143): Homolog of NCBI NO: 8953390 NR Description: putative protein [Arabidopsis thaliana]
  misc_feature (1)..(143): Homolog of NCBI NO: 17064978 NR Description: putative protein [Arabidopsis thaliana]
  misc_feature (1)..(143): Homolog of NCBI NO: 18416514 NR Description: putative protein
  misc_feature (1)..(143): Homolog of NCBI NO: 34913974 NR Description: B1110C07.25 [Oryza sativa (japonica
MLYPGATVSSLTKSKTFPSWNDLFDMYNLTEAKNASAVVDLQRLEILAGSYFCVAGALIGIINPGRMTLFGTLLIIWGMVKEALFGKPVNSDLTQSTHVYPTILIALICAFMSITYNVKKTARSSTPVSIAKPLISSAKSKLK

SEQ ID NO: 4269 - DNA, 789 bp, Zea mays subsp. mays; identical to SEQ ID NO: 1699
  misc_feature (1)..(789): Ceres Seq. ID no. 12355957
  misc_feature: MA Experiment ID: 108528 Result: Down-regulated in Transcription
  misc_feature: MA Experiment 108528 PARAMETER Experiment Name: Zm_Imbibed_Seeds_P Parameter: Age (day) Value: 5 vs. 2
  misc_feature: MA Experiment 108528 PARAMETER Experiment Name: Zm_Imbibed_Seeds_P Parameter: Organism Value: Zea mays
  misc_feature: MA Experiment 108528 PARAMETER Experiment Name: Zm_Imbibed_Seeds_P Parameter: Plant Line Value: 35A19
  misc_feature: MA Experiment 108528 PARAMETER Experiment Name: Zm_Imbibed_Seeds_P Parameter: Tissue Value: Aerial vs. Embryo
  misc_feature: MA Experiment ID: 108530 Result: Down-regulated in Transcription
  misc_feature: MA Experiment 108530 PARAMETER Experiment Name: Zm_Imbibed_Seeds_P Parameter: Age (day) Value: 6 vs. 2
  misc_feature: MA Experiment 108530 PARAMETER Experiment Name: Zm_Imbibed_Seeds_P Parameter: Organism Value: Zea mays
  misc_feature: MA Experiment 108530 PARAMETER Experiment Name: Zm_Imbibed_Seeds_P Parameter: Plant Line Value: 35A19
  misc_feature: MA Experiment 108530 PARAMETER Experiment Name: Zm_Imbibed_Seeds_P Parameter: Tissue Value: Aerial vs. Embryo
  misc_feature: MA Experiment ID: 108535 Result: Up-regulated in Transcription
  misc_feature: MA Experiment 108535 PARAMETER Experiment Name: Zm_Meristem_P Parameter: Age (day) Value: 8
  misc_feature: MA Experiment 108535 PARAMETER Experiment Name: Zm_Meristem_P Parameter: Organism Value: Zea mays
  misc_feature: MA Experiment 108535 PARAMETER Experiment Name: Zm_Meristem_P Parameter: Plant Line Value: 35A19
  misc_feature: MA Experiment 108535 PARAMETER Experiment Name: Zm_Meristem_P Parameter: Tissue Value: Root Meristem vs. Above Root Meristem
  misc_feature: MA Experiment ID: 20000488 Result: Up-regulated in Transcription
  misc_feature: MA Experiment 20000488 PARAMETER Experiment Name: Zm_50mM_NH4NO3_L_to_H_P Parameter: Organism Value: Zea mays
  misc_feature: MA Experiment 20000488 PARAMETER Experiment Name: Zm_50mM_NH4NO3_L_to_H_P Parameter: Timepoint (hr) Value: 8
  misc_feature: MA Experiment 20000488 PARAMETER Experiment Name: Zm_50mM_NH4NO3_L_to_H_P Parameter: Tissue Value: Leaves
  misc_feature: MA Experiment 20000488 PARAMETER Experiment Name: Zm_50mM_NH4NO3_L_to_H_P Parameter: Treatment Value: 50mM NH4NO3 vs. 100mM Mannitol
  misc_feature: MA Experiment ID: 20001606 Result: Up-regulated in Transcription
  misc_feature: MA Experiment 20001606 PARAMETER Experiment Name: Zm_50ppm_KNO3_L-to-H_P Parameter: Age (day) Value: 19
  misc_feature: MA Experiment 20001606 PARAMETER Experiment Name: Zm_50ppm_KNO3_L-to-H_P Parameter: Organism Value: Zea mays
  misc_feature: MA Experiment 20001606 PARAMETER Experiment Name: Zm_50ppm_KNO3_L-to-H_P Parameter: Plant Line Value: 35A19
  misc_feature: MA Experiment 20001606 PARAMETER Experiment Name: Zm_50ppm_KNO3_L-to-H_P Parameter: Timepoint (hr) Value: 8
  misc_feature: MA Experiment 20001606 PARAMETER Experiment Name: Zm_50ppm_KNO3_L-to-H_P Parameter: Tissue Value: Shoots
  misc_feature: MA Experiment 20001606 PARAMETER Experiment Name: Zm_50ppm_KNO3_L-to-H_P Parameter: Treatment Value: 50ppm KNO3 vs. 50ppm KCl
  misc_feature: MA Experiment ID: 20001612 Result: Up-regulated in Transcription
  misc_feature: MA Experiment 20001612 PARAMETER Experiment Name: Zm_50ppm_KNO3_L-to-H_P Parameter: Age (day) Value: 19
  misc_feature: MA Experiment 20001612 PARAMETER Experiment Name: Zm_50ppm_KNO3_L-to-H_P Parameter: Organism Value: Zea mays
  misc_feature: MA Experiment 20001612 PARAMETER Experiment Name: Zm_50ppm_KNO3_L-to-H_P Parameter: Plant Line Value: 35A19
  misc_feature: MA Experiment 20001612 PARAMETER Experiment Name: Zm_50ppm_KNO3_L-to-H_P Parameter: Timepoint (hr) Value: 8
  misc_feature: MA Experiment 20001612 PARAMETER Experiment Name: Zm_50ppm_KNO3_L-to-H_P Parameter: Tissue Value: Roots
  misc_feature: MA Experiment 20001612 PARAMETER Experiment Name: Zm_50ppm_KNO3_L-to-H_P Parameter: Treatment Value: 50ppm KNO3 vs. 50ppm KCl

SEQ ID NO: 4270 - protein, 161 aa, Zea mays subsp. mays; identical to SEQ ID NO: 1700
  peptide (1)..(161): Ceres Seq. ID no. 12355958
  misc_feature (3)..(73): Pfam Name: Ribosomal protein L24e Pfam Description: Ribosomal protein L24e
  misc_feature (3)..(73): Pfam Name: Ribosomal protein L24e Pfam Description: Ribosomal protein L24e
  misc_feature (3)..(73): Pfam Name: Ribosomal protein L24e Pfam Description: Ribosomal protein L24e
  misc_feature (1)..(161): Homolog of NCBI NO: 1710521 NR Description: 60S RIBOSOMAL PROTEIN L24 >gi|7440778|pir||T06178
  misc_feature (4)..(161): Homolog of NCBI NO: 34900364 NR Description: putative 60S ribosomal protein L24 [Oryza sativa
  misc_feature (1)..(160): Homolog of NCBI NO: 6094040 NR Description: 60S ribosomal protein L24
  misc_feature (1)..(156): Homolog of NCBI NO: 10180025 NR Description: 60S ribosomal protein L24 [Prunus avium]
  misc_feature (1)..(161): Homolog of NCBI NO: 18404176 NR Description: 60S ribosomal protein L24; protein id: supported by cDNA: 14564., supported by cDNA: gi_16604375, by cDNA: gi_18252830 [Arabidopsis thaliana]
  misc_feature (4)..(161): Homolog of NCBI NO: 34900364 NR Description: putative 60S ribosomal protein L24 [Oryza sativa
  misc_feature (1)..(156): Homolog of NCBI NO: 10180025 NR Description: 60S ribosomal protein L24 [Prunus avium]
  misc_feature (1)..(160): Homolog of NCBI NO: 6094040 NR Description: 60S ribosomal protein L24
  misc_feature (4)..(161): Homolog of NCBI NO: 34900364 NR Description: putative 60S ribosomal protein L24 [Oryza sativa
  misc_feature (1)..(161): Homolog of NCBI NO: 1710521 NR Description: 60S RIBOSOMAL PROTEIN L24 >gi|7440778|pir||T06178
  misc_feature (10)..(154): Homolog of NCBI NO: 40741063 NR Description: conserved hypothetical protein [Aspergillus
  misc_feature (3)..(150): Homolog of NCBI NO: 19115030 NR Description: 60S ribosomal protein L24 [Schizosaccharomyces
  misc_feature (3)..(150): Homolog of NCBI NO: 19075214 NR Description: 60s ribosomal protein L24 [Schizosaccharomyces
  misc_feature (5)..(161): Homolog of NCBI NO: 25295112 NR Description: 60S ribosomal protein L24 [imported] -
  misc_feature (1)..(161): Homolog of NCBI NO: 15231730 NR Description: 60S ribosomal protein - like; protein id: supported by cDNA: gi_16648705, supported by cDNA: gi_20260561 thaliana] >gi|26454659|sp|P38666|RL24_ARATH 60S ribosomal protein
  misc_feature (1)..(161): Homolog of NCBI NO: 18404176 NR Description: 60S ribosomal protein L24; protein id: supported by cDNA: 14564., supported by cDNA: gi_16604375, by cDNA: gi_18252830 [Arabidopsis thaliana]
  misc_feature (10)..(154): Homolog of NCBI NO: 40741063 NR Description: conserved hypothetical protein [Aspergillus
  misc_feature (3)..(150): Homolog of NCBI NO: 19115030 NR Description: 60S ribosomal protein L24 [Schizosaccharomyces
  misc_feature (3)..(150): Homolog of NCBI NO: 19075214 NR Description: 60s ribosomal protein L24 [Schizosaccharomyces
  misc_feature (5)..(161): Homolog of NCBI NO: 25295112 NR Description: 60S ribosomal protein L24 [imported] -
  misc_feature (1)..(161): Homolog of NCBI NO: 15231730 NR Description: 60S ribosomal protein - like; protein id: supported by cDNA: gi_16648705, supported by cDNA: gi_20260561 thaliana] >gi|26454659|sp|P38666|RL24_ARATH 60S ribosomal protein
  misc_feature (1)..(161): Homolog of NCBI NO: 18404176 NR Description: 60S ribosomal protein L24; protein id: supported by cDNA: 14564., supported by cDNA: gi_16604375, by cDNA: gi_18252830 [Arabidopsis thaliana]
  misc_feature (1)..(156): Homolog of NCBI NO: 10180025 NR Description: 60S ribosomal protein L24 [Prunus avium]
  misc_feature (1)..(160): Homolog of NCBI NO: 6094040 NR Description: 60S ribosomal protein L24
  misc_feature (1)..(161): Homolog of NCBI NO: 1710521 NR Description: 60S RIBOSOMAL PROTEIN L24 >gi|7440778|pir||T06178
  misc_feature (1)..(161): Homolog of NCBI NO: 15231730 NR Description: 60S ribosomal protein - like; protein id: supported by cDNA: gi_16648705, supported by cDNA: gi_20260561 thaliana] >gi|26454659|sp|P38666|RL24_ARATH 60S ribosomal protein
  misc_feature (5)..(161): Homolog of NCBI NO: 25295112 NR Description: 60S ribosomal protein L24 [imported] -
  misc_feature (3)..(150): Homolog of NCBI NO: 19075214 NR Description: 60s ribosomal protein L24 [Schizosaccharomyces
  misc_feature (3)..(150): Homolog of NCBI NO: 19115030 NR Description: 60S ribosomal protein L24 [Schizosaccharomyces
  misc_feature (10)..(154): Homolog of NCBI NO: 40741063 NR Description: conserved hypothetical protein [Aspergillus

SEQ ID NO: 4271 - protein, 106 aa, Zea mays subsp. mays; identical to SEQ ID NO: 1701
  peptide (1)..(106): Ceres Seq. ID no. 12355959
  misc_feature (1)..(99): Homolog of NCBI NO: 40741063 NR Description: conserved hypothetical protein [Aspergillus
  misc_feature (1)..(106): Homolog of NCBI NO: 1710521 NR Description: 60S RIBOSOMAL PROTEIN L24 >gi|7440778|pir||T06178
  misc_feature (1)..(106): Homolog of NCBI NO: 34900364 NR Description: putative 60S ribosomal protein L24 [Oryza sativa
  misc_feature (1)..(105): Homolog of NCBI NO: 6094040 NR Description: 60S ribosomal protein L24
  misc_feature (1)..(101): Homolog of NCBI NO: 10180025 NR Description: 60S ribosomal protein L24 [Prunus avium]
  misc_feature (1)..(106): Homolog of NCBI NO: 18404176 NR Description: 60S ribosomal protein L24; protein id: supported by cDNA: 14564., supported by cDNA: gi_16604375, by cDNA: gi_18252830 [Arabidopsis thaliana]
  misc_feature (1)..(106): Homolog of NCBI NO: 15231730 NR Description: 60S ribosomal protein - like; protein id: supported by cDNA: gi_16648705, supported by cDNA: gi_20260561 thaliana] >gi|26454659|sp|P38666|RL24_ARATH 60S ribosomal protein
  misc_feature (1)..(106): Homolog of NCBI NO: 25295112 NR Description: 60S ribosomal protein L24 [imported] -
  misc_feature (1)..(95): Homolog of NCBI NO: 19075214 NR Description: 60s ribosomal protein L24 [Schizosaccharomyces
  misc_feature (1)..(95): Homolog of NCBI NO: 19115030 NR Description: 60S ribosomal protein L24 [Schizosaccharomyces
  misc_feature (1)..(106): Homolog of NCBI NO: 1710521 NR Description: 60S RIBOSOMAL PROTEIN L24 >gi|7440778|pir||T06178
  misc_feature (1)..(106): Homolog of NCBI NO: 34900364 NR Description: putative 60S ribosomal protein L24 [Oryza sativa
  misc_feature (1)..(105): Homolog of NCBI NO: 6094040 NR Description: 60S ribosomal protein L24
  misc_feature (1)..(101): Homolog of NCBI NO: 10180025 NR Description: 60S ribosomal protein L24 [Prunus avium]
  misc_feature (1)..(106): Homolog of NCBI NO: 18404176 NR Description: 60S ribosomal protein L24; protein id: supported by cDNA: 14564., supported by cDNA: gi_16604375, by cDNA: gi_18252830 [Arabidopsis thaliana]
  misc_feature (1)..(106): Homolog of NCBI NO: 15231730 NR Description: 60S ribosomal protein - like; protein id: supported by cDNA: gi_16648705, supported by cDNA: gi_20260561 thaliana] >gi|26454659|sp|P38666|RL24_ARATH 60S ribosomal protein
  misc_feature (1)..(106): Homolog of NCBI NO: 25295112 NR Description: 60S ribosomal protein L24 [imported] -
  misc_feature (1)..(95): Homolog of NCBI NO: 19075214 NR Description: 60s ribosomal protein L24 [Schizosaccharomyces
  misc_feature (1)..(95): Homolog of NCBI NO: 19115030 NR Description: 60S ribosomal protein L24 [Schizosaccharomyces
  misc_feature (1)..(99): Homolog of NCBI NO: 40741063 NR Description: conserved hypothetical protein [Aspergillus
  misc_feature (1)..(106): Homolog of NCBI NO: 1710521 NR Description: 60S RIBOSOMAL PROTEIN L24 >gi|7440778|pir||T06178
  misc_feature (1)..(106): Homolog of NCBI NO: 34900364 NR Description: putative 60S ribosomal protein L24 [Oryza sativa
  misc_feature (1)..(105): Homolog of NCBI NO: 6094040 NR Description: 60S ribosomal protein L24
  misc_feature (1)..(101): Homolog of NCBI NO: 10180025 NR Description: 60S ribosomal protein L24 [Prunus avium]
  misc_feature (1)..(106): Homolog of NCBI NO: 18404176 NR Description: 60S ribosomal protein L24; protein id: supported by cDNA: 14564., supported by cDNA: gi_16604375, by cDNA: gi_18252830 [Arabidopsis thaliana]
  misc_feature (1)..(106): Homolog of NCBI NO: 15231730 NR Description: 60S ribosomal protein - like; protein id: supported by cDNA: gi_16648705, supported by cDNA: gi_20260561 thaliana] >gi|26454659|sp|P38666|RL24_ARATH 60S ribosomal protein
  misc_feature (1)..(106): Homolog of NCBI NO: 25295112 NR Description: 60S ribosomal protein L24 [imported] -
  misc_feature (1)..(95): Homolog of NCBI NO: 19075214 NR Description: 60s ribosomal protein L24 [Schizosaccharomyces
  misc_feature (1)..(95): Homolog of NCBI NO: 19115030 NR Description: 60S ribosomal protein L24 [Schizosaccharomyces
  misc_feature (1)..(99): Homolog of NCBI NO: 40741063 NR Description: conserved hypothetical protein [Aspergillus

SEQ ID NO: 4272 - DNA, 1424 bp, Zea mays subsp. mays
  misc_feature (1)..(1424): Ceres Seq. ID no. 12365397
  misc_feature: MA Experiment ID: 108536 Result: Down-regulated in Transcription
  misc_feature: MA Experiment 108536 PARAMETER Experiment Name: Zm_Meristem_P Parameter: Age (day) Value: 8
  misc_feature: MA Experiment 108536 PARAMETER Experiment Name: Zm_Meristem_P Parameter: Organism Value: Zea mays
  misc_feature: MA Experiment 108536 PARAMETER Experiment Name: Zm_Meristem_P Parameter: Plant Line Value: 35A19
  misc_feature: MA Experiment 108536 PARAMETER Experiment Name: Zm_Meristem_P Parameter: Tissue Value: Shoot Meristem vs. Above Shoot Meristem
  misc_feature: MA Experiment ID: 108543 Result: Up-regulated in Transcription
  misc_feature: MA Experiment ID: 108556 Result: Down-regulated in Transcription
  misc_feature: MA Experiment 108556 PARAMETER Experiment Name: Zm_Drought_P Parameter: Age (day) Value: 9
  misc_feature: MA Experiment 108556 PARAMETER Experiment Name: Zm_Drought_P Parameter: Organism Value: Zea mays
  misc_feature: MA Experiment 108556 PARAMETER Experiment Name: Zm_Drought_P Parameter: Plant Line Value: 35A19
  misc_feature: MA Experiment 108556 PARAMETER Experiment Name: Zm_Drought_P Parameter: Timepoint (hr) Value: 24
  misc_feature: MA Experiment 108556 PARAMETER Experiment Name: Zm_Drought_P Parameter: Tissue Value: Aerial
  misc_feature: MA Experiment 108556 PARAMETER Experiment Name: Zm_Drought_P Parameter: Treatment Value: Drought vs. No Drought
  misc_feature: MA Experiment ID: 20000477 Result: Down-regulated in Transcription
  misc_feature: MA Experiment 20000477 PARAMETER Experiment Name: Zm_5mM_SA_P Parameter: Age (day) Value: 10
  misc_feature: MA Experiment 20000477 PARAMETER Experiment Name: Zm_5mM_SA_P Parameter: Organism Value: Zea mays
  misc_feature: MA Experiment 20000477 PARAMETER Experiment Name: Zm_5mM_SA_P Parameter: Plant Line Value: 35A19
  misc_feature: MA Experiment 20000477 PARAMETER Experiment Name: Zm_5mM_SA_P Parameter: Timepoint (hr) Value: 48
  misc_feature: MA Experiment 20000477 PARAMETER Experiment Name: Zm_5mM_SA_P Parameter: Tissue Value: Aerial
  misc_feature: MA Experiment 20000477 PARAMETER Experiment Name: Zm_5mM_SA_P Parameter: Treatment Value: 5mM SA vs. No Treatment
  misc_feature: MA Experiment ID: 20000478 Result: Down-regulated in Transcription
  misc_feature: MA Experiment 20000478 PARAMETER Experiment Name: Zm_5mM_SA_P Parameter: Age (day) Value: 11
  misc_feature: MA Experiment 20000478 PARAMETER Experiment Name: Zm_5mM_SA_P Parameter: Organism Value: Zea mays
  misc_feature: MA Experiment 20000478 PARAMETER Experiment Name: Zm_5mM_SA_P Parameter: Plant Line Value: 35A19
  misc_feature: MA Experiment 20000478 PARAMETER Experiment Name: Zm_5mM_SA_P Parameter: Timepoint (hr) Value: 72
  misc_feature: MA Experiment 20000478 PARAMETER Experiment Name: Zm_5mM_SA_P Parameter: Tissue Value: Aerial
  misc_feature: MA Experiment 20000478 PARAMETER Experiment Name: Zm_5mM_SA_P Parameter: Treatment Value: 5mM SA vs. No Treatment
  misc_feature: MA Experiment ID: 20000479 Result: Down-regulated in Transcription
  misc_feature: MA Experiment 20000479 PARAMETER Experiment Name: Zm_Drought_P Parameter: Age (day) Value: 10
  misc_feature: MA Experiment 20000479 PARAMETER Experiment Name: Zm_Drought_P Parameter: Organism Value: Zea mays
  misc_feature: MA Experiment 20000479 PARAMETER Experiment Name: Zm_Drought_P Parameter: Plant Line Value: 35A19
  misc_feature: MA Experiment 20000479 PARAMETER Experiment Name: Zm_Drought_P Parameter: Timepoint (hr) Value: 48
  misc_feature: MA Experiment 20000479 PARAMETER Experiment Name: Zm_Drought_P Parameter: Tissue Value: Aerial
  misc_feature: MA Experiment 20000479 PARAMETER Experiment Name: Zm_Drought_P Parameter: Treatment Value: Drought vs. No Drought
  misc_feature: MA Experiment ID: 20000480 Result: Down-regulated in Transcription
  misc_feature: MA Experiment 20000480 PARAMETER Experiment Name: Zm_Drought_P Parameter: Age (day) Value: 11
  misc_feature: MA Experiment 20000480 PARAMETER Experiment Name: Zm_Drought_P Parameter: Organism Value: Zea mays
  misc_feature: MA Experiment 20000480 PARAMETER Experiment Name: Zm_Drought_P Parameter: Plant Line Value: 35A19
  misc_feature: MA Experiment 20000480 PARAMETER Experiment Name: Zm_Drought_P Parameter: Timepoint (hr) Value: 72
  misc_feature: MA Experiment 20000480 PARAMETER Experiment Name: Zm_Drought_P Parameter: Tissue Value: Aerial
  misc_feature: MA Experiment 20000480 PARAMETER Experiment Name: Zm_Drought_P Parameter: Treatment Value: Drought vs. No Drought
  misc_feature: MA Experiment ID: 20000492 Result: Down-regulated in Transcription
  misc_feature: MA Experiment 20000492 PARAMETER Experiment Name: Zm_Hybrid_Seed_Dev_P Parameter: DAP Value: 12
  misc_feature: MA Experiment 20000492 PARAMETER Experiment Name: Zm_Hybrid_Seed_Dev_P Parameter: Organism Value: Zea mays
  misc_feature: MA Experiment 20000492 PARAMETER Experiment Name: Zm_Hybrid_Seed_Dev_P Parameter: Plant Line Value: 35A19
  misc_feature: MA Experiment 20000492 PARAMETER Experiment Name: Zm_Hybrid_Seed_Dev_P Parameter: Tissue Value: Fert Kernel vs. Unfert Floret
  misc_feature: MA Experiment ID: 20001613 Result: Down-regulated in Transcription
  misc_feature: MA Experiment 20001613 PARAMETER Experiment Name: Zm_50ppm_KNO3_L-to-H_P Parameter: Age (day) Value: 20
  misc_feature: MA Experiment 20001613 PARAMETER Experiment Name: Zm_50ppm_KNO3_L-to-H_P Parameter: Organism Value: Zea mays
  misc_feature: MA Experiment 20001613 PARAMETER Experiment Name: Zm_50ppm_KNO3_L-to-H_P Parameter: Plant Line Value: 35A19
  misc_feature: MA Experiment 20001613 PARAMETER Experiment Name: Zm_50ppm_KNO3_L-to-H_P Parameter: Timepoint (hr) Value: 24
  misc_feature: MA Experiment 20001613 PARAMETER Experiment Name: Zm_50ppm_KNO3_L-to-H_P Parameter: Tissue Value: Roots
  misc_feature: MA Experiment 20001613 PARAMETER Experiment Name: Zm_50ppm_KNO3_L-to-H_P Parameter: Treatment Value: 50ppm KNO3 vs. 50ppm KCl
  misc_feature: MA Experiment ID: 20001614 Result: Down-regulated in Transcription
  misc_feature: MA Experiment 20001614 PARAMETER Experiment Name: Zm_50ppm_KNO3_L-to-H_P Parameter: Age (day) Value: 21
  misc_feature: MA Experiment 20001614 PARAMETER Experiment Name: Zm_50ppm_KNO3_L-to-H_P Parameter: Organism Value: Zea mays
  misc_feature: MA Experiment 20001614 PARAMETER Experiment Name: Zm_50ppm_KNO3_L-to-H_P Parameter: Plant Line Value: 35A19
  misc_feature: MA Experiment 20001614 PARAMETER Experiment Name: Zm_50ppm_KNO3_L-to-H_P Parameter: Timepoint (hr) Value: 48
  misc_feature: MA Experiment 20001614 PARAMETER Experiment Name: Zm_50ppm_KNO3_L-to-H_P Parameter: Tissue Value: Roots
  misc_feature: MA Experiment 20001614 PARAMETER Experiment Name: Zm_50ppm_KNO3_L-to-H_P Parameter: Treatment Value: 50ppm KNO3 vs. 50ppm KCl
aaactttcgcaccaccaactcacactgaccgcaacttcccaacaatctcggtccctccctccctcctccctaaactccccagcaacccgcggccgagccccgtagtccgtgcaccagttgtctcgcgtcgtcgtcgtcgccggggcctgcagcctgcaggcagcgacctagctaggaacgggtgacatggcgcgtgcggcggcgtcggtggccgcggcgctgctcgtcgtgctcggcgtggcagcgtcggtggcgacggcgcagatggagacctgcagcggcgacctcccacccgtgctcgccgccaactactccggcctggcctgccagcctgtctggaacaacttcgtgctccggtaccaccaggacaaggacaacgtgctgcgggtggtgctgtccacgatgtacagcacggggtgggtgggcatggggttctccagggacggcctcatggtcggctccagcgccatggtggggtggatcggcaagaaggggctcccccacgtccggcagttcgcgctgcggggcaagagcagctccaaggtggtggtcgaccgtggcttcctcgtttccaacgaccacgaccacactgtcgtggtgcagcaggccaagatctacctcgccttccagctcaggttctcctaccgcctcacccaccagcacatcgtcatggccttcggcaacagcatccccgtcaagaacaggctcaccaggcaccaggacaagacctccttcaccttcgatttcacaacgggcagagcttcggtggacgggtccttcccatacggcctgcggcgtgcgcacggcgcgctgaacgtgttcgcgtggggagtcctgctgcccatcggcgccatcctggcgcgctacttccggcggatggacccgctctggttctacctccacgtgggcgtccagctcgccggcttcatcatcggcctggccggcgtcgtcgccggggtggcgctgtacaacaagatccaggccgacatccccgcgcacagggggctcggcgtcttcgtcctcttcctcggcatcctgcaggtgctggccttcttcctgcgccccagcgccgactccaagtaccgcaagtactggaactggtaccaccactgggcgggcaggctggcgctcttcttcgccgccgtcaacatcgtgctcgggatccacgtcggcggcgccgacagctcatggaagatcggatacggcttcagcctggccgtcctcctcgtcgccgtcgccgcgctcgagttcatgctgtggacgaggtggtccaagaacagcaccgccaccccgacgtactaggaacctgctgctgcacgtaccttgttgtttttccggggtcggatgatgttttgtgtttgcctttgaccttgtttttttttgttgttggtggtggtggtgtatctatatgatatatcctttgg

SEQ ID NO: 4273 - protein, 371 aa, Zea mays subsp. mays
  peptide (1)..(371): Ceres Seq. ID no. 12365398
  misc_feature (53)..(165): Pfam Name: DOMON domain Pfam Description: DOMON domain
  misc_feature (13)..(371): Homolog of NCBI NO: 24414270 NR Description: Putative membrane protein [Oryza sativa (japonica
  misc_feature (75)..(370): Homolog of NCBI NO: 18421491 NR Description: Expressed protein
  misc_feature (203)..(360): Homolog of NCBI NO: 34907596 NR Description: B1078G07.39 [Oryza sativa (japonica
  misc_feature (15)..(196): Homolog of NCBI NO: 34907596 NR Description: B1078G07.39 [Oryza sativa (japonica
  misc_feature (6)..(371): Homolog of NCBI NO: 34907602 NR Description: B1078G07.42 [Oryza sativa (japonica
  misc_feature (1)..(354): Homolog of NCBI NO: 21740784 NR Description: OSJNBa0067K08.25 [Oryza sativa (japonica
  misc_feature (5)..(354): Homolog of NCBI NO: 30680365 NR Description: auxin-induced protein-related [Arabidopsis
  misc_feature (5)..(363): Homolog of NCBI NO: 6466940 NR Description: unknown protein [Arabidopsis thaliana]
  misc_feature (34)..(371): Homolog of NCBI NO: 15233202 NR Description: putative protein; protein id: At3g61750.1
  misc_feature (9)..(371): Homolog of NCBI NO: 34911180 NR Description: P0019E03.5 [Oryza sativa (japonica
MARAAASVAAALLVVLGVAASVATAQMETCSGDLPPVLAANYSGLACQPVWNNFVLRYHQDKDNVLRVVLSTMYSTGWVGMGFSRDGLMVGSSAMVGWIGKKGLPHVRQFALRGKSSSKVVVDRGFLVSNDHDHTVVVQQAKIYLAFQLRFSYRLTHQHIVMAFGNSIPVKNRLTRHQDKTSFTFDFTTGRASVDGSFPYGLRRAHGALNVFAWGVLLPIGAILARYFRRMDPLWFYLHVGVQLAGFIIGLAGVVAGVALYNKIQADIPAHRGLGVFVLFLGILQVLAFFLRPSADSKYRKYWNWYHHWAGRLALFFAAVNIVLGIHVGGADSSWKIGYGFSLAVLLVAVAALEFMLWTRWSKNSTATPTY

SEQ ID NO: 4274 - protein, 345 aa, Zea mays subsp. mays
  peptide (1)..(345): Ceres Seq. ID no. 12365399
  misc_feature (27)..(139): Pfam Name: DOMON domain Pfam Description: DOMON domain
  misc_feature (1)..(345): Homolog of NCBI NO: 24414270 NR Description: Putative membrane protein [Oryza sativa (japonica
  misc_feature (49)..(344): Homolog of NCBI NO: 18421491 NR Description: Expressed protein
  misc_feature (177)..(334): Homolog of NCBI NO: 34907596 NR Description: B1078G07.39 [Oryza sativa (japonica
  misc_feature (1)..(170): Homolog of NCBI NO: 34907596 NR Description: B1078G07.39 [Oryza sativa (japonica
  misc_feature (1)..(345): Homolog of NCBI NO: 34907602 NR Description: B1078G07.42 [Oryza sativa (japonica
  misc_feature (1)..(328): Homolog of NCBI NO: 21740784 NR Description: OSJNBa0067K08.25 [Oryza sativa (japonica
  misc_feature (1)..(328): Homolog of NCBI NO: 30680365 NR Description: auxin-induced protein-related [Arabidopsis
  misc_feature (1)..(337): Homolog of NCBI NO: 6466940 NR Description: unknown protein [Arabidopsis thaliana]
  misc_feature (8)..(345): Homolog of NCBI NO: 15233202 NR Description: putative protein; protein id: At3g61750.1
  misc_feature (1)..(345): Homolog of NCBI NO: 34911180 NR Description: P0019E03.5 [Oryza sativa (japonica
METCSGDLPPVLAANYSGLACQPVWNNFVLRYHQDKDNVLRVVLSTMYSTGWVGMGFSRDGLMVGSSAMVGWIGKKGLPHVRQFALRGKSSSKVVVDRGFLVSNDHDHTVVVQQAKIYLAFQLRFSYRLTHQHIVMAFGNSIPVKNRLTRHQDKTSFTFDFTTGRASVDGSFPYGLRRAHGALNVFAWGVLLPIGAILARYFRRMDPLWFYLHVGVQLAGFIIGLAGVVAGVALYNKIQADIPAHRGLGVFVLFLGILQVLAFFLRPSADSKYRKYWNWYHHWAGRLALFFAAVNIVLGIHVGGADSSWKIGYGFSLAVLLVAVAALEFMLWTRWSKNSTATPTY

SEQ ID NO: 4275 - protein, 299 aa, Zea mays subsp. mays
  peptide (1)..(299): Ceres Seq. ID no. 12365400
  misc_feature (1)..(93): Pfam Name: DOMON domain Pfam Description: DOMON domain
  misc_feature (1)..(299): Homolog of NCBI NO: 24414270 NR Description: Putative membrane protein [Oryza sativa (japonica
  misc_feature (3)..(298): Homolog of NCBI NO: 18421491 NR Description: Expressed protein
  misc_feature (131)..(288): Homolog of NCBI NO: 34907596 NR Description: B1078G07.39 [Oryza sativa (japonica
  misc_feature (1)..(124): Homolog of NCBI NO: 34907596 NR Description: B1078G07.39 [Oryza sativa (japonica
  misc_feature (1)..(299): Homolog of NCBI NO: 34907602 NR Description: B1078G07.42 [Oryza sativa (japonica
  misc_feature (1)..(282): Homolog of NCBI NO: 21740784 NR Description: OSJNBa0067K08.25 [Oryza sativa (japonica
  misc_feature (1)..(282): Homolog of NCBI NO: 30680365 NR Description: auxin-induced protein-related [Arabidopsis
  misc_feature (1)..(291): Homolog of NCBI NO: 6466940 NR Description: unknown protein [Arabidopsis thaliana]
  misc_feature (1)..(299): Homolog of NCBI NO: 15233202 NR Description: putative protein; protein id: At3g61750.1
  misc_feature (1)..(299): Homolog of NCBI NO: 34911180 NR Description: P0019E03.5 [Oryza sativa (japonica
MYSTGWVGMGFSRDGLMVGSSAMVGWIGKKGLPHVRQFALRGKSSSKVVVDRGFLVSNDHDHTVVVQQAKIYLAFQLRFSYRLTHQHIVMAFGNSIPVKNRLTRHQDKTSFTFDFTTGRASVDGSFPYGLRRAHGALNVFAWGVLLPIGAILARYFRRMDPLWFYLHVGVQLAGFIIGLAGVVAGVALYNKIQADIPAHRGLGVFVLFLGILQVLAFFLRPSADSKYRKYWNWYHHWAGRLALFFAAVNIVLGIHVGGADSSWKIGYGFSLAVLLVAVAALEFMLWTRWSKNSTATPTY

SEQ ID NO: 4276 - DNA, 1344 bp, Zea mays subsp. mays
  misc_feature (1)..(1344): Ceres Seq. ID no. 12347927
  misc_feature: MA Experiment ID: 108527 Result: Up-regulated in Transcription
  misc_feature: MA Experiment 108527 PARAMETER Experiment Name: Zm_5mM_NO_P Parameter: Age (day) Value: 8
  misc_feature: MA Experiment 108527 PARAMETER Experiment Name: Zm_5mM_NO_P Parameter: Organism Value: Zea mays
  misc_feature: MA Experiment 108527 PARAMETER Experiment Name: Zm_5mM_NO_P Parameter: Plant Line Value: 35A19
  misc_feature: MA Experiment 108527 PARAMETER Experiment Name: Zm_5mM_NO_P Parameter: Timepoint (hr) Value: 6
  misc_feature: MA Experiment 108527 PARAMETER Experiment Name: Zm_5mM_NO_P Parameter: Tissue Value: Aerial
  misc_feature: MA Experiment 108527 PARAMETER Experiment Name: Zm_5mM_NO_P Parameter: Treatment Value: 5mM NO vs. No Treatment
  misc_feature: MA Experiment ID: 108535 Result: Down-regulated in Transcription
  misc_feature: MA Experiment 108535 PARAMETER Experiment Name: Zm_Meristem_P Parameter: Age (day) Value: 8
  misc_feature: MA Experiment 108535 PARAMETER Experiment Name: Zm_Meristem_P Parameter: Organism Value: Zea mays
  misc_feature: MA Experiment 108535 PARAMETER Experiment Name: Zm_Meristem_P Parameter: Plant Line Value: 35A19
  misc_feature: MA Experiment 108535 PARAMETER Experiment Name: Zm_Meristem_P Parameter: Tissue Value: Root Meristem vs. Above Root Meristem
  misc_feature: MA Experiment ID: 108543 Result: Down-regulated in Transcription
  misc_feature: MA Experiment ID: 108689 Result: Up-regulated in Transcription
  misc_feature: MA Experiment 108689 PARAMETER Experiment Name: Zm_Drought_Roots_P Parameter: Age (day) Value: 9
  misc_feature: MA Experiment 108689 PARAMETER Experiment Name: Zm_Drought_Roots_P Parameter: Organism Value: Zea mays
  misc_feature: MA Experiment 108689 PARAMETER Experiment Name: Zm_Drought_Roots_P Parameter: Plant Line Value: 35A19
  misc_feature: MA Experiment 108689 PARAMETER Experiment Name: Zm_Drought_Roots_P Parameter: Timepoint (hr) Value: 24
  misc_feature: MA Experiment 108689 PARAMETER Experiment Name: Zm_Drought_Roots_P Parameter: Tissue Value: Roots
  misc_feature: MA Experiment 108689 PARAMETER Experiment Name: Zm_Drought_Roots_P Parameter: Treatment Value: Drought vs. No Drought
  misc_feature: MA Experiment ID: 20000478 Result: Up-regulated in Transcription
  misc_feature: MA Experiment 20000478 PARAMETER Experiment Name: Zm_5mM_SA_P Parameter: Age (day) Value: 11
  misc_feature: MA Experiment 20000478 PARAMETER Experiment Name: Zm_5mM_SA_P Parameter: Organism Value: Zea mays
  misc_feature: MA Experiment 20000478 PARAMETER Experiment Name: Zm_5mM_SA_P Parameter: Plant Line Value: 35A19
  misc_feature: MA Experiment 20000478 PARAMETER Experiment Name: Zm_5mM_SA_P Parameter: Timepoint (hr) Value: 72
  misc_feature: MA Experiment 20000478 PARAMETER Experiment Name: Zm_5mM_SA_P Parameter: Tissue Value: Aerial
  misc_feature: MA Experiment 20000478 PARAMETER Experiment Name: Zm_5mM_SA_P Parameter: Treatment Value: 5mM SA vs. No Treatment
  misc_feature: MA Experiment ID: 20000479 Result: Up-regulated in Transcription
  misc_feature: MA Experiment 20000479 PARAMETER Experiment Name: Zm_Drought_P Parameter: Age (day) Value: 10
  misc_feature: MA Experiment 20000479 PARAMETER Experiment Name: Zm_Drought_P Parameter: Organism Value: Zea mays
  misc_feature: MA Experiment 20000479 PARAMETER Experiment Name: Zm_Drought_P Parameter: Plant Line Value: 35A19
  misc_feature: MA Experiment 20000479 PARAMETER Experiment Name: Zm_Drought_P Parameter: Timepoint (hr) Value: 48
  misc_feature: MA Experiment 20000479 PARAMETER Experiment Name: Zm_Drought_P Parameter: Tissue Value: Aerial
  misc_feature: MA Experiment 20000479 PARAMETER Experiment Name: Zm_Drought_P Parameter: Treatment Value: Drought vs. No Drought
  misc_feature: MA Experiment ID: 20000480 Result: Up-regulated in Transcription
  misc_feature: MA Experiment 20000480 PARAMETER Experiment Name: Zm_Drought_P Parameter: Age (day) Value: 11
  misc_feature: MA Experiment 20000480 PARAMETER Experiment Name: Zm_Drought_P Parameter: Organism Value: Zea mays
  misc_feature: MA Experiment 20000480 PARAMETER Experiment Name: Zm_Drought_P Parameter: Plant Line Value: 35A19
  misc_feature: MA Experiment 20000480 PARAMETER Experiment Name: Zm_Drought_P Parameter: Timepoint (hr) Value: 72
  misc_feature: MA Experiment 20000480 PARAMETER Experiment Name: Zm_Drought_P Parameter: Tissue Value: Aerial
  misc_feature: MA Experiment 20000480 PARAMETER Experiment Name: Zm_Drought_P Parameter: Treatment Value: Drought vs. No Drought
  misc_feature: MA Experiment ID: 20000535 Result: Down-regulated in Transcription
  misc_feature: MA Experiment 20000535 PARAMETER Experiment Name: Zm_Hybrid_Seed_Dev_P Parameter: DAP Value: 30 vs. 12
  misc_feature: MA Experiment 20000535 PARAMETER Experiment Name: Zm_Hybrid_Seed_Dev_P Parameter: Organism Value: Zea mays
  misc_feature: MA Experiment 20000535 PARAMETER Experiment Name: Zm_Hybrid_Seed_Dev_P Parameter: Plant Line Value: 35A19
  misc_feature: MA Experiment 20000535 PARAMETER Experiment Name: Zm_Hybrid_Seed_Dev_P Parameter: Tissue Value: Embryo vs. Unfert Floret
actcgaaaagaaaactagccgggcacgttacgctcaccaccataccgtcccacgcggcctccccaactaaccctatcccccggcgaccgggaactgcaaccgatggaccgcctcgtcgtcttctcccgccgccgccgccgctggatcctcctcgctgcggccggtgcggcggcggccgtcggcgcgtacaagatctaccaccaccctgccgtcgcggaacgtcgccgccgcctcgtgcgcctagccgccgccatcgcggccttcgctgatgccgccgcatcatccgccgacgccgtggccctggtgacatccgatctcgccgactttgtccgttccgacgcggacgaggtcccccgcagcgtcaagcagctggccaagctcgcctcctcccctgaggtatccgccaccgtctccaccctatccgaggcagtaacctccgggatcctccgcgggtcgggatcctctagctccgggcccgcatccggcggtaccgtggccctctccgatcgtctcgtagacaggctcttctctgactcaggcgagcgcctcgcgtccgcggttgccggcagcttcgcccgccatctcgtcctcgccttttactccgctccttcaccacaaggggaggcgtcctcctccccgacgatgtgggtcaacgtggttgcgactggaaagtgccggaaggcgataagcaactgggttgaggtcttcgtggggactgctgtgagggagttcattgacaagaccatccacatcaacacctacgagcagctcttcgaagggctcaccaatccgagacatgacgctaaggtcaaggaattgcttgtttcagtgtgcaatgctgcggttgagactttggtgaagaccactcaccatgccctgtacagtactaatggcaacttgggtgcaaatggtagtgtcagtggcaatgccaatgaagctggggaagggtgggtggagacggtgtcgagctcgttggcagttcctagcaacaggaagtttgtgcttgatgttacagggagggtcacatttgagacagtgcggtcatttctggagtttgttctttggaagctgcaggatggggcaaggaagggcggtggctccgtggttgacagtggcctccgtgtcgtgaggtatatgagcgataagtcgatggttatcgccacaatctgtattacgttgtgcttgcatgtgttgaatgggactaggctcttggtaacagcctaatagtgtacttgtttggttttcctattttttgcacattgtttgtgtaaaactgtaggaatcatactgaaactgtaaatccaaaaggaatggaaataatagaaataacatgaattgtgctgt

SEQ ID NO: 4277 - protein, 373 aa, Zea mays subsp. mays
  peptide (1)..(373): Ceres Seq. ID no. 12347928
  misc_feature (172)..(366): Homolog of NCBI NO: 18391117 NR Description: expressed protein
  misc_feature (1)..(262): Homolog of NCBI NO: 21554418 NR Description: unknown [Arabidopsis thaliana]
  misc_feature (1)..(262): Homolog of NCBI NO: 18391117 NR Description: expressed protein
  misc_feature (17)..(371): Homolog of NCBI NO: 37530342 NR Description: hypothetical protein [Oryza sativa (japonica
  misc_feature (7)..(370): Homolog of NCBI NO: 15229610 NR Description: putative protein; protein id: At3g49790.1
  misc_feature (9)..(365): Homolog of NCBI NO: 18406365 NR Description: expressed protein
  misc_feature (9)..(365): Homolog of NCBI NO: 14475940 NR Description: unknown protein [Arabidopsis thaliana]
  misc_feature (9)..(365): Homolog of NCBI NO: 21553547 NR Description: unknown [Arabidopsis thaliana]
  misc_feature (1)..(370): Homolog of NCBI NO: 22093613 NR Description: hypothetical protein~similar to Arabidopsis
  misc_feature (1)..(373): Homolog of NCBI NO: 40539064 NR Description: expressed protein [Oryza sativa (japonica
MDRLVVFSRRRRRWILLAAAGAAAAVGAYKIYHHPAVAERRRRLVRLAAAIAAFADAAASSADAVALVTSDLADFVRSDADEVPRSVKQLAKLASSPEVSATVSTLSEAVTSGILRGSGSSSSGPASGGTVALSDRLVDRLFSDSGERLASAVAGSFARHLVLAFYSAPSPQGEASSSPTMWVNVVATGKCRKAISNWVEVFVGTAVREFIDKTIHINTYEQLFEGLTNPRHDAKVKELLVSVCNAAVETLVKTTHHALYSTNGNLGANGSVSGNANEAGEGWVETVSSSLAVPSNRKFVLDVTGRVTFETVRSFLEFVLWKLQDGARKGGGSVVDSGLRVVRYMSDKSMVIATICITLCLHVLNGTRLLVTA

SEQ ID NO: 4278 - protein, 193 aa, Zea mays subsp. mays
  peptide (1)..(193): Ceres Seq. ID no. 12347929
  misc_feature (1)..(186): Homolog of NCBI NO: 18391117 NR Description: expressed protein
  misc_feature (1)..(82): Homolog of NCBI NO: 21554418 NR Description: unknown [Arabidopsis thaliana]
  misc_feature (1)..(82): Homolog of NCBI NO: 18391117 NR Description: expressed protein
  misc_feature (1)..(191): Homolog of NCBI NO: 37530342 NR Description: hypothetical protein [Oryza sativa (japonica
  misc_feature (1)..(190): Homolog of NCBI NO: 15229610 NR Description: putative protein; protein id: At3g49790.1
  misc_feature (1)..(185): Homolog of NCBI NO: 18406365 NR Description: expressed protein
  misc_feature (1)..(185): Homolog of NCBI NO: 14475940 NR Description: unknown protein [Arabidopsis thaliana]
  misc_feature (1)..(185): Homolog of NCBI NO: 21553547 NR Description: unknown [Arabidopsis thaliana]
  misc_feature (1)..(190): Homolog of NCBI NO: 22093613 NR Description: hypothetical protein~similar to Arabidopsis
  misc_feature (1)..(193): Homolog of NCBI NO: 40539064 NR Description: expressed protein [Oryza sativa (japonica
MWVNVVATGKCRKAISNWVEVFVGTAVREFIDKTIHINTYEQLFEGLTNPRHDAKVKELLVSVCNAAVETLVKTTHHALYSTNGNLGANGSVSGNANEAGEGWVETVSSSLAVPSNRKFVLDVTGRVTFETVRSFLEFVLWKLQDGARKGGGSVVDSGLRVVRYMSDKSMVIATICITLCLHVLNGTRLLVTA

SEQ ID NO: 4279 - DNA, 1428 bp, Zea mays subsp. mays
  misc_feature (1)..(1428): Ceres Seq. ID no. 12434949
  misc_feature: MA Experiment ID: 108504 Result: Up-regulated in Transcription
  misc_feature: MA Experiment 108504 PARAMETER Experiment Name: Zm_Drought_P Parameter: Age (day) Value: 8
  misc_feature: MA Experiment 108504 PARAMETER Experiment Name: Zm_Drought_P Parameter: Organism Value: Zea mays
  misc_feature: MA Experiment 108504 PARAMETER Experiment Name: Zm_Drought_P Parameter: Plant Line Value: 35A19
  misc_feature: MA Experiment 108504 PARAMETER Experiment Name: Zm_Drought_P Parameter: Timepoint (hr) Value: 12
  misc_feature: MA Experiment 108504 PARAMETER Experiment Name: Zm_Drought_P Parameter: Tissue Value: Aerial
  misc_feature: MA Experiment 108504 PARAMETER Experiment Name: Zm_Drought_P Parameter: Treatment Value: Drought vs. No Drought
  misc_feature: MA Experiment ID: 108529 Result: Up-regulated in Transcription
  misc_feature: MA Experiment 108529 PARAMETER Experiment Name: Zm_Imbibed_Seeds_P Parameter: Age (day) Value: 5 vs. 2
  misc_feature: MA Experiment 108529 PARAMETER Experiment Name: Zm_Imbibed_Seeds_P Parameter: Organism Value: Zea mays
  misc_feature: MA Experiment 108529 PARAMETER Experiment Name: Zm_Imbibed_Seeds_P Parameter: Plant Line Value: 35A19
  misc_feature: MA Experiment 108529 PARAMETER Experiment Name: Zm_Imbibed_Seeds_P Parameter: Tissue Value: Roots vs. Embryo
  misc_feature: MA Experiment ID: 108533 Result: Down-regulated in Transcription
  misc_feature: MA Experiment 108533 PARAMETER Experiment Name: Zm_4deg_Cold_P Parameter: Age (hr) Value: 8
  misc_feature: MA Experiment 108533 PARAMETER Experiment Name: Zm_4deg_Cold_P Parameter: Organism Value: Zea mays
  misc_feature: MA Experiment 108533 PARAMETER Experiment Name: Zm_4deg_Cold_P Parameter: Plant Line Value: 35A19
  misc_feature: MA Experiment 108533 PARAMETER Experiment Name: Zm_4deg_Cold_P Parameter: Temperature (deg C) Value: 4 vs. 22
  misc_feature: MA Experiment 108533 PARAMETER Experiment Name: Zm_4deg_Cold_P Parameter: Timepoint (hr) Value: 1
  misc_feature: MA Experiment 108533 PARAMETER Experiment Name: Zm_4deg_Cold_P Parameter: Tissue Value: Aerial
  misc_feature: MA Experiment ID: 108535 Result: Down-regulated in Transcription
  misc_feature: MA Experiment 108535 PARAMETER Experiment Name: Zm_Meristem_P Parameter: Age (day) Value: 8
  misc_feature: MA Experiment 108535 PARAMETER Experiment Name: Zm_Meristem_P Parameter: Organism Value: Zea mays
  misc_feature: MA Experiment 108535 PARAMETER Experiment Name: Zm_Meristem_P Parameter: Plant Line Value: 35A19
  misc_feature: MA Experiment 108535 PARAMETER Experiment Name: Zm_Meristem_P Parameter: Tissue Value: Root Meristem vs. Above Root Meristem
  misc_feature: MA Experiment ID: 108539 Result: Up-regulated in Transcription
  misc_feature: MA Experiment 108539 PARAMETER Experiment Name: Zm_20percent_PEG_P Parameter: Age (day) Value: 8
  misc_feature: MA Experiment 108539 PARAMETER Experiment Name: Zm_20percent_PEG_P Parameter: Organism Value: Zea mays
  misc_feature: MA Experiment 108539 PARAMETER Experiment Name: Zm_20percent_PEG_P Parameter: Plant Line Value: 35A19
  misc_feature: MA Experiment 108539 PARAMETER Experiment Name: Zm_20percent_PEG_P Parameter: Timepoint (hr) Value: 1
  misc_feature: MA Experiment 108539 PARAMETER Experiment Name: Zm_20percent_PEG_P Parameter: Tissue Value: Aerial
  misc_feature: MA Experiment 108539 PARAMETER Experiment Name: Zm_20percent_PEG_P Parameter: Treatment Value: 20percent PEG vs. No Treatment
  misc_feature: MA Experiment ID: 108543 Result: Up-regulated in Transcription
  misc_feature: MA Experiment ID: 108544 Result: Up-regulated in Transcription
  misc_feature: MA Experiment ID: 108545 Result: Down-regulated in Transcription
  misc_feature: MA Experiment 108545 PARAMETER Experiment Name: Zm_Imbibed_Seeds_P Parameter: Age (day) Value: 3 vs. 2
  misc_feature: MA Experiment 108545 PARAMETER Experiment Name: Zm_Imbibed_Seeds_P Parameter: Organism Value: Zea mays
  misc_feature: MA Experiment 108545 PARAMETER Experiment Name: Zm_Imbibed_Seeds_P Parameter: Plant Line Value: 35A19
  misc_feature: MA Experiment 108545 PARAMETER Experiment Name: Zm_Imbibed_Seeds_P Parameter: Tissue Value: Aerial vs. Embryo
  misc_feature: MA Experiment ID: 108546 Result: Up-regulated in Transcription
  misc_feature: MA Experiment 108546 PARAMETER Experiment Name: Zm_Imbibed_Seeds_P Parameter: Age (day) Value: 3 vs. 2
  misc_feature: MA Experiment 108546 PARAMETER Experiment Name: Zm_Imbibed_Seeds_P Parameter: Organism Value: Zea mays
  misc_feature: MA Experiment 108546 PARAMETER Experiment Name: Zm_Imbibed_Seeds_P Parameter: Plant Line Value: 35A19
  misc_feature: MA Experiment 108546 PARAMETER Experiment Name: Zm_Imbibed_Seeds_P Parameter: Tissue Value: Roots vs. Embryo
  misc_feature: MA Experiment ID: 108556 Result: Up-regulated in Transcription
  misc_feature: MA Experiment 108556 PARAMETER Experiment Name: Zm_Drought_P Parameter: Age (day) Value: 9
  misc_feature: MA Experiment 108556 PARAMETER Experiment Name: Zm_Drought_P Parameter: Organism Value: Zea mays
  misc_feature: MA Experiment 108556 PARAMETER Experiment Name: Zm_Drought_P Parameter: Plant Line Value: 35A19
  misc_feature: MA Experiment 108556 PARAMETER Experiment Name: Zm_Drought_P Parameter: Timepoint (hr) Value: 24
  misc_feature: MA Experiment 108556 PARAMETER Experiment Name: Zm_Drought_P Parameter: Tissue Value: Aerial
  misc_feature: MA Experiment 108556 PARAMETER Experiment Name: Zm_Drought_P Parameter: Treatment Value: Drought vs. No Drought
  misc_feature: MA Experiment ID: 108599 Result: Up-regulated in Transcription
  misc_feature: MA Experiment 108599 PARAMETER Experiment Name: Zm_RT1_P Parameter: Age (day) Value: 11
  misc_feature: MA Experiment 108599 PARAMETER Experiment Name: Zm_RT1_P Parameter: Organism Value: Zea mays
  misc_feature: MA Experiment 108599 PARAMETER Experiment Name: Zm_RT1_P Parameter: Plant Line Value: rt1 mut vs. rt1 wt
  misc_feature: MA Experiment 108599 PARAMETER Experiment Name: Zm_RT1_P Parameter: Tissue Value: Roots
  misc_feature: MA Experiment ID: 108689 Result: Up-regulated in Transcription
  misc_feature: MA Experiment 108689 PARAMETER Experiment Name: Zm_Drought_Roots_P Parameter: Age (day) Value: 9
  misc_feature: MA Experiment 108689 PARAMETER Experiment Name: Zm_Drought_Roots_P Parameter: Organism Value: Zea mays
  misc_feature: MA Experiment 108689 PARAMETER Experiment Name: Zm_Drought_Roots_P Parameter: Plant Line Value: 35A19
  misc_feature: MA Experiment 108689 PARAMETER Experiment Name: Zm_Drought_Roots_P Parameter: Timepoint (hr) Value: 24
  misc_feature: MA Experiment 108689 PARAMETER Experiment Name: Zm_Drought_Roots_P Parameter: Tissue Value: Roots
  misc_feature: MA Experiment 108689 PARAMETER Experiment Name: Zm_Drought_Roots_P Parameter: Treatment Value: Drought vs. No Drought
  misc_feature: MA Experiment ID: 20000108 Result: Down-regulated in Transcription
  misc_feature: MA Experiment 20000108 PARAMETER Experiment Name: Zm_Root-Tips_P Parameter: Age (day) Value: 12
  misc_feature: MA Experiment 20000108 PARAMETER Experiment Name: Zm_Root-Tips_P Parameter: Organism Value: Zea mays
  misc_feature: MA Experiment 20000108 PARAMETER Experiment Name: Zm_Root-Tips_P Parameter: Tissue Value: Root tips vs. Root mid region    35
  misc_feature: MA Experiment 20000108 PARAMETER Experiment Name: Zm_Root-Tips_P Parameter: Tissue Value: Root tips vs. Root mid region   Sequence Listing-Misc Features (4)
  misc_feature: MA Experiment ID: 20000477 Result: Up-regulated in Transcription
  misc_feature: MA Experiment 20000477 PARAMETER Experiment Name: Zm_5mM_SA_P Parameter: Age (day) Value: 10
  misc_feature: MA Experiment 20000477 PARAMETER Experiment Name: Zm_5mM_SA_P Parameter: Organism Value: Zea mays
  misc_feature: MA Experiment 20000477 PARAMETER Experiment Name: Zm_5mM_SA_P Parameter: Plant Line Value: 35A19
  misc_feature: MA Experiment 20000477 PARAMETER Experiment Name: Zm_5mM_SA_P Parameter: Timepoint (hr) Value: 48
  misc_feature: MA Experiment 20000477 PARAMETER Experiment Name: Zm_5mM_SA_P Parameter: Tissue Value: Aerial
  misc_feature: MA Experiment 20000477 PARAMETER Experiment Name: Zm_5mM_SA_P Parameter: Treatment Value: 5mM SA vs. No Treatment
  misc_feature: MA Experiment ID: 20000478 Result: Up-regulated in Transcription
  misc_feature: MA Experiment 20000478 PARAMETER Experiment Name: Zm_5mM_SA_P Parameter: Age (day) Value: 11
  misc_feature: MA Experiment 20000478 PARAMETER Experiment Name: Zm_5mM_SA_P Parameter: Organism Value: Zea mays
  misc_feature: MA Experiment 20000478 PARAMETER Experiment Name: Zm_5mM_SA_P Parameter: Plant Line Value: 35A19
  misc_feature: MA Experiment 20000478 PARAMETER Experiment Name: Zm_5mM_SA_P Parameter: Timepoint (hr) Value: 72
  misc_feature: MA Experiment 20000478 PARAMETER Experiment Name: Zm_5mM_SA_P Parameter: Tissue Value: Aerial
  misc_feature: MA Experiment 20000478 PARAMETER Experiment Name: Zm_5mM_SA_P Parameter: Treatment Value: 5mM SA vs. No Treatment
  misc_feature: MA Experiment ID: 20000480 Result: Up-regulated in Transcription
  misc_feature: MA Experiment 20000480 PARAMETER Experiment Name: Zm_Drought_P Parameter: Age (day) Value: 11
  misc_feature: MA Experiment 20000480 PARAMETER Experiment Name: Zm_Drought_P Parameter: Organism Value: Zea mays
  misc_feature: MA Experiment 20000480 PARAMETER Experiment Name: Zm_Drought_P Parameter: Plant Line Value: 35A19
  misc_feature: MA Experiment 20000480 PARAMETER Experiment Name: Zm_Drought_P Parameter: Timepoint (hr) Value: 72
  misc_feature: MA Experiment 20000480 PARAMETER Experiment Name: Zm_Drought_P Parameter: Tissue Value: Aerial
  misc_feature: MA Experiment 20000480 PARAMETER Experiment Name: Zm_Drought_P Parameter: Treatment Value: Drought vs. No Drought
  misc_feature: MA Experiment ID: 20000492 Result: Down-regulated in Transcription
  misc_feature: MA Experiment 20000492 PARAMETER Experiment Name: Zm_Hybrid_Seed_Dev_P Parameter: DAP Value: 12
  misc_feature: MA Experiment 20000492 PARAMETER Experiment Name: Zm_Hybrid_Seed_Dev_P Parameter: Organism Value: Zea mays
  misc_feature: MA Experiment 20000492 PARAMETER Experiment Name: Zm_Hybrid_Seed_Dev_P Parameter: Plant Line Value: 35A19
  misc_feature: MA Experiment 20000492 PARAMETER Experiment Name: Zm_Hybrid_Seed_Dev_P Parameter: Tissue Value: Fert Kernel vs. Unfert Floret
  misc_feature: MA Experiment ID: 20000535 Result: Down-regulated in Transcription
  misc_feature: MA Experiment 20000535 PARAMETER Experiment Name: Zm_Hybrid_Seed_Dev_P Parameter: DAP Value: 30 vs. 12
  misc_feature: MA Experiment 20000535 PARAMETER Experiment Name: Zm_Hybrid_Seed_Dev_P Parameter: Organism Value: Zea mays
  misc_feature: MA Experiment 20000535 PARAMETER Experiment Name: Zm_Hybrid_Seed_Dev_P Parameter: Plant Line Value: 35A19
  misc_feature: MA Experiment 20000535 PARAMETER Experiment Name: Zm_Hybrid_Seed_Dev_P Parameter: Tissue Value: Embryo vs. Unfert Floret
gcacgagaccattacctagaacatcctaatcaaaagccaaggaaaggaaacacaattcagcagcacacgcaccaccaaaaagagggagaagagtcttcgcctcgcggagagacgtgctgcctagcataatatatagccacgaaatagagtgctgggtctagctatagctaactagccagcagcagcagcagcgtgcgtgcgttcaaggcagcagaggtagagaggttttgagagagaatggcaagcaggcaaggtgtagccgcctccatgttcgccacggcattgctcctcggcgtctttgcatccatcccacaaagtgctgaggccatcggcgtatgctacggcatgagcgccaacaacctgccggcggcgagcacggtggtgagcatgtacaaggcgaacggcatctcggcgatgcggctgtacgcgccggaccagggcgcgctgcaggcggtgggcggcacgggcatcagcgtggccgtgggcgcccccaacgacgtgctgtcgaacatcgcggctagccccgcggcggccgcgtcgtgggtgcgcaacaacatccaggcgtacccgtccgtgtcgttccgctacgtgtgcgtgggcaacgaggtggccggcggcgcggcgcaggacctggcgccggccatggagaacgtgcacgcggcgctggcggcggccgggctgggccacatcaaggtgacgacgtcggtgtcgcaggccatcctgggcgtgtacagcccgccgtccgccgcggagttcaccggcgaggcgcgcgggtacatgggccccgtgctgcagttcctggcccgcaccgggtcgccgctcatggccaacatctacccgtacctggcctgggcatacaaccccagcgccatggacatgagctacgcgctcttcacctcctccggcaccgtcgtgcaggacggcgcctacgggtaccagaacctcttcgacaccaccgtcgacgccttctacgtcgccatgggaaagaacggcggctccggcgtgccgctcgtggtgtcggagagcgggtggccgtccggcggcggcgtccaggccacgccggccaacgcgagggtgtacaaccagtacctcatcaaccacgtcggccgcgggacgccgcgccaccccggcgccatcgagacctacctcttctccatgttcaacgagaaccagaaggagagcggcgtggagcagaactgggggctcttctaccccaacatgcagcacgtctgccccatcagcttctgaagaaccgttaaccgtaccgatccaagctagctgctagctggccctggaccctggtggtggctccgaccgacgacggacgacgacgatcgacctgcagccgtatgtgtcgatccggccggccgtatacggatagtacgtagcatgtatgtatatatatggtatatgtgggcttgctttgcg

SEQ ID NO: 4280 - protein, 336 aa, Zea mays subsp. mays
  peptide (1)..(336): Ceres Seq. ID no. 12434950
  misc_feature (31)..(336): Pfam Name: Glycosyl hydrolases family 17 Pfam Description: Glycosyl hydrolases family 17
  misc_feature (25)..(336): Homolog of NCBI NO: 224995 NR Description: glucan glucohydrolase
  misc_feature (25)..(336): Homolog of NCBI NO: 121773 NR Description: LICHENASE II PRECURSOR (ENDO-BETA-1,3-1,4
  misc_feature (1)..(336): Homolog of NCBI NO: 854361 NR Description: beta-glucanase [Oryza sativa (japonica
  misc_feature (23)..(336): Homolog of NCBI NO: 100592 NR Description: licheninase (EC 3.2.1.73) isoenzyme EIb precursor
  misc_feature (1)..(336): Homolog of NCBI NO: 13249140 NR Description: glucanase [Oryza sativa]
  misc_feature (29)..(336): Homolog of NCBI NO: 840908 NR Description: beta glucanase [Triticum aestivum]
  misc_feature (1)..(336): Homolog of NCBI NO: 228411 NR Description: beta glucanase:ISOTYPE=II
  misc_feature (5)..(336): Homolog of NCBI NO: 100591 NR Description: licheninase (EC 3.2.1.73) I precursor, splice
  misc_feature (1)..(336): Homolog of NCBI NO: 288654 NR Description: (1-3, 1-4)-beta-glucanase [Avena sativa]
  misc_feature (1)..(336): Homolog of NCBI NO: 486849 NR Description: licheninase (EC 3.2.1.73) precursor - wheat
MASRQGVAASMFATALLLGVFASIPQSAEAIGVCYGMSANNLPAASTVVSMYKANGISAMRLYAPDQGALQAVGGTGISVAVGAPNDVLSNIAASPAAAASWVRNNIQAYPSVSFRYVCVGNEVAGGAAQDLAPAMENVHAALAAAGLGHIKVTTSVSQAILGVYSPPSAAEFTGEARGYMGPVLQFLARTGSPLMANIYPYLAWAYNPSAMDMSYALFTSSGTVVQDGAYGYQNLFDTTVDAFYVAMGKNGGSGVPLVVSESGWPSGGGVQATPANARVYNQYLINHVGRGTPRHPGAIETYLFSMFNENQKESGVEQNWGLFYPNMQHVCPISF

SEQ ID NO: 4281 - protein, 326 aa, Zea mays subsp. mays
  peptide (1)..(326): Ceres Seq. ID no. 12434951
  misc_feature (21)..(326): Pfam Name: Glycosyl hydrolases family 17 Pfam Description: Glycosyl hydrolases family 17
  misc_feature (1)..(326): Homolog of NCBI NO: 288654 NR Description: (1-3, 1-4)-beta-glucanase [Avena sativa]
  misc_feature (15)..(326): Homolog of NCBI NO: 224995 NR Description: glucan glucohydrolase
  misc_feature (1)..(326): Homolog of NCBI NO: 854361 NR Description: beta-glucanase [Oryza sativa (japonica
  misc_feature (1)..(326): Homolog of NCBI NO: 13249140 NR Description: glucanase [Oryza sativa]
  misc_feature (1)..(326): Homolog of NCBI NO: 228411 NR Description: beta glucanase:ISOTYPE=II
  misc_feature (1)..(326): Homolog of NCBI NO: 100591 NR Description: licheninase (EC 3.2.1.73) I precursor, splice
  misc_feature (19)..(326): Homolog of NCBI NO: 840908 NR Description: beta glucanase [Triticum aestivum]
  misc_feature (13)..(326): Homolog of NCBI NO: 100592 NR Description: licheninase (EC 3.2.1.73) isoenzyme EIb precursor
  misc_feature (15)..(326): Homolog of NCBI NO: 121773 NR Description: LICHENASE II PRECURSOR (ENDO-BETA-1,3-1,4
  misc_feature (1)..(326): Homolog of NCBI NO: 486849 NR Description: licheninase (EC 3.2.1.73) precursor - wheat
MFATALLLGVFASIPQSAEAIGVCYGMSANNLPAASTVVSMYKANGISAMRLYAPDQGALQAVGGTGISVAVGAPNDVLSNIAASPAAAASWVRNNIQAYPSVSFRYVCVGNEVAGGAAQDLAPAMENVHAALAAAGLGHIKVTTSVSQAILGVYSPPSAAEFTGEARGYMGPVLQFLARTGSPLMANIYPYLAWAYNPSAMDMSYALFTSSGTVVQDGAYGYQNLFDTTVDAFYVAMGKNGGSGVPLVVSESGWPSGGGVQATPANARVYNQYLINHVGRGTPRHPGAIETYLFSMFNENQKESGVEQNWGLFYPNMQHVCPISF

SEQ ID NO: 4282 - protein, 300 aa, Zea mays subsp. mays
  peptide (1)..(300): Ceres Seq. ID no. 12434952
  misc_feature (1)..(300): Pfam Name: Glycosyl hydrolases family 17 Pfam Description: Glycosyl hydrolases family 17
  misc_feature (1)..(300): Homolog of NCBI NO: 224995 NR Description: glucan glucohydrolase
  misc_feature (1)..(300): Homolog of NCBI NO: 121773 NR Description: LICHENASE II PRECURSOR (ENDO-BETA-1,3-1,4
  misc_feature (1)..(300): Homolog of NCBI NO: 854361 NR Description: beta-glucanase [Oryza sativa (japonica
  misc_feature (1)..(300): Homolog of NCBI NO: 100592 NR Description: licheninase (EC 3.2.1.73) isoenzyme EIb precursor
  misc_feature (1)..(300): Homolog of NCBI NO: 13249140 NR Description: glucanase [Oryza sativa]
  misc_feature (1)..(300): Homolog of NCBI NO: 840908 NR Description: beta glucanase [Triticum aestivum]
  misc_feature (1)..(300): Homolog of NCBI NO: 228411 NR Description: beta glucanase:ISOTYPE=II
  misc_feature (1)..(300): Homolog of NCBI NO: 100591 NR Description: licheninase (EC 3.2.1.73) I precursor, splice
  misc_feature (1)..(300): Homolog of NCBI NO: 288654 NR Description: (1-3, 1-4)-beta-glucanase [Avena sativa]
  misc_feature (1)..(300): Homolog of NCBI NO: 486849 NR Description: licheninase (EC 3.2.1.73) precursor - wheat
MSANNLPAASTVVSMYKANGISAMRLYAPDQGALQAVGGTGISVAVGAPNDVLSNIAASPAAAASWVRNNIQAYPSVSFRYVCVGNEVAGGAAQDLAPAMENVHAALAAAGLGHIKVTTSVSQAILGVYSPPSAAEFTGEARGYMGPVLQFLARTGSPLMANIYPYLAWAYNPSAMDMSYALFTSSGTVVQDGAYGYQNLFDTTVDAFYVAMGKNGGSGVPLVVSESGWPSGGGVQATPANARVYNQYLINHVGRGTPRHPGAIETYLFSMFNENQKESGVEQNWGLFYPNMQHVCPISF

SEQ ID NO: 4283 - DNA, 1592 bp, Zea mays subsp. mays
  misc_feature (1)..(1592): Ceres Seq. ID no. 12365401
  misc_feature: MA Experiment ID: 108528 Result: Down-regulated in Transcription
  misc_feature: MA Experiment 108528 PARAMETER Experiment Name: Zm_Imbibed_Seeds_P Parameter: Age (day) Value: 5 vs. 2
  misc_feature: MA Experiment 108528 PARAMETER Experiment Name: Zm_Imbibed_Seeds_P Parameter: Organism Value: Zea mays
  misc_feature: MA Experiment 108528 PARAMETER Experiment Name: Zm_Imbibed_Seeds_P Parameter: Plant Line Value: 35A19
  misc_feature: MA Experiment 108528 PARAMETER Experiment Name: Zm_Imbibed_Seeds_P Parameter: Tissue Value: Aerial vs. Embryo
  misc_feature: MA Experiment ID: 108535 Result: Down-regulated in Transcription
  misc_feature: MA Experiment 108535 PARAMETER Experiment Name: Zm_Meristem_P Parameter: Age (day) Value: 8
  misc_feature: MA Experiment 108535 PARAMETER Experiment Name: Zm_Meristem_P Parameter: Organism Value: Zea mays
  misc_feature: MA Experiment 108535 PARAMETER Experiment Name: Zm_Meristem_P Parameter: Plant Line Value: 35A19
  misc_feature: MA Experiment 108535 PARAMETER Experiment Name: Zm_Meristem_P Parameter: Tissue Value: Root Meristem vs. Above Root Meristem
  misc_feature: MA Experiment ID: 108543 Result: Up-regulated in Transcription
  misc_feature: MA Experiment ID: 20000488 Result: Down-regulated in Transcription
  misc_feature: MA Experiment 20000488 PARAMETER Experiment Name: Zm_50mM_NH4NO3_L_to_H_P Parameter: Organism Value: Zea mays
  misc_feature: MA Experiment 20000488 PARAMETER Experiment Name: Zm_50mM_NH4NO3_L_to_H_P Parameter: Timepoint (hr) Value: 8
  misc_feature: MA Experiment 20000488 PARAMETER Experiment Name: Zm_50mM_NH4NO3_L_to_H_P Parameter: Tissue Value: Leaves
  misc_feature: MA Experiment 20000488 PARAMETER Experiment Name: Zm_50mM_NH4NO3_L_to_H_P Parameter: Treatment Value: 50mM NH4NO3 vs. 100mM Mannitol
  misc_feature: MA Experiment ID: 20000535 Result: Down-regulated in Transcription
  misc_feature: MA Experiment 20000535 PARAMETER Experiment Name: Zm_Hybrid_Seed_Dev_P Parameter: DAP Value: 30 vs. 12
  misc_feature: MA Experiment 20000535 PARAMETER Experiment Name: Zm_Hybrid_Seed_Dev_P Parameter: Organism Value: Zea mays
  misc_feature: MA Experiment 20000535 PARAMETER Experiment Name: Zm_Hybrid_Seed_Dev_P Parameter: Plant Line Value: 35A19
  misc_feature: MA Experiment 20000535 PARAMETER Experiment Name: Zm_Hybrid_Seed_Dev_P Parameter: Tissue Value: Embryo vs. Unfert Floret
aaagccagcattgctgcatgccagcatccacgtagcatctgaggctctgagctcatggttcagatagcagcggtgaagcggatgaaggggcgggccccgctgtcagtggtggtggcaatcatcggcgggctggctctcgcgggcgtcatcttcaccgacgacctccgctcacttactgagatcatggagaagaaggggaaagcgaaggagcacaagaggacgacgtctctacatgccgggacgaggacgaggaagatgccgctaacgccgccgccgccgccgcagccggcgaaggcagcgttcgacccgagccggtgcagcgtgacggagggctactgggcgtacaacaggtccaaggagctgctttacacggaccaaacatgcccgttcatcgacaggcaggtctcttgccagaggaacggcaggccggacagcgactacctgcgctgggattggcacctagacgactgcagtctcccaaggttcgacccggtggcgttgctggagacgctgcgggggaagcggatgatgttcgttggcgactcgctgcagatggggcagtggctctccatggtctgcctcgtcaactccgccgtgccctacaccgcgcggtccatggagcgcagcaccaccctgtccgtcttcaccgccacggagtacaacgcgacgatcgagttctactgggcgccgtacctggtggaggccaactccgaccgcaacatccggctgggggccgacggccgcgtgctccacgtcgacgccgtcgagctgcacgctaggcactggaagggcgtggacatcctcgtcttcgacagctacgtgtggtggatgaccggcagcaggatcaaatcagtgtgggggtcgttcggggacgacgggtacgaggagctggacgcctgggtcgcgttccggcttggactcaagacatgggccaactgggtggacgccaacatcgatcccaacgccacaagggtcttcttcatgtcgatctccaccacgcacatgaggagcgaggactggggccgggagggcggcatacggtgccacaacgagacgtggcccgtcacgcggaaggggtactggggcagcggcgcggaccggcggatgatggaggtgatgtccgacgtggtgggccggatgcgggtgcccgtcacgctgctcaacgtcacgcagctcacggagcaccgcgtcgacgcccacgtctccgtgtacaccgagaccggcggcgagctgctcaccgacgcgcagagggccgacccgcagacgcacacggactgcatccactggtgcgtgcccggcgtgccggacacgtggaaccagatcctctacgcgcacttgtagcagcaggttcggtcacagtcacagccgcgagaacgaacaacggggacacgtaccgaaatccagctgggaataattttagttacggtaggtcgtcgtccggccgagttcaattcagacatgatagatccagttcaaatcatcgctcggacagaaaatgcctgagcttgtactgctctgctttgtcacacaggcagagcgcgtcacgcacgcttgctcacacacatacaatacacacggacacaccttttcct

SEQ ID NO: 4284 - protein, 428 aa, Zea mays subsp. mays
  peptide (1)..(428): Ceres Seq. ID no. 12365402
  misc_feature (258)..(428): Pfam Name: Arabidopsis proteins of unknown function Pfam Description: Arabidopsis proteins of unknown function
  misc_feature (85)..(428): Homolog of NCBI NO: 18405283 NR Description: expressed protein
  misc_feature (71)..(428): Homolog of NCBI NO: 28393743 NR Description: unknown protein [Arabidopsis thaliana]
  misc_feature (75)..(428): Homolog of NCBI NO: 28876013 NR Description: unknown protein [Oryza sativa (japonica
  misc_feature (88)..(428): Homolog of NCBI NO: 15219382 NR Description: hypothetical protein; protein id: At1g73140.1
  misc_feature (85)..(428): Homolog of NCBI NO: 26452343 NR Description: unknown protein [Arabidopsis thaliana]
  misc_feature (85)..(428): Homolog of NCBI NO: 15228789 NR Description: putative protein; protein id: At3g55990.1
  misc_feature (69)..(428): Homolog of NCBI NO: 15228429 NR Description: unknown protein; protein id: At3g11030.1
  misc_feature (13)..(143): Homolog of NCBI NO: 11291874 NR Description: hypothetical protein T10O8.70 - Arabidopsis
  misc_feature (201)..(428): Homolog of NCBI NO: 11291874 NR Description: hypothetical protein T10O8.70 - Arabidopsis
  misc_feature (13)..(428): Homolog of NCBI NO: 18412850 NR Description: putative protein
MVQIAAVKRMKGRAPLSVVVAIIGGLALAGVIFTDDLRSLTEIMEKKGKAKEHKRTTSLHAGTRTRKMPLTPPPPPQPAKAAFDPSRCSVTEGYWAYNRSKELLYTDQTCPFIDRQVSCQRNGRPDSDYLRWDWHLDDCSLPRFDPVALLETLRGKRMMFVGDSLQMGQWLSMVCLVNSAVPYTARSMERSTTLSVFTATEYNATIEFYWAPYLVEANSDRNIRLGADGRVLHVDAVELHARHWKGVDILVFDSYVWWMTGSRIKSVWGSFGDDGYEELDAWVAFRLGLKTWANWVDANIDPNATRVFFMSISTTHMRSEDWGREGGIRCHNETWPVTRKGYWGSGADRRMMEVMSDVVGRMRVPVTLLNVTQLTEHRVDAHVSVYTETGGELLTDAQRADPQTHTDCIHWCVPGVPDTWNQILYAHL

SEQ ID NO: 4285 - protein, 419 aa, Zea mays subsp. mays
  peptide (1)..(419): Ceres Seq. ID no. 12365403
  misc_feature (249)..(419): Pfam Name: Arabidopsis proteins of unknown function Pfam Description: Arabidopsis proteins of unknown function
  misc_feature (76)..(419): Homolog of NCBI NO: 18405283 NR Description: expressed protein
  misc_feature (62)..(419): Homolog of NCBI NO: 28393743 NR Description: unknown protein [Arabidopsis thaliana]
  misc_feature (66)..(419): Homolog of NCBI NO: 28876013 NR Description: unknown protein [Oryza sativa (japonica
  misc_feature (79)..(419): Homolog of NCBI NO: 15219382 NR Description: hypothetical protein; protein id: At1g73140.1
  misc_feature (76)..(419): Homolog of NCBI NO: 26452343 NR Description: unknown protein [Arabidopsis thaliana]
  misc_feature (76)..(419): Homolog of NCBI NO: 15228789 NR Description: putative protein; protein id: At3g55990.1
  misc_feature (60)..(419): Homolog of NCBI NO: 15228429 NR Description: unknown protein; protein id: At3g11030.1
  misc_feature (4)..(134): Homolog of NCBI NO: 11291874 NR Description: hypothetical protein T10O8.70 - Arabidopsis
  misc_feature (192)..(419): Homolog of NCBI NO: 11291874 NR Description: hypothetical protein T10O8.70 - Arabidopsis
  misc_feature (4)..(419): Homolog of NCBI NO: 18412850 NR Description: putative protein
MKGRAPLSVVVAIIGGLALAGVIFTDDLRSLTEIMEKKGKAKEHKRTTSLHAGTRTRKMPLTPPPPPQPAKAAFDPSRCSVTEGYWAYNRSKELLYTDQTCPFIDRQVSCQRNGRPDSDYLRWDWHLDDCSLPRFDPVALLETLRGKRMMFVGDSLQMGQWLSMVCLVNSAVPYTARSMERSTTLSVFTATEYNATIEFYWAPYLVEANSDRNIRLGADGRVLHVDAVELHARHWKGVDILVFDSYVWWMTGSRIKSVWGSFGDDGYEELDAWVAFRLGLKTWANWVDANIDPNATRVFFMSISTTHMRSEDWGREGGIRCHNETWPVTRKGYWGSGADRRMMEVMSDVVGRMRVPVTLLNVTQLTEHRVDAHVSVYTETGGELLTDAQRADPQTHTDCIHWCVPGVPDTWNQILYAHL

SEQ ID NO: 4286 - protein, 385 aa, Zea mays subsp. mays
  peptide (1)..(385): Ceres Seq. ID no. 12365404
  misc_feature (215)..(385): Pfam Name: Arabidopsis proteins of unknown function Pfam Description: Arabidopsis proteins of unknown function
  misc_feature (42)..(385): Homolog of NCBI NO: 18405283 NR Description: expressed protein
  misc_feature (28)..(385): Homolog of NCBI NO: 28393743 NR Description: unknown protein [Arabidopsis thaliana]
  misc_feature (32)..(385): Homolog of NCBI NO: 28876013 NR Description: unknown protein [Oryza sativa (japonica
  misc_feature (45)..(385): Homolog of NCBI NO: 15219382 NR Description: hypothetical protein; protein id: At1g73140.1
  misc_feature (42)..(385): Homolog of NCBI NO: 26452343 NR Description: unknown protein [Arabidopsis thaliana]
  misc_feature (42)..(385): Homolog of NCBI NO: 15228789 NR Description: putative protein; protein id: At3g55990.1
  misc_feature (26)..(385): Homolog of NCBI NO: 15228429 NR Description: unknown protein; protein id: At3g11030.1
  misc_feature (1)..(100): Homolog of NCBI NO: 11291874 NR Description: hypothetical protein T10O8.70 - Arabidopsis
  misc_feature (158)..(385): Homolog of NCBI NO: 11291874 NR Description: hypothetical protein T10O8.70 - Arabidopsis
  misc_feature (1)..(385): Homolog of NCBI NO: 18412850 NR Description: putative protein
MEKKGKAKEHKRTTSLHAGTRTRKMPLTPPPPPQPAKAAFDPSRCSVTEGYWAYNRSKELLYTDQTCPFIDRQVSCQRNGRPDSDYLRWDWHLDDCSLPRFDPVALLETLRGKRMMFVGDSLQMGQWLSMVCLVNSAVPYTARSMERSTTLSVFTATEYNATIEFYWAPYLVEANSDRNIRLGADGRVLHVDAVELHARHWKGVDILVFDSYVWWMTGSRIKSVWGSFGDDGYEELDAWVAFRLGLKTWANWVDANIDPNATRVFFMSISTTHMRSEDWGREGGIRCHNETWPVTRKGYWGSGADRRMMEVMSDVVGRMRVPVTLLNVTQLTEHRVDAHVSVYTETGGELLTDAQRADPQTHTDCIHWCVPGVPDTWNQILYAHL

SEQ ID NO: 4287 - DNA, 1372 bp, Zea mays subsp. mays
  misc_feature (1)..(1372): Ceres Seq. ID no. 12345991
  misc_feature: MA Experiment ID: 108689 Result: Up-regulated in Transcription
  misc_feature: MA Experiment 108689 PARAMETER Experiment Name: Zm_Drought_Roots_P Parameter: Age (day) Value: 9
  misc_feature: MA Experiment 108689 PARAMETER Experiment Name: Zm_Drought_Roots_P Parameter: Organism Value: Zea mays
  misc_feature: MA Experiment 108689 PARAMETER Experiment Name: Zm_Drought_Roots_P Parameter: Plant Line Value: 35A19
  misc_feature: MA Experiment 108689 PARAMETER Experiment Name: Zm_Drought_Roots_P Parameter: Timepoint (hr) Value: 24
  misc_feature: MA Experiment 108689 PARAMETER Experiment Name: Zm_Drought_Roots_P Parameter: Tissue Value: Roots
  misc_feature: MA Experiment 108689 PARAMETER Experiment Name: Zm_Drought_Roots_P Parameter: Treatment Value: Drought vs. No Drought
  misc_feature: MA Experiment ID: 20000492 Result: Up-regulated in Transcription
  misc_feature: MA Experiment 20000492 PARAMETER Experiment Name: Zm_Hybrid_Seed_Dev_P Parameter: DAP Value: 12
  misc_feature: MA Experiment 20000492 PARAMETER Experiment Name: Zm_Hybrid_Seed_Dev_P Parameter: Organism Value: Zea mays
  misc_feature: MA Experiment 20000492 PARAMETER Experiment Name: Zm_Hybrid_Seed_Dev_P Parameter: Plant Line Value: 35A19
  misc_feature: MA Experiment 20000492 PARAMETER Experiment Name: Zm_Hybrid_Seed_Dev_P Parameter: Tissue Value: Fert Kernel vs. Unfert Floret
  misc_feature: MA Experiment ID: 20000535 Result: Up-regulated in Transcription
  misc_feature: MA Experiment 20000535 PARAMETER Experiment Name: Zm_Hybrid_Seed_Dev_P Parameter: DAP Value: 30 vs. 12
  misc_feature: MA Experiment 20000535 PARAMETER Experiment Name: Zm_Hybrid_Seed_Dev_P Parameter: Organism Value: Zea mays
  misc_feature: MA Experiment 20000535 PARAMETER Experiment Name: Zm_Hybrid_Seed_Dev_P Parameter: Plant Line Value: 35A19
  misc_feature: MA Experiment 20000535 PARAMETER Experiment Name: Zm_Hybrid_Seed_Dev_P Parameter: Tissue Value: Embryo vs. Unfert Floret
gtgcgtgcgttacccgcgctcgagacaaggcgttgtctcactctcatcatccgtgcagtgctggacgatcgcttcttgtccccgtctcggcttctcgcctcttcggcggcagcggggcatcgattgcaatggacgcgcccttcttccacgagctcaggcggcaggcctcctcctacctgaccggcaagatccgctccgcgcggctggcgctcaccgacgtcaccccgacgcagctcttgacggaggaggcgacgaacggggacgcgtcgccgccgaacgtcaggacgatggggcgcatagcccggcaggcgttcgacgtcgacgagtacgtcaggatcacgggcgtcctgcacgggcgcctcgcgagcttcgaccgcaggcagtggcgggaggcgtacaaggcgctcctcctcctcgagcacctcctcacgcacgggccccgcagcgtcgcggtggagttccacaaggacagggaggccatcgaccggatggccaccttccaacacgtcgacgagaaaggcttcaactggggcctgacggtgaggagcaagtcggagcgcgtgctcaagctgctggagcgcggcccgttcctggaggaggagcgcgagcgggcgcgcaagatcgcgcgcgagatcacgggcttcggcagcttcagcctcagcgcaggcgcctcccaccacgccgtgtcgcagtcgcagccacccggtgacgacgggaaccgcggcgacggccggagcagctccaagcgcgaggagcggcagaggcacgacgacggcggccgattcgggcggagccactcgcagttcgaggagcggtggtggaagcacaaggacggtgacgacggcgacaaggagaatctgatacagagcccggagccgacagcacgggtcgcgccgcgggaagtggatgcggaggcggaggaggaggagctgcaccaccaccagctccatccgttccacgggttggggcaaaaacagcggccggaggcgacgctgctcctgagccagtgacgggatcagtcggttcgtgtcatggtgacgtgaaaagaaccgtgtgcttttctcccttcctccaaggctgcagggtcagtattttactgacactgcttggtgcatcaggcatctcatgcgccatgaatggccgcttgcttggcctcgtaaaatttctttccttcagttcggaacttcggatgccagaatgtactagagaccaccacatacaggcatgtctcaagcttccagtaactctctagaaaccacgtattctaggagtgcgagaatgggatcctcctgcccaagtgcagctgtgctaatcttttactctgaacctgtgaaccatctactgaaggaaagcaaaaggcagtagttattcc

SEQ ID NO: 4288 - protein, 335 aa, Zea mays subsp. mays
  peptide (1)..(335): Ceres Seq. ID no. 12345992
  misc_feature (73)..(173): Pfam Name: ENTH domain Pfam Description: ENTH domain
  misc_feature (62)..(282): Homolog of NCBI NO: 24648991 NR Description: CG31170-PA [Drosophila melanogaster]
  misc_feature (43)..(79): Homolog of NCBI NO: 7485982 NR Description: hypothetical protein F22O13.16 - Arabidopsis
  misc_feature (123)..(218): Homolog of NCBI NO: 7485982 NR Description: hypothetical protein F22O13.16 - Arabidopsis
  misc_feature (43)..(231): Homolog of NCBI NO: 11994320 NR Description: gene_id:MLM24.8~unknown protein [Arabidopsis
  misc_feature (43)..(218): Homolog of NCBI NO: 22329424 NR Description: hypothetical protein
  misc_feature (39)..(230): Homolog of NCBI NO: 21536910 NR Description: unknown [Arabidopsis thaliana]
  misc_feature (39)..(230): Homolog of NCBI NO: 15231451 NR Description: putative protein
  misc_feature (261)..(335): Homolog of NCBI NO: 34908158 NR Description: P0408C03.22 [Oryza sativa (japonica
  misc_feature (174)..(260): Homolog of NCBI NO: 34908158 NR Description: P0408C03.22 [Oryza sativa (japonica
  misc_feature (43)..(173): Homolog of NCBI NO: 34908158 NR Description: P0408C03.22 [Oryza sativa (japonica
ACVTRARDKALSHSHHPCSAGRSLLVPVSASRLFGGSGASIAMDAPFFHELRRQASSYLTGKIRSARLALTDVTPTQLLTEEATNGDASPPNVRTMGRIARQAFDVDEYVRITGVLHGRLASFDRRQWREAYKALLLLEHLLTHGPRSVAVEFHKDREAIDRMATFQHVDEKGFNWGLTVRSKSERVLKLLERGPFLEEERERARKIAREITGFGSFSLSAGASHHAVSQSQPPGDDGNRGDGRSSSKREERQRHDDGGRFGRSHSQFEERWWKHKDGDDGDKENLIQSPEPTARVAPREVDAEAEEEELHHHQLHPFHGLGQKQRPEATLLLSQ

SEQ ID NO: 4289 - protein, 293 aa, Zea mays subsp. mays
  peptide (1)..(293): Ceres Seq. ID no. 12345993
  misc_feature (31)..(131): Pfam Name: ENTH domain Pfam Description: ENTH domain
  misc_feature (20)..(240): Homolog of NCBI NO: 24648991 NR Description: CG31170-PA [Drosophila melanogaster]
  misc_feature (1)..(37): Homolog of NCBI NO: 7485982 NR Description: hypothetical protein F22O13.16 - Arabidopsis
  misc_feature (81)..(176): Homolog of NCBI NO: 7485982 NR Description: hypothetical protein F22O13.16 - Arabidopsis
  misc_feature (1)..(189): Homolog of NCBI NO: 11994320 NR Description: gene_id:MLM24.8~unknown protein [Arabidopsis
  misc_feature (1)..(176): Homolog of NCBI NO: 22329424 NR Description: hypothetical protein
  misc_feature (1)..(188): Homolog of NCBI NO: 21536910 NR Description: unknown [Arabidopsis thaliana]
  misc_feature (1)..(188): Homolog of NCBI NO: 15231451 NR Description: putative protein
  misc_feature (219)..(293): Homolog of NCBI NO: 34908158 NR Description: P0408C03.22 [Oryza sativa (japonica
  misc_feature (132)..(218): Homolog of NCBI NO: 34908158 NR Description: P0408C03.22 [Oryza sativa (japonica
  misc_feature (1)..(131): Homolog of NCBI NO: 34908158 NR Description: P0408C03.22 [Oryza sativa (japonica
MDAPFFHELRRQASSYLTGKIRSARLALTDVTPTQLLTEEATNGDASPPNVRTMGRIARQAFDVDEYVRITGVLHGRLASFDRRQWREAYKALLLLEHLLTHGPRSVAVEFHKDREAIDRMATFQHVDEKGFNWGLTVRSKSERVLKLLERGPFLEEERERARKIAREITGFGSFSLSAGASHHAVSQSQPPGDDGNRGDGRSSSKREERQRHDDGGRFGRSHSQFEERWWKHKDGDDGDKENLIQSPEPTARVAPREVDAEAEEEELHHHQLHPFHGLGQKQRPEATLLLSQ

SEQ ID NO: 4290 - protein, 240 aa, Zea mays subsp. mays
  peptide (1)..(240): Ceres Seq. ID no. 12345994
  misc_feature (1)..(78): Pfam Name: ENTH domain Pfam Description: ENTH domain
  misc_feature (1)..(216): Homolog of NCBI NO: 7243706 NR Description: epsin-like protein [Drosophila melanogaster]
  misc_feature (1)..(187): Homolog of NCBI NO: 24648991 NR Description: CG31170-PA [Drosophila melanogaster]
  misc_feature (28)..(123): Homolog of NCBI NO: 7485982 NR Description: hypothetical protein F22O13.16 - Arabidopsis
  misc_feature (1)..(136): Homolog of NCBI NO: 11994320 NR Description: gene_id:MLM24.8~unknown protein [Arabidopsis
  misc_feature (1)..(123): Homolog of NCBI NO: 22329424 NR Description: hypothetical protein
  misc_feature (1)..(135): Homolog of NCBI NO: 21536910 NR Description: unknown [Arabidopsis thaliana]
  misc_feature (1)..(135): Homolog of NCBI NO: 15231451 NR Description: putative protein
  misc_feature (166)..(240): Homolog of NCBI NO: 34908158 NR Description: P0408C03.22 [Oryza sativa (japonica
  misc_feature (79)..(165): Homolog of NCBI NO: 34908158 NR Description: P0408C03.22 [Oryza sativa (japonica
  misc_feature (1)..(78): Homolog of NCBI NO: 34908158 NR Description: P0408C03.22 [Oryza sativa (japonica
MGRIARQAFDVDEYVRITGVLHGRLASFDRRQWREAYKALLLLEHLLTHGPRSVAVEFHKDREAIDRMATFQHVDEKGFNWGLTVRSKSERVLKLLERGPFLEEERERARKIAREITGFGSFSLSAGASHHAVSQSQPPGDDGNRGDGRSSSKREERQRHDDGGRFGRSHSQFEERWWKHKDGDDGDKENLIQSPEPTARVAPREVDAEAEEEELHHHQLHPFHGLGQKQRPEATLLLSQ

SEQ ID NO: 4291 - DNA, 1313 bp, Zea mays subsp. mays; identical to SEQ ID NO: 3197
  misc_feature (1)..(1313): Ceres Seq. ID no. 13564341
  misc_feature: MA Experiment ID: 20000534 Result: Down-regulated in Transcription
  misc_feature: MA Experiment 20000534 PARAMETER Experiment Name: Zm_Hybrid_Pollen_P Parameter: Age (day) Value: 8
  misc_feature: MA Experiment 20000534 PARAMETER Experiment Name: Zm_Hybrid_Pollen_P Parameter: Organism Value: Zea mays
  misc_feature: MA Experiment 20000534 PARAMETER Experiment Name: Zm_Hybrid_Pollen_P Parameter: Plant Line Value: 35A19
  misc_feature: MA Experiment 20000534 PARAMETER Experiment Name: Zm_Hybrid_Pollen_P Parameter: Tissue Value: Pollen vs. Aerial

SEQ ID NO: 4292 - protein, 377 aa, Zea mays subsp. mays; identical to SEQ ID NO: 3198
  peptide (1)..(377): Ceres Seq. ID no. 13564342
  misc_feature (83)..(247): Pfam Name: Radical SAM superfamily Pfam Description: Radical SAM superfamily
  misc_feature (83)..(247): Pfam Name: Radical SAM superfamily Pfam Description: Radical SAM superfamily
  misc_feature (39)..(350): Homolog of NCBI NO: 11596107 NR Description: biotin synthase long form [Pichia jadinii]
  misc_feature (40)..(354): Homolog of NCBI NO: 17229413 NR Description: biotin synthase [Nostoc sp. PCC 7120]
  misc_feature (38)..(364): Homolog of NCBI NO: 23127772 NR Description: hypothetical protein [Nostoc punctiforme]
  misc_feature (40)..(348): Homolog of NCBI NO: 2961328 NR Description: Biotin synthase [Schizosaccharomyces pombe]
  misc_feature (40)..(348): Homolog of NCBI NO: 19075228 NR Description: biotin synthase (EC 2.8.1.6) [Schizosaccharomyces
  misc_feature (39)..(350): Homolog of NCBI NO: 11596107 NR Description: biotin synthase long form [Pichia jadinii]
  misc_feature (38)..(364): Homolog of NCBI NO: 23127772 NR Description: hypothetical protein [Nostoc punctiforme]
  misc_feature (40)..(348): Homolog of NCBI NO: 19075228 NR Description: biotin synthase (EC 2.8.1.6) [Schizosaccharomyces
  misc_feature (3)..(377): Homolog of NCBI NO: 38175566 NR Description: putative biotin synthase [Oryza sativa (japonica
  misc_feature (4)..(376): Homolog of NCBI NO: 15224273 NR Description: biotin synthase (BioB) (BIO2) [Arabidopsis
  misc_feature (4)..(376): Homolog of NCBI NO: 28392925 NR Description: putative biotin synthase (Bio B) [Arabidopsis
  misc_feature (40)..(360): Homolog of NCBI NO: 23135112 NR Description: hypothetical protein [Cytophaga hutchinsonii]
  misc_feature (17)..(367): Homolog of NCBI NO: 40738982 NR Description: hypothetical protein AN6643.2 [Aspergillus
  misc_feature (40)..(348): Homolog of NCBI NO: 2961328 NR Description: Biotin synthase [Schizosaccharomyces pombe]
  misc_feature (40)..(354): Homolog of NCBI NO: 17229413 NR Description: biotin synthase [Nostoc sp. PCC 7120]
  misc_feature (17)..(367): Homolog of NCBI NO: 40738982 NR Description: hypothetical protein AN6643.2 [Aspergillus
  misc_feature (40)..(360): Homolog of NCBI NO: 23135112 NR Description: hypothetical protein [Cytophaga hutchinsonii]
  misc_feature (4)..(376): Homolog of NCBI NO: 28392925 NR Description: putative biotin synthase (Bio B) [Arabidopsis
  misc_feature (4)..(376): Homolog of NCBI NO: 15224273 NR Description: biotin synthase (BioB) (BIO2) [Arabidopsis
  misc_feature (3)..(377): Homolog of NCBI NO: 38175566 NR Description: putative biotin synthase [Oryza sativa (japonica

SEQ ID NO: 4293 - protein, 374 aa, Zea mays subsp. mays; identical to SEQ ID NO: 3199
  peptide (1)..(374): Ceres Seq. ID no. 13564343
  misc_feature (80)..(244): Pfam Name: Radical SAM superfamily Pfam Description: Radical SAM superfamily
  misc_feature (80)..(244): Pfam Name: Radical SAM superfamily Pfam Description: Radical SAM superfamily
  misc_feature (36)..(347): Homolog of NCBI NO: 11596107 NR Description: biotin synthase long form [Pichia jadinii]
  misc_feature (37)..(351): Homolog of NCBI NO: 17229413 NR Description: biotin synthase [Nostoc sp. PCC 7120]
  misc_feature (35)..(361): Homolog of NCBI NO: 23127772 NR Description: hypothetical protein [Nostoc punctiforme]
  misc_feature (37)..(345): Homolog of NCBI NO: 2961328 NR Description: Biotin synthase [Schizosaccharomyces pombe]
  misc_feature (37)..(345): Homolog of NCBI NO: 19075228 NR Description: biotin synthase (EC 2.8.1.6) [Schizosaccharomyces
  misc_feature (14)..(364): Homolog of NCBI NO: 40738982 NR Description: hypothetical protein AN6643.2 [Aspergillus
  misc_feature (1)..(373): Homolog of NCBI NO: 28392925 NR Description: putative biotin synthase (Bio B) [Arabidopsis
  misc_feature (1)..(374): Homolog of NCBI NO: 38175566 NR Description: putative biotin synthase [Oryza sativa (japonica
  misc_feature (37)..(345): Homolog of NCBI NO: 19075228 NR Description: biotin synthase (EC 2.8.1.6) [Schizosaccharomyces
  misc_feature (37)..(345): Homolog of NCBI NO: 2961328 NR Description: Biotin synthase [Schizosaccharomyces pombe]
  misc_feature (35)..(361): Homolog of NCBI NO: 23127772 NR Description: hypothetical protein [Nostoc punctiforme]
  misc_feature (37)..(351): Homolog of NCBI NO: 17229413 NR Description: biotin synthase [Nostoc sp. PCC 7120]
  misc_feature (36)..(347): Homolog of NCBI NO: 11596107 NR Description: biotin synthase long form [Pichia jadinii]
  misc_feature (1)..(373): Homolog of NCBI NO: 15224273 NR Description: biotin synthase (BioB) (BIO2) [Arabidopsis
  misc_feature (37)..(357): Homolog of NCBI NO: 23135112 NR Description: hypothetical protein [Cytophaga hutchinsonii]
  misc_feature (14)..(364): Homolog of NCBI NO: 40738982 NR Description: hypothetical protein AN6643.2 [Aspergillus
  misc_feature (37)..(357): Homolog of NCBI NO: 23135112 NR Description: hypothetical protein [Cytophaga hutchinsonii]
  misc_feature (1)..(373): Homolog of NCBI NO: 28392925 NR Description: putative biotin synthase (Bio B) [Arabidopsis
  misc_feature (1)..(373): Homolog of NCBI NO: 15224273 NR Description: biotin synthase (BioB) (BIO2) [Arabidopsis
  misc_feature (1)..(374): Homolog of NCBI NO: 38175566 NR Description: putative biotin synthase [Oryza sativa (japonica

SEQ ID NO: 4294 - protein, 266 aa, Zea mays subsp. mays; identical to SEQ ID NO: 3200
  peptide (1)..(266): Ceres Seq. ID no. 13564344
  misc_feature (1)..(136): Pfam Name: Radical SAM superfamily Pfam Description: Radical SAM superfamily
  misc_feature (1)..(136): Pfam Name: Radical SAM superfamily Pfam Description: Radical SAM superfamily
  misc_feature (1)..(239): Homolog of NCBI NO: 11596107 NR Description: biotin synthase long form [Pichia jadinii]
  misc_feature (1)..(243): Homolog of NCBI NO: 17229413 NR Description: biotin synthase [Nostoc sp. PCC 7120]
  misc_feature (1)..(253): Homolog of NCBI NO: 23127772 NR Description: hypothetical protein [Nostoc punctiforme]
  misc_feature (1)..(237): Homolog of NCBI NO: 2961328 NR Description: Biotin synthase [Schizosaccharomyces pombe]
  misc_feature (1)..(237): Homolog of NCBI NO: 19075228 NR Description: biotin synthase (EC 2.8.1.6) [Schizosaccharomyces
  misc_feature (1)..(239): Homolog of NCBI NO: 11596107 NR Description: biotin synthase long form [Pichia jadinii]
  misc_feature (1)..(253): Homolog of NCBI NO: 23127772 NR Description: hypothetical protein [Nostoc punctiforme]
  misc_feature (1)..(237): Homolog of NCBI NO: 19075228 NR Description: biotin synthase (EC 2.8.1.6) [Schizosaccharomyces
  misc_feature (1)..(266): Homolog of NCBI NO: 38175566 NR Description: putative biotin synthase [Oryza sativa (japonica
  misc_feature (1)..(265): Homolog of NCBI NO: 15224273 NR Description: biotin synthase (BioB) (BIO2) [Arabidopsis
  misc_feature (1)..(265): Homolog of NCBI NO: 28392925 NR Description: putative biotin synthase (Bio B) [Arabidopsis
  misc_feature (1)..(249): Homolog of NCBI NO: 23135112 NR Description: hypothetical protein [Cytophaga hutchinsonii]
  misc_feature (1)..(256): Homolog of NCBI NO: 40738982 NR Description: hypothetical protein AN6643.2 [Aspergillus
  misc_feature (1)..(237): Homolog of NCBI NO: 2961328 NR Description: Biotin synthase [Schizosaccharomyces pombe]
  misc_feature (1)..(243): Homolog of NCBI NO: 17229413 NR Description: biotin synthase [Nostoc sp. PCC 7120]
  misc_feature (1)..(256): Homolog of NCBI NO: 40738982 NR Description: hypothetical protein AN6643.2 [Aspergillus
  misc_feature (1)..(249): Homolog of NCBI NO: 23135112 NR Description: hypothetical protein [Cytophaga hutchinsonii]
  misc_feature (1)..(265): Homolog of NCBI NO: 28392925 NR Description: putative biotin synthase (Bio B) [Arabidopsis
  misc_feature (1)..(265): Homolog of NCBI NO: 15224273 NR Description: biotin synthase (BioB) (BIO2) [Arabidopsis
  misc_feature (1)..(266): Homolog of NCBI NO: 38175566 NR Description: putative biotin synthase [Oryza sativa (japonica

SEQ ID NO: 4295 - DNA, 1104 bp, Zea mays subsp. mays
  misc_feature (1)..(1104): Ceres Seq. ID no. 12402575
  misc_feature: MA Experiment ID: 108527 Result: Up-regulated in Transcription
  misc_feature: MA Experiment 108527 PARAMETER Experiment Name: Zm_5mM_NO_P Parameter: Age (day) Value: 8
  misc_feature: MA Experiment 108527 PARAMETER Experiment Name: Zm_5mM_NO_P Parameter: Organism Value: Zea mays
  misc_feature: MA Experiment 108527 PARAMETER Experiment Name: Zm_5mM_NO_P Parameter: Plant Line Value: 35A19
  misc_feature: MA Experiment 108527 PARAMETER Experiment Name: Zm_5mM_NO_P Parameter: Timepoint (hr) Value: 6
  misc_feature: MA Experiment 108527 PARAMETER Experiment Name: Zm_5mM_NO_P Parameter: Tissue Value: Aerial
  misc_feature: MA Experiment 108527 PARAMETER Experiment Name: Zm_5mM_NO_P Parameter: Treatment Value: 5mM NO vs. No Treatment
  misc_feature: MA Experiment ID: 108534 Result: Up-regulated in Transcription
  misc_feature: MA Experiment 108534 PARAMETER Experiment Name: Zm_4deg_Cold_P Parameter: Age (hr) Value: 8
  misc_feature: MA Experiment 108534 PARAMETER Experiment Name: Zm_4deg_Cold_P Parameter: Organism Value: Zea mays
  misc_feature: MA Experiment 108534 PARAMETER Experiment Name: Zm_4deg_Cold_P Parameter: Plant Line Value: 35A19
  misc_feature: MA Experiment 108534 PARAMETER Experiment Name: Zm_4deg_Cold_P Parameter: Temperature (deg C) Value: 4 vs. 22
  misc_feature: MA Experiment 108534 PARAMETER Experiment Name: Zm_4deg_Cold_P Parameter: Timepoint (hr) Value: 6
  misc_feature: MA Experiment 108534 PARAMETER Experiment Name: Zm_4deg_Cold_P Parameter: Tissue Value: Aerial
  misc_feature: MA Experiment ID: 108543 Result: Up-regulated in Transcription
  misc_feature: MA Experiment ID: 108544 Result: Down-regulated in Transcription
  misc_feature: MA Experiment ID: 108545 Result: Down-regulated in Transcription
  misc_feature: MA Experiment 108545 PARAMETER Experiment Name: Zm_Imbibed_Seeds_P Parameter: Age (day) Value: 3 vs. 2
  misc_feature: MA Experiment 108545 PARAMETER Experiment Name: Zm_Imbibed_Seeds_P Parameter: Organism Value: Zea mays
  misc_feature: MA Experiment 108545 PARAMETER Experiment Name: Zm_Imbibed_Seeds_P Parameter: Plant Line Value: 35A19
  misc_feature: MA Experiment 108545 PARAMETER Experiment Name: Zm_Imbibed_Seeds_P Parameter: Tissue Value: Aerial vs. Embryo
  misc_feature: MA Experiment ID: 20000492 Result: Down-regulated in Transcription
  misc_feature: MA Experiment 20000492 PARAMETER Experiment Name: Zm_Hybrid_Seed_Dev_P Parameter: DAP Value: 12
  misc_feature: MA Experiment 20000492 PARAMETER Experiment Name: Zm_Hybrid_Seed_Dev_P Parameter: Organism Value: Zea mays
  misc_feature: MA Experiment 20000492 PARAMETER Experiment Name: Zm_Hybrid_Seed_Dev_P Parameter: Plant Line Value: 35A19
  misc_feature: MA Experiment 20000492 PARAMETER Experiment Name: Zm_Hybrid_Seed_Dev_P Parameter: Tissue Value: Fert Kernel vs. Unfert Floret
  misc_feature: MA Experiment ID: 20000535 Result: Down-regulated in Transcription
  misc_feature: MA Experiment 20000535 PARAMETER Experiment Name: Zm_Hybrid_Seed_Dev_P Parameter: DAP Value: 30 vs. 12
  misc_feature: MA Experiment 20000535 PARAMETER Experiment Name: Zm_Hybrid_Seed_Dev_P Parameter: Organism Value: Zea mays
  misc_feature: MA Experiment 20000535 PARAMETER Experiment Name: Zm_Hybrid_Seed_Dev_P Parameter: Plant Line Value: 35A19
  misc_feature: MA Experiment 20000535 PARAMETER Experiment Name: Zm_Hybrid_Seed_Dev_P Parameter: Tissue Value: Embryo vs. Unfert Floret
  misc_feature: MA Experiment ID: 20001606 Result: Down-regulated in Transcription
  misc_feature: MA Experiment 20001606 PARAMETER Experiment Name: Zm_50ppm_KNO3_L-to-H_P Parameter: Age (day) Value: 19
  misc_feature: MA Experiment 20001606 PARAMETER Experiment Name: Zm_50ppm_KNO3_L-to-H_P Parameter: Organism Value: Zea mays
  misc_feature: MA Experiment 20001606 PARAMETER Experiment Name: Zm_50ppm_KNO3_L-to-H_P Parameter: Plant Line Value: 35A19
  misc_feature: MA Experiment 20001606 PARAMETER Experiment Name: Zm_50ppm_KNO3_L-to-H_P Parameter: Timepoint (hr) Value: 8
  misc_feature: MA Experiment 20001606 PARAMETER Experiment Name: Zm_50ppm_KNO3_L-to-H_P Parameter: Tissue Value: Shoots
  misc_feature: MA Experiment 20001606 PARAMETER Experiment Name: Zm_50ppm_KNO3_L-to-H_P Parameter: Treatment Value: 50ppm KNO3 vs. 50ppm KCl
gtcctccatcaaaagaaggcagggaaagatctgatctggggggtgagagagcaggaggagaaagccaagccattgccctcccctcttgaaggcttggagcttggttctacatcctcttctcttcccctccgtctctctctctctctctatttggtttgcttgcttgcctctactagactctagtcgtcgggtccggccatggccaccatcctggagaacatccagaaggcgaggttcctgccgaccaggccgctcaaggacgagctgcccaccttccagggcggcggcaagagcaaggaggagagccacctcatgggcctgaggaagcggctgtccagcttctccggcaagatccagcccatctcctccgcgtcggccgccgagtgggcgttccgccgctccaagtcggcgccctccctcggcgccgccttcgccgcggggggcggctccctgaggcagtggtggcagtggggcgtcggctggctcctgtccaagaagcccgggttcgcgggcgacctcgagatgaacgaggaggaggtcgccgcgctgggccgccagagcaggggcacctgggcccacgtcctcttcaagatgcggtccggcgtccgccgcctcgtcgcgtccgcgcactcgctccccaccacgcacaagcagcagtccctgccgtcgtcgtcggcctcggcggcgcacagcgtccagtgcaagccggcggcgtcgttcgcctacgcgcagcggcagagcttccaccacaccggccacgccatggcgcactaggcagcgtctcgcggttgccggtgccgtctgcggccggtctcctccagatccagagatggagggcgatgagaggcgcgggaagaagaagattcaggttacaggtgcgtgagatcgacggtgaagatgtcgttgaattgatgatgaatgaaatggaatgtaggattaccattctgttgtctgtgtagatctagtgcccctgtagaggtgaacaagtgttatactacatgctcgttctttatattattcttttgggttcgttcgttggacgatgtaaatgtaaaatgtttggttgatcttgtactgttcaataaaactgatgcaaattgtgcc

SEQ ID NO: 4296 - protein, 191 aa, Zea mays subsp. mays
  peptide (1)..(191): Ceres Seq. ID no. 12402576
  misc_feature (41)..(151): Homolog of NCBI NO: 15227807 NR Description: unknown protein; protein id: At2g17300.1
  misc_feature (41)..(151): Homolog of NCBI NO: 7486016 NR Description: hypothetical protein F23E12.120 - Arabidopsis
  misc_feature (1)..(151): Homolog of NCBI NO: 18418660 NR Description: putative protein
  misc_feature (1)..(151): Homolog of NCBI NO: 21593793 NR Description: unknown [Arabidopsis thaliana]
  misc_feature (1)..(175): Homolog of NCBI NO: 28411879 NR Description: OSJNBa0016N23.32 [Oryza sativa (japonica
MATILENIQKARFLPTRPLKDELPTFQGGGKSKEESHLMGLRKRLSSFSGKIQPISSASAAEWAFRRSKSAPSLGAAFAAGGGSLRQWWQWGVGWLLSKKPGFAGDLEMNEEEVAALGRQSRGTWAHVLFKMRSGVRRLVASAHSLPTTHKQQSLPSSSASAAHSVQCKPAASFAYAQRQSFHHTGHAMAH

SEQ ID NO: 4297 - protein, 153 aa, Zea mays subsp. mays
  peptide (1)..(153): Ceres Seq. ID no. 12402577
  misc_feature (3)..(113): Homolog of NCBI NO: 15227807 NR Description: unknown protein; protein id: At2g17300.1
  misc_feature (3)..(113): Homolog of NCBI NO: 7486016 NR Description: hypothetical protein F23E12.120 - Arabidopsis
  misc_feature (1)..(113): Homolog of NCBI NO: 18418660 NR Description: putative protein
  misc_feature (1)..(113): Homolog of NCBI NO: 21593793 NR Description: unknown [Arabidopsis thaliana]
  misc_feature (1)..(137): Homolog of NCBI NO: 28411879 NR Description: OSJNBa0016N23.32 [Oryza sativa (japonica
MGLRKRLSSFSGKIQPISSASAAEWAFRRSKSAPSLGAAFAAGGGSLRQWWQWGVGWLLSKKPGFAGDLEMNEEEVAALGRQSRGTWAHVLFKMRSGVRRLVASAHSLPTTHKQQSLPSSSASAAHSVQCKPAASFAYAQRQSFHHTGHAMAH

SEQ ID NO: 4298 - DNA, 847 bp, Zea mays subsp. mays
  misc_feature (1)..(847): Ceres Seq. ID no. 12372571
  misc_feature: MA Experiment ID: 108528 Result: Down-regulated in Transcription
  misc_feature: MA Experiment 108528 PARAMETER Experiment Name: Zm_Imbibed_Seeds_P Parameter: Age (day) Value: 5 vs. 2
  misc_feature: MA Experiment 108528 PARAMETER Experiment Name: Zm_Imbibed_Seeds_P Parameter: Organism Value: Zea mays
  misc_feature: MA Experiment 108528 PARAMETER Experiment Name: Zm_Imbibed_Seeds_P Parameter: Plant Line Value: 35A19
  misc_feature: MA Experiment 108528 PARAMETER Experiment Name: Zm_Imbibed_Seeds_P Parameter: Tissue Value: Aerial vs. Embryo
  misc_feature: MA Experiment ID: 108529 Result: Down-regulated in Transcription
  misc_feature: MA Experiment 108529 PARAMETER Experiment Name: Zm_Imbibed_Seeds_P Parameter: Age (day) Value: 5 vs. 2
  misc_feature: MA Experiment 108529 PARAMETER Experiment Name: Zm_Imbibed_Seeds_P Parameter: Organism Value: Zea mays
  misc_feature: MA Experiment 108529 PARAMETER Experiment Name: Zm_Imbibed_Seeds_P Parameter: Plant Line Value: 35A19
  misc_feature: MA Experiment 108529 PARAMETER Experiment Name: Zm_Imbibed_Seeds_P Parameter: Tissue Value: Roots vs. Embryo
  misc_feature: MA Experiment ID: 108530 Result: Down-regulated in Transcription
  misc_feature: MA Experiment 108530 PARAMETER Experiment Name: Zm_Imbibed_Seeds_P Parameter: Age (day) Value: 6 vs. 2
  misc_feature: MA Experiment 108530 PARAMETER Experiment Name: Zm_Imbibed_Seeds_P Parameter: Organism Value: Zea mays
  misc_feature: MA Experiment 108530 PARAMETER Experiment Name: Zm_Imbibed_Seeds_P Parameter: Plant Line Value: 35A19
  misc_feature: MA Experiment 108530 PARAMETER Experiment Name: Zm_Imbibed_Seeds_P Parameter: Tissue Value: Aerial vs. Embryo
  misc_feature: MA Experiment ID: 108543 Result: Up-regulated in Transcription
  misc_feature: MA Experiment ID: 108544 Result: Up-regulated in Transcription
  misc_feature: MA Experiment ID: 108546 Result: Down-regulated in Transcription
  misc_feature: MA Experiment 108546 PARAMETER Experiment Name: Zm_Imbibed_Seeds_P Parameter: Age (day) Value: 3 vs. 2
  misc_feature: MA Experiment 108546 PARAMETER Experiment Name: Zm_Imbibed_Seeds_P Parameter: Organism Value: Zea mays
  misc_feature: MA Experiment 108546 PARAMETER Experiment Name: Zm_Imbibed_Seeds_P Parameter: Plant Line Value: 35A19
  misc_feature: MA Experiment 108546 PARAMETER Experiment Name: Zm_Imbibed_Seeds_P Parameter: Tissue Value: Roots vs. Embryo
  misc_feature: MA Experiment ID: 108547 Result: Down-regulated in Transcription
  misc_feature: MA Experiment 108547 PARAMETER Experiment Name: Zm_Imbibed_Seeds_P Parameter: Age (day) Value: 4 vs. 2
  misc_feature: MA Experiment 108547 PARAMETER Experiment Name: Zm_Imbibed_Seeds_P Parameter: Organism Value: Zea mays
  misc_feature: MA Experiment 108547 PARAMETER Experiment Name: Zm_Imbibed_Seeds_P Parameter: Plant Line Value: 35A19
  misc_feature: MA Experiment 108547 PARAMETER Experiment Name: Zm_Imbibed_Seeds_P Parameter: Tissue Value: Aerial vs. Embryo
  misc_feature: MA Experiment ID: 108687 Result: Down-regulated in Transcription
  misc_feature: MA Experiment 108687 PARAMETER Experiment Name: Zm_Embryos-Flowers__P Parameter: Tissue Value: Embryo vs. Aerial+
  misc_feature: MA Experiment ID: 108689 Result: Down-regulated in Transcription
  misc_feature: MA Experiment 108689 PARAMETER Experiment Name: Zm_Drought_Roots_P Parameter: Age (day) Value: 9
  misc_feature: MA Experiment 108689 PARAMETER Experiment Name: Zm_Drought_Roots_P Parameter: Organism Value: Zea mays
  misc_feature: MA Experiment 108689 PARAMETER Experiment Name: Zm_Drought_Roots_P Parameter: Plant Line Value: 35A19
  misc_feature: MA Experiment 108689 PARAMETER Experiment Name: Zm_Drought_Roots_P Parameter: Timepoint (hr) Value: 24
  misc_feature: MA Experiment 108689 PARAMETER Experiment Name: Zm_Drought_Roots_P Parameter: Tissue Value: Roots
  misc_feature: MA Experiment 108689 PARAMETER Experiment Name: Zm_Drought_Roots_P Parameter: Treatment Value: Drought vs. No Drought
  misc_feature: MA Experiment ID: 20000478 Result: Down-regulated in Transcription
  misc_feature: MA Experiment 20000478 PARAMETER Experiment Name: Zm_5mM_SA_P Parameter: Age (day) Value: 11
  misc_feature: MA Experiment 20000478 PARAMETER Experiment Name: Zm_5mM_SA_P Parameter: Organism Value: Zea mays
  misc_feature: MA Experiment 20000478 PARAMETER Experiment Name: Zm_5mM_SA_P Parameter: Plant Line Value: 35A19
  misc_feature: MA Experiment 20000478 PARAMETER Experiment Name: Zm_5mM_SA_P Parameter: Timepoint (hr) Value: 72
  misc_feature: MA Experiment 20000478 PARAMETER Experiment Name: Zm_5mM_SA_P Parameter: Tissue Value: Aerial
  misc_feature: MA Experiment 20000478 PARAMETER Experiment Name: Zm_5mM_SA_P Parameter: Treatment Value: 5mM SA vs. No Treatment
  misc_feature: MA Experiment ID: 20000480 Result: Down-regulated in Transcription
  misc_feature: MA Experiment 20000480 PARAMETER Experiment Name: Zm_Drought_P Parameter: Age (day) Value: 11
  misc_feature: MA Experiment 20000480 PARAMETER Experiment Name: Zm_Drought_P Parameter: Organism Value: Zea mays
  misc_feature: MA Experiment 20000480 PARAMETER Experiment Name: Zm_Drought_P Parameter: Plant Line Value: 35A19
  misc_feature: MA Experiment 20000480 PARAMETER Experiment Name: Zm_Drought_P Parameter: Timepoint (hr) Value: 72
  misc_feature: MA Experiment 20000480 PARAMETER Experiment Name: Zm_Drought_P Parameter: Tissue Value: Aerial
  misc_feature: MA Experiment 20000480 PARAMETER Experiment Name: Zm_Drought_P Parameter: Treatment Value: Drought vs. No Drought
  misc_feature: MA Experiment ID: 20000492 Result: Down-regulated in Transcription
  misc_feature: MA Experiment 20000492 PARAMETER Experiment Name: Zm_Hybrid_Seed_Dev_P Parameter: DAP Value: 12
  misc_feature: MA Experiment 20000492 PARAMETER Experiment Name: Zm_Hybrid_Seed_Dev_P Parameter: Organism Value: Zea mays
  misc_feature: MA Experiment 20000492 PARAMETER Experiment Name: Zm_Hybrid_Seed_Dev_P Parameter: Plant Line Value: 35A19
  misc_feature: MA Experiment 20000492 PARAMETER Experiment Name: Zm_Hybrid_Seed_Dev_P Parameter: Tissue Value: Fert Kernel vs. Unfert Floret
  misc_feature: MA Experiment ID: 20000535 Result: Down-regulated in Transcription
  misc_feature: MA Experiment 20000535 PARAMETER Experiment Name: Zm_Hybrid_Seed_Dev_P Parameter: DAP Value: 30 vs. 12
  misc_feature: MA Experiment 20000535 PARAMETER Experiment Name: Zm_Hybrid_Seed_Dev_P Parameter: Organism Value: Zea mays
  misc_feature: MA Experiment 20000535 PARAMETER Experiment Name: Zm_Hybrid_Seed_Dev_P Parameter: Plant Line Value: 35A19
  misc_feature: MA Experiment 20000535 PARAMETER Experiment Name: Zm_Hybrid_Seed_Dev_P Parameter: Tissue Value: Embryo vs. Unfert Floret
aagtaggtgaaggtcagatcagagtatcaccacttggcaatttctcccccggcacaagcgcatggctaccgtcgggggcaatcgtgctctctatgcagtcgtcgcgctgccacttctcgcgacccttcttcacggaccaatgcggctgtcgcatgccttcccataccgttccctactccagacctgccagcccagcggctccatccagggccgttccggcaactgcaacacggagaacggctccgagtgctgcaagaacgggcgtcgctacaccacatacggctgctccccgcccgtcacgggtagcacccgcgccgtactgactctcaacagcttcgccgagggcggggacggcggcggcgcggccgcctgcacggggaagttctacgacgacagcaagaaggtggtggcgctgtcaactggctggtacaacggcggtagccggtgcagaaagcacatcatgatccacgcgggcaacgggaattccgtgagcgcgttggtcgtcgacgagtgtgactccaccgtgggctgcgacaaggaccacaactttgagccgccgtgccgcaacaacatcgtcgacgggtcgccggcggtgtgggacgctctggggctcaacaaggacgacggccaggcacagatcacctggtccgacgagtgagcgactgtaccaccgctgcaccggccgggtgcgctcgtgcaagtgcaccggccggcacgtctcatgttgccaatatataataagtagtagggtacagtggtacaccctctaaataatcatgcatgaagcagctgttcatctttagacgtgtttaaccatttgcaaaattaaataactgttggccccccg

SEQ ID NO: 4299 - protein, 198 aa, Zea mays subsp. mays
  peptide (1)..(198): Ceres Seq. ID no. 12372572
  misc_feature (29)..(183): Homolog of NCBI NO: 34897980 NR Description: hypothetical protein~predicted by FGENESH etc.
  misc_feature (80)..(196): Homolog of NCBI NO: 37535604 NR Description: hypothetical protein [Oryza sativa (japonica
  misc_feature (81)..(197): Homolog of NCBI NO: 37535578 NR Description: hypothetical protein [Oryza sativa (japonica
  misc_feature (75)..(197): Homolog of NCBI NO: 37535576 NR Description: hypothetical protein [Oryza sativa (japonica
  misc_feature (42)..(198): Homolog of NCBI NO: 37535588 NR Description: hypothetical protein [Oryza sativa (japonica
  misc_feature (42)..(197): Homolog of NCBI NO: 38346744 NR Description: OSJNBa0081G05.7 [Oryza sativa (japonica
  misc_feature (59)..(196): Homolog of NCBI NO: 7406671 NR Description: putative ripening-related protein [Vitis vinifera]
  misc_feature (42)..(198): Homolog of NCBI NO: 37535604 NR Description: hypothetical protein [Oryza sativa (japonica
  misc_feature (7)..(197): Homolog of NCBI NO: 37535592 NR Description: hypothetical protein [Oryza sativa (japonica
MATVGGNRALYAVVALPLLATLLHGPMRLSHAFPYRSLLQTCQPSGSIQGRSGNCNTENGSECCKNGRRYTTYGCSPPVTGSTRAVLTLNSFAEGGDGGGAAACTGKFYDDSKKVVALSTGWYNGGSRCRKHIMIHAGNGNSVSALVVDECDSTVGCDKDHNFEPPCRNNIVDGSPAVWDALGLNKDDGQAQITWSDE

SEQ ID NO: 4300 - protein, 172 aa, Zea mays subsp. mays
  peptide (1)..(172): Ceres Seq. ID no. 12372573
  misc_feature (3)..(157): Homolog of NCBI NO: 34897980 NR Description: hypothetical protein~predicted by FGENESH etc.
  misc_feature (54)..(170): Homolog of NCBI NO: 37535604 NR Description: hypothetical protein [Oryza sativa (japonica
  misc_feature (55)..(171): Homolog of NCBI NO: 37535578 NR Description: hypothetical protein [Oryza sativa (japonica
  misc_feature (49)..(171): Homolog of NCBI NO: 37535576 NR Description: hypothetical protein [Oryza sativa (japonica
  misc_feature (16)..(172): Homolog of NCBI NO: 37535588 NR Description: hypothetical protein [Oryza sativa (japonica
  misc_feature (16)..(171): Homolog of NCBI NO: 38346744 NR Description: OSJNBa0081G05.7 [Oryza sativa (japonica
  misc_feature (33)..(170): Homolog of NCBI NO: 7406671 NR Description: putative ripening-related protein [Vitis vinifera]
  misc_feature (16)..(172): Homolog of NCBI NO: 37535604 NR Description: hypothetical protein [Oryza sativa (japonica
  misc_feature (1)..(171): Homolog of NCBI NO: 37535592 NR Description: hypothetical protein [Oryza sativa (japonica
MRLSHAFPYRSLLQTCQPSGSIQGRSGNCNTENGSECCKNGRRYTTYGCSPPVTGSTRAVLTLNSFAEGGDGGGAAACTGKFYDDSKKVVALSTGWYNGGSRCRKHIMIHAGNGNSVSALVVDECDSTVGCDKDHNFEPPCRNNIVDGSPAVWDALGLNKDDGQAQITWSDE

SEQ ID NO: 4301 - protein, 106 aa, Zea mays subsp. mays
  peptide (1)..(106): Ceres Seq. ID no. 12372574
  misc_feature (52)..(106): Homolog of NCBI NO: 11360494 NR Description: antifreeze glycopeptide AFGP polyprotein
VGEGQIRVSPLGNFSPGTSAWLPSGAIVLSMQSSRCHFSRPFFTDQCGCRMPSHTVPYSRPASPAAPSRAVPATATRRTAPSAARTGVATPHTAAPRPSRVAPAPY

SEQ ID NO: 4302 - DNA, 872 bp, Zea mays subsp. mays
  misc_feature (1)..(872): Ceres Seq. ID no. 12353745
  misc_feature: MA Experiment ID: 108527 Result: Up-regulated in Transcription
  misc_feature: MA Experiment 108527 PARAMETER Experiment Name: Zm_5mM_NO_P Parameter: Age (day) Value: 8
  misc_feature: MA Experiment 108527 PARAMETER Experiment Name: Zm_5mM_NO_P Parameter: Organism Value: Zea mays
  misc_feature: MA Experiment 108527 PARAMETER Experiment Name: Zm_5mM_NO_P Parameter: Plant Line Value: 35A19
  misc_feature: MA Experiment 108527 PARAMETER Experiment Name: Zm_5mM_NO_P Parameter: Timepoint (hr) Value: 6
  misc_feature: MA Experiment 108527 PARAMETER Experiment Name: Zm_5mM_NO_P Parameter: Tissue Value: Aerial
  misc_feature: MA Experiment 108527 PARAMETER Experiment Name: Zm_5mM_NO_P Parameter: Treatment Value: 5mM NO vs. No Treatment
  misc_feature: MA Experiment ID: 20000108 Result: Down-regulated in Transcription
  misc_feature: MA Experiment 20000108 PARAMETER Experiment Name: Zm_Root-Tips_P Parameter: Age (day) Value: 12
  misc_feature: MA Experiment 20000108 PARAMETER Experiment Name: Zm_Root-Tips_P Parameter: Organism Value: Zea mays
  misc_feature: MA Experiment 20000108 PARAMETER Experiment Name: Zm_Root-Tips_P Parameter: Tissue Value: Root tips vs. Root mid region    35
  misc_feature: MA Experiment 20000108 PARAMETER Experiment Name: Zm_Root-Tips_P Parameter: Tissue Value: Root tips vs. Root mid region   Sequence Listing-Misc Features (4)
gcgtcggttttatgcacgactccttttcgcacccggctggccggctccccacctgctcgcctctcgcgcatcctaccaggagggtgggagacccaggcagcggaggtgtgcgaagctcgcttcgcaccacgcgctgcggcctgcggggcgagagatcgaggcctgagctagggtctggtggcggagatgtcgacgccggcgaggaagcgcctgatgcgggacttcaagcgccttcagcaggacccgcccgccggcatcagcggcgcgccgtacgacaacaatatcatgctctggaactccgtcatattcgggccggatgacacgccgtgggatggaggcacgttcaagctgactctgcaatttacagaagattaccccaacaaacctccaactgttcggtttgtttcgaggatgtttcatccaaacatctatgcggatggaagcatctgtttggacatcctacaaaaccagtggagccctatatatgatgttgcggcaatattgacctctattcagtccctgctgtgtgacccaaacccaaattctcctgctaactctgaagcagccagaatgttcagcgagaacaagcgtgagtacaaccgcaaagttcgtgaggttgtggagcagagctggacagccgactaaaactttatccgcttcgccaggcggtgtaaataaagcatctgtctttcctacttggccggtctgttttaccgttagaaatcctcagctatcgttgtgttcttgtggttcagtcccttgttgtagtgatgcctgcgggttttcctaatgtagtgctgaacggtttcataaactcggatattggtgcatatgtaacagatatagctaagtcaagttgttgcttggtttgc

SEQ ID NO: 4303 - protein, 152 aa, Zea mays subsp. mays
  peptide (1)..(152): Ceres Seq. ID no. 12353746
  misc_feature (1)..(149): Homolog of NCBI NO: 18424601 NR Description: E2, ubiquitin-conjugating enzyme 3 (UBC3)
  misc_feature (1)..(152): Homolog of NCBI NO: 18394114 NR Description: E2, ubiquitin-conjugating enzyme 1 (UBC1)
  misc_feature (1)..(152): Homolog of NCBI NO: 18395424 NR Description: E2, ubiquitin-conjugating enzyme 2 (UBC2)
  misc_feature (1)..(152): Homolog of NCBI NO: 464980 NR Description: Ubiquitin-conjugating enzyme E2-17 kDa
  misc_feature (1)..(152): Homolog of NCBI NO: 18844990 NR Description: Rad6 [Oryza sativa (japonica cultivar-group)]
  misc_feature (1)..(152): Homolog of NCBI NO: 136640 NR Description: Ubiquitin-conjugating enzyme E2-17 kDa
  misc_feature (1)..(152): Homolog of NCBI NO: 8118527 NR Description: ubiquitin conjugating protein [Avicennia marina]
  misc_feature (1)..(152): Homolog of NCBI NO: 13516453 NR Description: ubiquitin-conjugating enzyme (E2) [Nicotiana
  misc_feature (1)..(152): Homolog of NCBI NO: 33146810 NR Description: OsRad6 [Oryza sativa (japonica cultivar-group)]
  misc_feature (1)..(152): Homolog of NCBI NO: 13516451 NR Description: ubiquitin-conjugating enzyme (E2) [Nicotiana
MSTPARKRLMRDFKRLQQDPPAGISGAPYDNNIMLWNSVIFGPDDTPWDGGTFKLTLQFTEDYPNKPPTVRFVSRMFHPNIYADGSICLDILQNQWSPIYDVAAILTSIQSLLCDPNPNSPANSEAARMFSENKREYNRKVREVVEQSWTAD

SEQ ID NO: 4304 - protein, 143 aa, Zea mays subsp. mays
  peptide (1)..(143): Ceres Seq. ID no. 12353747
  misc_feature (1)..(140): Homolog of NCBI NO: 18424601 NR Description: E2, ubiquitin-conjugating enzyme 3 (UBC3)
  misc_feature (1)..(143): Homolog of NCBI NO: 18394114 NR Description: E2, ubiquitin-conjugating enzyme 1 (UBC1)
  misc_feature (1)..(143): Homolog of NCBI NO: 18395424 NR Description: E2, ubiquitin-conjugating enzyme 2 (UBC2)
  misc_feature (1)..(143): Homolog of NCBI NO: 464980 NR Description: Ubiquitin-conjugating enzyme E2-17 kDa
  misc_feature (1)..(143): Homolog of NCBI NO: 18844990 NR Description: Rad6 [Oryza sativa (japonica cultivar-group)]
  misc_feature (1)..(143): Homolog of NCBI NO: 136640 NR Description: Ubiquitin-conjugating enzyme E2-17 kDa
  misc_feature (1)..(143): Homolog of NCBI NO: 8118527 NR Description: ubiquitin conjugating protein [Avicennia marina]
  misc_feature (1)..(143): Homolog of NCBI NO: 13516453 NR Description: ubiquitin-conjugating enzyme (E2) [Nicotiana
  misc_feature (1)..(143): Homolog of NCBI NO: 33146810 NR Description: OsRad6 [Oryza sativa (japonica cultivar-group)]
  misc_feature (1)..(143): Homolog of NCBI NO: 13516451 NR Description: ubiquitin-conjugating enzyme (E2) [Nicotiana
MRDFKRLQQDPPAGISGAPYDNNIMLWNSVIFGPDDTPWDGGTFKLTLQFTEDYPNKPPTVRFVSRMFHPNIYADGSICLDILQNQWSPIYDVAAILTSIQSLLCDPNPNSPANSEAARMFSENKREYNRKVREVVEQSWTAD

SEQ ID NO: 4305 - protein, 119 aa, Zea mays subsp. mays
  peptide (1)..(119): Ceres Seq. ID no. 12353748
  misc_feature (1)..(116): Homolog of NCBI NO: 18424601 NR Description: E2, ubiquitin-conjugating enzyme 3 (UBC3)
  misc_feature (1)..(119): Homolog of NCBI NO: 18394114 NR Description: E2, ubiquitin-conjugating enzyme 1 (UBC1)
  misc_feature (1)..(119): Homolog of NCBI NO: 18395424 NR Description: E2, ubiquitin-conjugating enzyme 2 (UBC2)
  misc_feature (1)..(119): Homolog of NCBI NO: 464980 NR Description: Ubiquitin-conjugating enzyme E2-17 kDa
  misc_feature (1)..(119): Homolog of NCBI NO: 18844990 NR Description: Rad6 [Oryza sativa (japonica cultivar-group)]
  misc_feature (1)..(119): Homolog of NCBI NO: 136640 NR Description: Ubiquitin-conjugating enzyme E2-17 kDa
  misc_feature (1)..(119): Homolog of NCBI NO: 8118527 NR Description: ubiquitin conjugating protein [Avicennia marina]
  misc_feature (1)..(119): Homolog of NCBI NO: 13516453 NR Description: ubiquitin-conjugating enzyme (E2) [Nicotiana
  misc_feature (1)..(119): Homolog of NCBI NO: 33146810 NR Description: OsRad6 [Oryza sativa (japonica cultivar-group)]
  misc_feature (1)..(119): Homolog of NCBI NO: 13516451 NR Description: ubiquitin-conjugating enzyme (E2) [Nicotiana
MLWNSVIFGPDDTPWDGGTFKLTLQFTEDYPNKPPTVRFVSRMFHPNIYADGSICLDILQNQWSPIYDVAAILTSIQSLLCDPNPNSPANSEAARMFSENKREYNRKVREVVEQSWTAD

SEQ ID NO: 4306 - DNA, 1073 bp, Zea mays subsp. mays
  misc_feature (1)..(1073): Ceres Seq. ID no. 13496658
  misc_feature: MA Experiment ID: 108522 Result: Up-regulated in Transcription
  misc_feature: MA Experiment 108522 PARAMETER Experiment Name: Zm_42deg_Heat_P Parameter: Age (day) Value: 8
  misc_feature: MA Experiment 108522 PARAMETER Experiment Name: Zm_42deg_Heat_P Parameter: Organism Value: Zea mays
  misc_feature: MA Experiment 108522 PARAMETER Experiment Name: Zm_42deg_Heat_P Parameter: Plant Line Value: 35A19
  misc_feature: MA Experiment 108522 PARAMETER Experiment Name: Zm_42deg_Heat_P Parameter: Temperature (deg C) Value: 42 vs. 22
  misc_feature: MA Experiment 108522 PARAMETER Experiment Name: Zm_42deg_Heat_P Parameter: Timepoint (hr) Value: 1
  misc_feature: MA Experiment 108522 PARAMETER Experiment Name: Zm_42deg_Heat_P Parameter: Tissue Value: Aerial
  misc_feature: MA Experiment ID: 108529 Result: Up-regulated in Transcription
  misc_feature: MA Experiment 108529 PARAMETER Experiment Name: Zm_Imbibed_Seeds_P Parameter: Age (day) Value: 5 vs. 2
  misc_feature: MA Experiment 108529 PARAMETER Experiment Name: Zm_Imbibed_Seeds_P Parameter: Organism Value: Zea mays
  misc_feature: MA Experiment 108529 PARAMETER Experiment Name: Zm_Imbibed_Seeds_P Parameter: Plant Line Value: 35A19
  misc_feature: MA Experiment 108529 PARAMETER Experiment Name: Zm_Imbibed_Seeds_P Parameter: Tissue Value: Roots vs. Embryo
  misc_feature: MA Experiment ID: 108535 Result: Down-regulated in Transcription
  misc_feature: MA Experiment 108535 PARAMETER Experiment Name: Zm_Meristem_P Parameter: Age (day) Value: 8
  misc_feature: MA Experiment 108535 PARAMETER Experiment Name: Zm_Meristem_P Parameter: Organism Value: Zea mays
  misc_feature: MA Experiment 108535 PARAMETER Experiment Name: Zm_Meristem_P Parameter: Plant Line Value: 35A19
  misc_feature: MA Experiment 108535 PARAMETER Experiment Name: Zm_Meristem_P Parameter: Tissue Value: Root Meristem vs. Above Root Meristem
  misc_feature: MA Experiment ID: 20000535 Result: Down-regulated in Transcription
  misc_feature: MA Experiment 20000535 PARAMETER Experiment Name: Zm_Hybrid_Seed_Dev_P Parameter: DAP Value: 30 vs. 12
  misc_feature: MA Experiment 20000535 PARAMETER Experiment Name: Zm_Hybrid_Seed_Dev_P Parameter: Organism Value: Zea mays
  misc_feature: MA Experiment 20000535 PARAMETER Experiment Name: Zm_Hybrid_Seed_Dev_P Parameter: Plant Line Value: 35A19
  misc_feature: MA Experiment 20000535 PARAMETER Experiment Name: Zm_Hybrid_Seed_Dev_P Parameter: Tissue Value: Embryo vs. Unfert Floret
  misc_feature: MA Experiment ID: 20000626 Result: Up-regulated in Transcription
  misc_feature: MA Experiment 20000626 PARAMETER Experiment Name: Zm_Herbicide-Treatments_P Parameter: Timepoint (hr) Value: 12
  misc_feature: MA Experiment 20000626 PARAMETER Experiment Name: Zm_Herbicide-Treatments_P Parameter: Tissue Value: Aerial
  misc_feature: MA Experiment 20000626 PARAMETER Experiment Name: Zm_Herbicide-Treatments_P Parameter: Treatment Value: Roundup vs. No Treatment
  misc_feature: MA Experiment ID: 20001608 Result: Down-regulated in Transcription
  misc_feature: MA Experiment 20001608 PARAMETER Experiment Name: Zm_50ppm_KNO3_L-to-H_P Parameter: Age (day) Value: 21
  misc_feature: MA Experiment 20001608 PARAMETER Experiment Name: Zm_50ppm_KNO3_L-to-H_P Parameter: Organism Value: Zea mays
  misc_feature: MA Experiment 20001608 PARAMETER Experiment Name: Zm_50ppm_KNO3_L-to-H_P Parameter: Plant Line Value: 35A19
  misc_feature: MA Experiment 20001608 PARAMETER Experiment Name: Zm_50ppm_KNO3_L-to-H_P Parameter: Timepoint (hr) Value: 48
  misc_feature: MA Experiment 20001608 PARAMETER Experiment Name: Zm_50ppm_KNO3_L-to-H_P Parameter: Tissue Value: Shoots
  misc_feature: MA Experiment 20001608 PARAMETER Experiment Name: Zm_50ppm_KNO3_L-to-H_P Parameter: Treatment Value: 50ppm KNO3 vs. 50ppm KCl
tcshatcgaaaaagggattattcattttccgaccaaaaaacgaaaaaggcaaatccaaagacggagaagaagaagagtcgcgaaggaatggggaagggcaaggtgcatccctcgccgccgccagctgccgcggccgcggccgcgggcggcggagccggggagacgacggcggaggcggtgctgatgcggctgatgccggcggcggtgctcgcgdccgcggcgccgctmggggccgaggggaaggaggtgctggcgtacctggtgctggcgtcgctgcggtcctcggccccgccgacgccggcgcgcggggacgggcaccgcccggagctcgggtgcggctgcttcgggtgctacacggcctactggtcccgctgggacgggtcccccgagggcgaccgcgaggccatccaccgcgccatcgaggcgttcgaggagcacctggcggaggaggagaagggccgcgggaagggaggcgggccccgccgcgggcggaagaagcgcgccgagggcaaggggaggtggaaggtgaagaaggaaaaggaggtggaggtcggcgtcgatccactcccgcccccgtccgatctccccgccccggaggaggcccccaaggcggaggacggcgcggagtacctgacggcggaggacgagaaggaggaggacgctccgactgcggccgccggcgccgaggatgagaagcggcggcgctggtggggctccgtgmtgagctggaaggcgtggggcctctgggggtcccactagtcaggtccctcccctcgctacgsttcgccctgttcagttagttaggtttggtgctttctttgcttgctgctatctytggggtttagctgctgctgctcaggtggattagttggtgatggttagtactcctacgctatttggcagtytggatggggaygttgtgttttagtatctgttggtgcggtgtgtcacgtgttaggctcttctcttgtgtactgkacatacacgcaggcatggagtgtgtggtttggttggtgtaaattatcattgtaatgtaatgtactcctactaatgtaaatgcggcagtagttgtg

SEQ ID NO: 4307 - protein, 252 aa, Zea mays subsp. mays
  peptide (1)..(252): Ceres Seq. ID no. 15222999
  misc_feature (32)..(164): Homolog of NCBI NO: 15220778 NR Description: expressed protein [Arabidopsis thaliana]
  misc_feature (37)..(171): Homolog of NCBI NO: 21554382 NR Description: unknown [Arabidopsis thaliana]
  misc_feature (32)..(164): Homolog of NCBI NO: 7940288 NR Description: F2401.15 [Arabidopsis thaliana]
  misc_feature (32)..(164): Homolog of NCBI NO: 7486149 NR Description: hypothetical protein F25O1.15 - Arabidopsis
  misc_feature (32)..(250): Homolog of NCBI NO: 15221172 NR Description: expressed protein [Arabidopsis thaliana]
  misc_feature (20)..(169): Homolog of NCBI NO: 7486369 NR Description: hypothetical protein F3I6.21 - Arabidopsis
  misc_feature (32)..(171): Homolog of NCBI NO: 18416955 NR Description: expressed protein [Arabidopsis thaliana]
  misc_feature (32)..(171): Homolog of NCBI NO: 9955553 NR Description: putative protein [Arabidopsis thaliana]
  misc_feature (32)..(171): Homolog of NCBI NO: 13430564 NR Description: unknown protein [Arabidopsis thaliana]
  misc_feature (20)..(169): Homolog of NCBI NO: 15221709 NR Description: hypothetical protein [Arabidopsis thaliana]
  misc_feature (1)..(1): Xaa is any aa, unknown or other
  misc_feature (2)..(2): Xaa is any aa, unknown or other
  misc_feature (72)..(72): Xaa is any aa, unknown or other
  misc_feature (76)..(76): Xaa is any aa, unknown or other
  misc_feature (241)..(241): Xaa is any aa, unknown or other
XXRKRDYSFSDQKTKKANPKTEKKKSREGMGKGKVHPSPPPAAAAAAAGGGAGETTAEAVLMRLMPAAVLAXAAPXGAEGKEVLAYLVLASLRSSAPPTPARGDGHRPELGCGCFGCYTAYWSRWDGSPEGDREAIHRAIEAFEEHLAEEEKGRGKGGGPRRGRKKRAEGKGRWKVKKEKEVEVGVDPLPPPSDLPAPEEAPKAEDGAEYLTAEDEKEEDAPTAAAGAEDEKRRRWWGSVXSWKAWGLWGSH

SEQ ID NO: 4308 - protein, 229 aa, Zea mays subsp. mays
  peptide (1)..(229): Ceres Seq. ID no. 15223000
  misc_feature (12)..(212): Pfam Name: Sporozoite P67 surface antigen Pfam Description: Sporozoite P67 surface antigen
  misc_feature (12)..(225): Homolog of NCBI NO: 15224564 NR Description: glycine-rich protein [Arabidopsis thaliana]
  misc_feature (20)..(224): Homolog of NCBI NO: 30793991 NR Description: unknown protein [Arabidopsis thaliana]
  misc_feature (10)..(222): Homolog of NCBI NO: 15705840 NR Description: latency associated antigen [Ovine herpesvirus 2]
  misc_feature (30)..(229): Homolog of NCBI NO: 9625624 NR Description: nuclear antigen EBNA1 [Human herpesvirus 4]
  misc_feature (20)..(229): Homolog of NCBI NO: 15224564 NR Description: glycine-rich protein [Arabidopsis thaliana]
  misc_feature (30)..(229): Homolog of NCBI NO: 9453857 NR Description: EBNA-1 [Cynomolgus Epstein-Barr Virus TsB-B6]
  misc_feature (30)..(229): Homolog of NCBI NO: 9625624 NR Description: nuclear antigen EBNA1 [Human herpesvirus 4]
  misc_feature (30)..(219): Homolog of NCBI NO: 24652652 NR Description: CG13214-PA [Drosophila melanogaster]
  misc_feature (30)..(229): Homolog of NCBI NO: 2911274 NR Description: spidroin 1 [Nephila clavipes]
  misc_feature (32)..(201): Homolog of NCBI NO: 9625624 NR Description: nuclear antigen EBNA1 [Human herpesvirus 4]
  misc_feature (1)..(1): Xaa is any aa, unknown or other
  misc_feature (71)..(71): Xaa is any aa, unknown or other
  misc_feature (76)..(76): Xaa is any aa, unknown or other
XSKKGLFIFRPKNEKGKSKDGEEEESRRNGEGQGASLAAASCRGRGRGRRSRGDDGGGGADAADAGGGARXRGAAXGRGEGGAGVPGAGVAAVLGPADAGARGRAPPGARVRLLRVLHGLLVPLGRVPRGRPRGHPPRHRGVRGAPGGGGEGPREGRRAPPRAEEARRGQGEVEGEEGKGGGGRRRSTPAPVRSPRPGGGPQGGGRRGVPDGGGREGGGRSDCGRRRRG

SEQ ID NO: 4309 - protein, 223 aa, Zea mays subsp. mays
  peptide (1)..(223): Ceres Seq. ID no. 15223001
  misc_feature (3)..(135): Homolog of NCBI NO: 15220778 NR Description: expressed protein [Arabidopsis thaliana]
  misc_feature (8)..(142): Homolog of NCBI NO: 21554382 NR Description: unknown [Arabidopsis thaliana]
  misc_feature (3)..(135): Homolog of NCBI NO: 7940288 NR Description: F2401.15 [Arabidopsis thaliana]
  misc_feature (3)..(135): Homolog of NCBI NO: 7486149 NR Description: hypothetical protein F25O1.15 - Arabidopsis
  misc_feature (3)..(221): Homolog of NCBI NO: 15221172 NR Description: expressed protein [Arabidopsis thaliana]
  misc_feature (1)..(140): Homolog of NCBI NO: 7486369 NR Description: hypothetical protein F3I6.21 - Arabidopsis
  misc_feature (3)..(142): Homolog of NCBI NO: 18416955 NR Description: expressed protein [Arabidopsis thaliana]
  misc_feature (3)..(142): Homolog of NCBI NO: 9955553 NR Description: putative protein [Arabidopsis thaliana]
  misc_feature (3)..(142): Homolog of NCBI NO: 13430564 NR Description: unknown protein [Arabidopsis thaliana]
  misc_feature (1)..(140): Homolog of NCBI NO: 15221709 NR Description: hypothetical protein [Arabidopsis thaliana]
  misc_feature (43)..(43): Xaa is any aa, unknown or other
  misc_feature (47)..(47): Xaa is any aa, unknown or other
  misc_feature (212)..(212): Xaa is any aa, unknown or other
MGKGKVHPSPPPAAAAAAAGGGAGETTAEAVLMRLMPAAVLAXAAPXGAEGKEVLAYLVLASLRSSAPPTPARGDGHRPELGCGCFGCYTAYWSRWDGSPEGDREAIHRAIEAFEEHLAEEEKGRGKGGGPRRGRKKRAEGKGRWKVKKEKEVEVGVDPLPPPSDLPAPEEAPKAEDGAEYLTAEDEKEEDAPTAAAGAEDEKRRRWWGSVXSWKAWGLWGSH

SEQ ID NO: 4310 - DNA, 1782 bp, Zea mays subsp. mays
  misc_feature (1)..(1782): Ceres Seq. ID no. 12367381
  misc_feature: MA Experiment ID: 20000535 Result: Up-regulated in Transcription
  misc_feature: MA Experiment 20000535 PARAMETER Experiment Name: Zm_Hybrid_Seed_Dev_P Parameter: DAP Value: 30 vs. 12
  misc_feature: MA Experiment 20000535 PARAMETER Experiment Name: Zm_Hybrid_Seed_Dev_P Parameter: Organism Value: Zea mays
  misc_feature: MA Experiment 20000535 PARAMETER Experiment Name: Zm_Hybrid_Seed_Dev_P Parameter: Plant Line Value: 35A19
  misc_feature: MA Experiment 20000535 PARAMETER Experiment Name: Zm_Hybrid_Seed_Dev_P Parameter: Tissue Value: Embryo vs. Unfert Floret
accgttccttttctccaccattgaaacactctctgaccctcactcgctccctgtcacacacactacactcgcaattcatccgcagtcacaagctcggctgctgctcccgcctaacggttgaggcgttgctggtgcacacaggaagggaagggaagggagagctgcacacagctttgctctggctcttggctcccctgtccacctgtcctgtccgtccatcatggaggaaacgcccagcccgcagctctagccgccgtcaatctcgtctcgtatcggagtcgaaggaagtaagaggcgggatggcatgaagcgacctaccaagaatgagaggctgggcaacccccggcacaagtaggaggaagaacccgagcaaccgagccacagggaggaggaggagatgggcaactgcggcacacgggaggagaatgccgtcgtcgctgcgcacgcgcaagttcagcaactccacttgttacaacagccttccaagaacgccaatgcagataggaagcacacctgcatgtcatcagatataagtgacccttccacacctaggaaagttgaagatgccaagaacatttccatatacaacgatgtgattgccttcacattgtttgagctagagacaatcacaaagagcttccgtgttgattatgttcttggcgaaggaggatttgggaccgtttacaagggttacatagatgaaaatgtcagggttgggctgaagtcactgcctgttgcagtcaaggtgctcaacaaagatggacatcaagggcacagagaatggcttaccgaggttaactgcctggggcagttgaggcatccaaatttggtgaagttgatcggatattgctgcgaagatgaccatcggctgcttgtctacgagttcatgtttcgaggaagtctagaaaaccacttattccgaaagacagctacgccattgccctggggtactaggatgtcaatcgcgctgggagccgctaaagggctcgcttgcctccacaacgctcaaaggcccgtcatctacagagatttcaagacatcaaacattctgctggactccgattatactgccaaactgtctgactttggcctcgcaaaagatggccctgaaggtgatcagacgcatgtgtcgacacgggtgatgggaacctacggttatgctgcccctgaatatgtgatgaccggtcacttgactgctcggagtgacgtgtacagcttcggcgtggtcctgctggagctcctgacggggcgcaagtcgatcgacaagtcgcggcccagcagggagcagagcctggtggactgggcgctcccgaagctcaacgacaagaggaggctcctccagatcatcgacccgaggctggaggggcagtactcggccagagccgctcacaagtcctgcagcctcgcgttctactgcctgagccagaaccccaaggccaggccgctcatgagcgacgtcgtcgagaccctcgcgccgttgcagcagggcggcggcggcggcagcgacgcgtcctccggccttcctgactgcagaggccgccgcaggctgaccggcaacagcgtcgtccacttcagggccatccccaaccccaagtgcacgcctgttgtcccggcttgcagagtgcggtgatgttgctgcgcttcggttgaagctgctgggataggttcaggtgtgtactgtgaccatgggtggtggtgcgttttgatgatctgcatgttggattaatgtgggcttggcccaaattaatattcaataatagtcaatgctaatggcccactttt

SEQ ID NO: 4311 - protein, 410 aa, Zea mays subsp. mays
  peptide (1)..(410): Ceres Seq. ID no. 12367382
  misc_feature (81)..(358): Pfam Name: Protein kinase domain Pfam Description: Protein kinase domain
  misc_feature (44)..(362): Homolog of NCBI NO: 10176804 NR Description: serine/threonine protein kinase-like [Arabidopsis
  misc_feature (48)..(381): Homolog of NCBI NO: 19423982 NR Description: putative protein kinase [Arabidopsis thaliana]
  misc_feature (45)..(362): Homolog of NCBI NO: 30013675 NR Description: Avr9/Cf-9 rapidly elicited protein 264 [Nicotiana
  misc_feature (48)..(381): Homolog of NCBI NO: 25287636 NR Description: probable protein kinase [imported] - Arabidopsis
  misc_feature (48)..(381): Homolog of NCBI NO: 22325532 NR Description: putative protein kinase
  misc_feature (44)..(362): Homolog of NCBI NO: 15225019 NR Description: putative protein kinase
  misc_feature (48)..(363): Homolog of NCBI NO: 22773239 NR Description: Putative protein kinase [Oryza sativa (japonica
  misc_feature (1)..(362): Homolog of NCBI NO: 15241220 NR Description: protein kinase-like protein; protein id:
  misc_feature (1)..(410): Homolog of NCBI NO: 9542860 NR Description: protein kinase-like protein [Arabidopsis thaliana]
  misc_feature (1)..(410): Homolog of NCBI NO: 30679085 NR Description: protein kinase family [Arabidopsis thaliana]
MGNCGTREENAVVAAHAQVQQLHLLQQPSKNANADRKHTCMSSDISDPSTPRKVEDAKNISIYNDVIAFTLFELETITKSFRVDYVLGEGGFGTVYKGYIDENVRVGLKSLPVAVKVLNKDGHQGHREWLTEVNCLGQLRHPNLVKLIGYCCEDDHRLLVYEFMFRGSLENHLFRKTATPLPWGTRMSIALGAAKGLACLHNAQRPVIYRDFKTSNILLDSDYTAKLSDFGLAKDGPEGDQTHVSTRVMGTYGYAAPEYVMTGHLTARSDVYSFGVVLLELLTGRKSIDKSRPSREQSLVDWALPKLNDKRRLLQIIDPRLEGQYSARAAHKSCSLAFYCLSQNPKARPLMSDVVETLAPLQQGGGGGSDASSGLPDCRGRRRLTGNSVVHFRAIPNPKCTPVVPACRVR

SEQ ID NO: 4312 - protein, 370 aa, Zea mays subsp. mays
  peptide (1)..(370): Ceres Seq. ID no. 12367383
  misc_feature (41)..(318): Pfam Name: Protein kinase domain Pfam Description: Protein kinase domain
  misc_feature (4)..(322): Homolog of NCBI NO: 10176804 NR Description: serine/threonine protein kinase-like [Arabidopsis
  misc_feature (8)..(341): Homolog of NCBI NO: 19423982 NR Description: putative protein kinase [Arabidopsis thaliana]
  misc_feature (5)..(322): Homolog of NCBI NO: 30013675 NR Description: Avr9/Cf-9 rapidly elicited protein 264 [Nicotiana
  misc_feature (8)..(341): Homolog of NCBI NO: 25287636 NR Description: probable protein kinase [imported] - Arabidopsis
  misc_feature (8)..(341): Homolog of NCBI NO: 22325532 NR Description: putative protein kinase
  misc_feature (4)..(322): Homolog of NCBI NO: 15225019 NR Description: putative protein kinase
  misc_feature (8)..(323): Homolog of NCBI NO: 22773239 NR Description: Putative protein kinase [Oryza sativa (japonica
  misc_feature (1)..(322): Homolog of NCBI NO: 15241220 NR Description: protein kinase-like protein; protein id:
  misc_feature (1)..(370): Homolog of NCBI NO: 9542860 NR Description: protein kinase-like protein [Arabidopsis thaliana]
  misc_feature (1)..(370): Homolog of NCBI NO: 30679085 NR Description: protein kinase family [Arabidopsis thaliana]
MSSDISDPSTPRKVEDAKNISIYNDVIAFTLFELETITKSFRVDYVLGEGGFGTVYKGYIDENVRVGLKSLPVAVKVLNKDGHQGHREWLTEVNCLGQLRHPNLVKLIGYCCEDDHRLLVYEFMFRGSLENHLFRKTATPLPWGTRMSIALGAAKGLACLHNAQRPVIYRDFKTSNILLDSDYTAKLSDFGLAKDGPEGDQTHVSTRVMGTYGYAAPEYVMTGHLTARSDVYSFGVVLLELLTGRKSIDKSRPSREQSLVDWALPKLNDKRRLLQIIDPRLEGQYSARAAHKSCSLAFYCLSQNPKARPLMSDVVETLAPLQQGGGGGSDASSGLPDCRGRRRLTGNSVVHFRAIPNPKCTPVVPACRVR

SEQ ID NO: 4313 - protein, 247 aa, Zea mays subsp. mays
  peptide (1)..(247): Ceres Seq. ID no. 12367384
  misc_feature (1)..(195): Pfam Name: Protein kinase domain Pfam Description: Protein kinase domain
  misc_feature (1)..(199): Homolog of NCBI NO: 10176804 NR Description: serine/threonine protein kinase-like [Arabidopsis
  misc_feature (1)..(218): Homolog of NCBI NO: 19423982 NR Description: putative protein kinase [Arabidopsis thaliana]
  misc_feature (1)..(199): Homolog of NCBI NO: 30013675 NR Description: Avr9/Cf-9 rapidly elicited protein 264 [Nicotiana
  misc_feature (1)..(218): Homolog of NCBI NO: 25287636 NR Description: probable protein kinase [imported] - Arabidopsis
  misc_feature (1)..(218): Homolog of NCBI NO: 22325532 NR Description: putative protein kinase
  misc_feature (1)..(199): Homolog of NCBI NO: 15225019 NR Description: putative protein kinase
  misc_feature (1)..(200): Homolog of NCBI NO: 22773239 NR Description: Putative protein kinase [Oryza sativa (japonica
  misc_feature (1)..(199): Homolog of NCBI NO: 15241220 NR Description: protein kinase-like protein; protein id:
  misc_feature (1)..(247): Homolog of NCBI NO: 9542860 NR Description: protein kinase-like protein [Arabidopsis thaliana]
  misc_feature (1)..(247): Homolog of NCBI NO: 30679085 NR Description: protein kinase family [Arabidopsis thaliana]
MFRGSLENHLFRKTATPLPWGTRMSIALGAAKGLACLHNAQRPVIYRDFKTSNILLDSDYTAKLSDFGLAKDGPEGDQTHVSTRVMGTYGYAAPEYVMTGHLTARSDVYSFGVVLLELLTGRKSIDKSRPSREQSLVDWALPKLNDKRRLLQIIDPRLEGQYSARAAHKSCSLAFYCLSQNPKARPLMSDVVETLAPLQQGGGGGSDASSGLPDCRGRRRLTGNSVVHFRAIPNPKCTPVVPACRVR

SEQ ID NO: 4314 - DNA, 1919 bp, Zea mays subsp. mays
  misc_feature (1)..(1919): Ceres Seq. ID no. 12406508
  misc_feature: MA Experiment ID: 20000535 Result: Down-regulated in Transcription
  misc_feature: MA Experiment 20000535 PARAMETER Experiment Name: Zm_Hybrid_Seed_Dev_P Parameter: DAP Value: 30 vs. 12
  misc_feature: MA Experiment 20000535 PARAMETER Experiment Name: Zm_Hybrid_Seed_Dev_P Parameter: Organism Value: Zea mays
  misc_feature: MA Experiment 20000535 PARAMETER Experiment Name: Zm_Hybrid_Seed_Dev_P Parameter: Plant Line Value: 35A19
  misc_feature: MA Experiment 20000535 PARAMETER Experiment Name: Zm_Hybrid_Seed_Dev_P Parameter: Tissue Value: Embryo vs. Unfert Floret
  misc_feature: MA Experiment ID: 20000626 Result: Up-regulated in Transcription
  misc_feature: MA Experiment 20000626 PARAMETER Experiment Name: Zm_Herbicide-Treatments_P Parameter: Timepoint (hr) Value: 12
  misc_feature: MA Experiment 20000626 PARAMETER Experiment Name: Zm_Herbicide-Treatments_P Parameter: Tissue Value: Aerial
  misc_feature: MA Experiment 20000626 PARAMETER Experiment Name: Zm_Herbicide-Treatments_P Parameter: Treatment Value: Roundup vs. No Treatment
gactatgcatgcatacgttcggggtcgagatcgagctgaccaatgatccaatagccgccgccttgtggttgtgtcatatatgggggccgaccagtggccgtggccgtggccgtgggcgacgccgccgccgccggccctgctgcttctggcctcactactgccggcgctgctgctcgcgctgtggcgcctggtgtggcaaccgcgggccgtggcgcggtcgttcgcgaggcagggcatccgggggccgccctactgtttcctggccggatccttgtcggaggcgaagcggctggcgcgtgccagccggagaagggttccgcagctggacgtcgcttcacatgacatcatgcccatcttgctgccaccgttccaccgatgggtcgtcgagtatgggaggacattcctgtactggatcgggccaacacctgcaatcttctccgttgatttagagttgattaaggaagtgctcacagacaggacgggcctgtttggcaaggacttcatgatccccgttttcaaagtcctgttgggcaacgggctcatcttagcaaacggcgacgactggaaacggcacaggaaagttgtccttccagccttcaaccacgagaggatcaagagcatgtcggcagtgacggcggaagctacggaacagatggcacagcgatggtgcgagcagctaatactgcacagtggtgcccgtcaagcagcggaaatacaagtggaccgcgccatctgcgacctgactgccgaaatcatcggccgcgccgctttcggcaccagcctccaggaagccggtgaggtcctcctcctgatgcacgagatgcagaagatgggcgccgcggccatggtggatgctcccatactctggtatctgccgacgcggcgcaacctaacggtgcgacgtctggacaagctgttgagggccaagatcactgcgatgatggcagcgcgggtggccgccaattgcggcggtggctacggcgacgacctgctcggcctcctgctggaggcgtggtcgccggagcctgggcggcgccatgctgggagcgacgacgaagggacgacgacgacgacgctgaccaccggagaggtgatcgacgagtgcaagaccttcttcggcgccgggcaggagaccaccgccaccctcctcgtgtggaccatgttcctgctgagcacgcacccgcagtggcaggacaaggtcagggaggaggtcctccgcgaattccgcggcgacgtccccaccaccgacaccctctccagactgaagctgcttcacatggttctgctggagacactgaggctctacccgccgatcgtgtacatacaacggaggactgcctcagacgtcgtgctcaggggcatgctgcaggtcccgaggggaccgtggtatcgatccccatcggcctgctgcaacgggacagggaggtgtggggctccgacgccgacgagttcaaccccttgaggtttagcaatggcgtcgccagggccgccacggatccacacgcgctgctgtctttctcgctcggcccgagagcctgcaccggcaagagcttcggcatcatagaagcacagatcgtcatggcggtcatcctcaggaacttctccttctcgctctcccccacctacgttcacaagccaaagtatgtcgtctccctcactcccaaatgtgggatgcctctcatcttaaagaacatccatgcttgagaaaagattactggcggcactgtaacttgctaatattatattgtacgttgtgtggcatcgacagatcatatatatatactagaactagtcatgtgcccgtgcgttgctacggattctatatatcacatagataaactctgtttaattgggatatatagttgttcaaacatgtttcaaacatgtacaataatattaattcgacatatttcagtggc

SEQ ID NO: 4315 - protein, 460 aa, Zea mays subsp. mays
  peptide (1)..(460): Ceres Seq. ID no. 12406509
  misc_feature (18)..(442): Homolog of NCBI NO: 34895168 NR Description: putative cytochrome P450 [Oryza sativa (japonica group)] >gi|21104826|dbj|BAB93411.1| putative cytochrome P450
  misc_feature (33)..(442): Homolog of NCBI NO: 34913354 NR Description: putative cytochrome P450 [Oryza sativa (japonica group)] >gi|22293694|dbj|BAC10039.1| putative cytochrome P450
  misc_feature (20)..(442): Homolog of NCBI NO: 38112707 NR Description: cytochrome P450 [Triticum aestivum]
  misc_feature (20)..(442): Homolog of NCBI NO: 22324446 NR Description: putative cytochrome P450 [Oryza sativa (japonica
  misc_feature (29)..(442): Homolog of NCBI NO: 34913346 NR Description: putative cytochrome P450 [Oryza sativa (japonica group)] >gi|22093840|dbj|BAC07127.1| putative cytochrome P450
  misc_feature (23)..(442): Homolog of NCBI NO: 34913362 NR Description: putative cytochrome P450 [Oryza sativa (japonica group)] >gi|22293698|dbj|BAC10043.1| putative cytochrome P450
  misc_feature (20)..(434): Homolog of NCBI NO: 34896952 NR Description: putative cytochrome P450-related protein [Oryza
  misc_feature (21)..(442): Homolog of NCBI NO: 14719280 NR Description: cytochrome P450 [Zea mays]
  misc_feature (19)..(434): Homolog of NCBI NO: 15226472 NR Description: cytochrome p450, putative; protein id: [Arabidopsis thaliana] >gi|7430708|pir||T02192 probable
  misc_feature (20)..(434): Homolog of NCBI NO: 15234248 NR Description: cytochrome P450 - like protein; protein id: [Arabidopsis thaliana] >gi|7484900|pir||T05876 cytochrome P450
MGADQWPWPWPWATPPPPALLLLASLLPALLLALWRLVWQPRAVARSFARQGIRGPPYCFLAGSLSEAKRLARASRRRVPQLDVASHDIMPILLPPFHRWVVEYGRTFLYWIGPTPAIFSVDLELIKEVLTDRTGLFGKDFMIPVFKVLLGNGLILANGDDWKRHRKVVLPAFNHERIKSMSAVTAEATEQMAQRWCEQLILHSGARQAAEIQVDRAICDLTAEIIGRAAFGTSLQEAGEVLLLMHEMQKMGAAAMVDAPILWYLPTRRNLTVRRLDKLLRAKITAMMAARVAANCGGGYGDDLLGLLLEAWSPEPGRRHAGSDDEGTTTTTLTTGEVIDECKTFFGAGQETTATLLVWTMFLLSTHPQWQDKVREEVLREFRGDVPTTDTLSRLKLLHMVLLETLRLYPPIVYIQRRTASDVVLRGMLQVPRGPWYRSPSACCNGTGRCGAPTPTSSTP

SEQ ID NO: 4316 - protein, 371 aa, Zea mays subsp. mays
  peptide (1)..(371): Ceres Seq. ID no. 12406510
  misc_feature (1)..(353): Homolog of NCBI NO: 34895168 NR Description: putative cytochrome P450 [Oryza sativa (japonica group)] >gi|21104826|dbj|BAB93411.1| putative cytochrome P450
  misc_feature (1)..(353): Homolog of NCBI NO: 34913354 NR Description: putative cytochrome P450 [Oryza sativa (japonica group)] >gi|22293694|dbj|BAC10039.1| putative cytochrome P450
  misc_feature (1)..(353): Homolog of NCBI NO: 38112707 NR Description: cytochrome P450 [Triticum aestivum]
  misc_feature (1)..(353): Homolog of NCBI NO: 22324446 NR Description: putative cytochrome P450 [Oryza sativa (japonica
  misc_feature (1)..(353): Homolog of NCBI NO: 34913346 NR Description: putative cytochrome P450 [Oryza sativa (japonica group)] >gi|22093840|dbj|BAC07127.1| putative cytochrome P450
  misc_feature (1)..(353): Homolog of NCBI NO: 34913362 NR Description: putative cytochrome P450 [Oryza sativa (japonica group)] >gi|22293698|dbj|BAC10043.1| putative cytochrome P450
  misc_feature (1)..(345): Homolog of NCBI NO: 34896952 NR Description: putative cytochrome P450-related protein [Oryza
  misc_feature (1)..(353): Homolog of NCBI NO: 14719280 NR Description: cytochrome P450 [Zea mays]
  misc_feature (1)..(345): Homolog of NCBI NO: 15226472 NR Description: cytochrome p450, putative; protein id: [Arabidopsis thaliana] >gi|7430708|pir||T02192 probable
  misc_feature (1)..(345): Homolog of NCBI NO: 15234248 NR Description: cytochrome P450 - like protein; protein id: [Arabidopsis thaliana] >gi|7484900|pir||T05876 cytochrome P450
MPILLPPFHRWVVEYGRTFLYWIGPTPAIFSVDLELIKEVLTDRTGLFGKDFMIPVFKVLLGNGLILANGDDWKRHRKVVLPAFNHERIKSMSAVTAEATEQMAQRWCEQLILHSGARQAAEIQVDRAICDLTAEIIGRAAFGTSLQEAGEVLLLMHEMQKMGAAAMVDAPILWYLPTRRNLTVRRLDKLLRAKITAMMAARVAANCGGGYGDDLLGLLLEAWSPEPGRRHAGSDDEGTTTTTLTTGEVIDECKTFFGAGQETTATLLVWTMFLLSTHPQWQDKVREEVLREFRGDVPTTDTLSRLKLLHMVLLETLRLYPPIVYIQRRTASDVVLRGMLQVPRGPWYRSPSACCNGTGRCGAPTPTSSTP

SEQ ID NO: 4317 - protein, 319 aa, Zea mays subsp. mays
  peptide (1)..(319): Ceres Seq. ID no. 12406511
  misc_feature (1)..(301): Homolog of NCBI NO: 34895168 NR Description: putative cytochrome P450 [Oryza sativa (japonica group)] >gi|21104826|dbj|BAB93411.1| putative cytochrome P450
  misc_feature (1)..(301): Homolog of NCBI NO: 34913354 NR Description: putative cytochrome P450 [Oryza sativa (japonica group)] >gi|22293694|dbj|BAC10039.1| putative cytochrome P450
  misc_feature (1)..(301): Homolog of NCBI NO: 38112707 NR Description: cytochrome P450 [Triticum aestivum]
  misc_feature (1)..(301): Homolog of NCBI NO: 22324446 NR Description: putative cytochrome P450 [Oryza sativa (japonica
  misc_feature (1)..(301): Homolog of NCBI NO: 34913346 NR Description: putative cytochrome P450 [Oryza sativa (japonica group)] >gi|22093840|dbj|BAC07127.1| putative cytochrome P450
  misc_feature (1)..(301): Homolog of NCBI NO: 34913362 NR Description: putative cytochrome P450 [Oryza sativa (japonica group)] >gi|22293698|dbj|BAC10043.1| putative cytochrome P450
  misc_feature (1)..(293): Homolog of NCBI NO: 34896952 NR Description: putative cytochrome P450-related protein [Oryza
  misc_feature (1)..(301): Homolog of NCBI NO: 14719280 NR Description: cytochrome P450 [Zea mays]
  misc_feature (1)..(293): Homolog of NCBI NO: 15226472 NR Description: cytochrome p450, putative; protein id: [Arabidopsis thaliana] >gi|7430708|pir||T02192 probable
  misc_feature (1)..(293): Homolog of NCBI NO: 15234248 NR Description: cytochrome P450 - like protein; protein id: [Arabidopsis thaliana] >gi|7484900|pir||T05876 cytochrome P450
MIPVFKVLLGNGLILANGDDWKRHRKVVLPAFNHERIKSMSAVTAEATEQMAQRWCEQLILHSGARQAAEIQVDRAICDLTAEIIGRAAFGTSLQEAGEVLLLMHEMQKMGAAAMVDAPILWYLPTRRNLTVRRLDKLLRAKITAMMAARVAANCGGGYGDDLLGLLLEAWSPEPGRRHAGSDDEGTTTTTLTTGEVIDECKTFFGAGQETTATLLVWTMFLLSTHPQWQDKVREEVLREFRGDVPTTDTLSRLKLLHMVLLETLRLYPPIVYIQRRTASDVVLRGMLQVPRGPWYRSPSACCNGTGRCGAPTPTSSTP

SEQ ID NO: 4318 - DNA, 1320 bp, Zea mays subsp. mays
  misc_feature (1)..(1320): Ceres Seq. ID no. 12347913
  misc_feature: MA Experiment ID: 108523 Result: Up-regulated in Transcription
  misc_feature: MA Experiment 108523 PARAMETER Experiment Name: Zm_42deg_Heat_P Parameter: Age (day) Value: 8
  misc_feature: MA Experiment 108523 PARAMETER Experiment Name: Zm_42deg_Heat_P Parameter: Organism Value: Zea mays
  misc_feature: MA Experiment 108523 PARAMETER Experiment Name: Zm_42deg_Heat_P Parameter: Plant Line Value: 35A19
  misc_feature: MA Experiment 108523 PARAMETER Experiment Name: Zm_42deg_Heat_P Parameter: Temperature (deg C) Value: 42 vs. 22
  misc_feature: MA Experiment 108523 PARAMETER Experiment Name: Zm_42deg_Heat_P Parameter: Timepoint (hr) Value: 6
  misc_feature: MA Experiment 108523 PARAMETER Experiment Name: Zm_42deg_Heat_P Parameter: Tissue Value: Aerial
  misc_feature: MA Experiment ID: 20000487 Result: Up-regulated in Transcription
  misc_feature: MA Experiment 20000487 PARAMETER Experiment Name: Zm_50mM_NH4NO3_L_to_H_P Parameter: Organism Value: Zea mays
  misc_feature: MA Experiment 20000487 PARAMETER Experiment Name: Zm_50mM_NH4NO3_L_to_H_P Parameter: Timepoint (hr) Value: 4
  misc_feature: MA Experiment 20000487 PARAMETER Experiment Name: Zm_50mM_NH4NO3_L_to_H_P Parameter: Tissue Value: Leaves
  misc_feature: MA Experiment 20000487 PARAMETER Experiment Name: Zm_50mM_NH4NO3_L_to_H_P Parameter: Treatment Value: 50mM NH4NO3 vs. 100mM Mannitol
agggttgttggagacggcctaaacccttctccatccgacggcgaacaccagcttccctccgcccgcccacatccctgctgtcagctgcgcctccccgcctgatcttgtcgcgcccgagagaccgcgggccagggaacgtcggccgccggagcctggcctgcattccgggggcagcgagaggatgttgcgttgcgcatacacgcagcggcggtgggcgcaccgccgggggggcttcgtaaccggcagcaccggttggtccaagccgccaccgccgagcctcggccgcgccgcgggggttggtacgaagaagtcggagtggtggacggtggacggggagatgcacgagatcggggaaagcgtgccgcatcgcgagcgcttcgccatcccgcgggacaacctccctaaccgccgccgcaagcagatgcgggagcaattcatgcgccgcacccgcctcgttctcaaagactcggaacacgaaacatggtgcaaaaagtacatggaattataccaagaacttagagaaaactgggaaaggttgtactgggacgaaggttattcaaaaaagattgctgaatctcatgctaattatgactctgccgaagaagatgatattgacttctcgccatacagcaggagaaggcagtccaatgtagaaccaaacaaggaccttggcttcggggtgaacaaacgaggtgaaacgtgggaaagggttactcaaattcgtgacaaatttgaatatgacagagaaaggagaatgagagaacgagcatttgctcccatgaacacggagaacaattttgctcggcgtgacccaagatttagaagccaggatgattcaagttttgctcatacgaacttgagtgatgattttggcttgcatgatcaaacttttggaaaccgttctgatcaaagttatgaaaatgagtcaaatttcaggaataagcgtgattcaagtttccaacatgaaccaagtgtcagaaaccagcgtaatttaaatatccaaaacgaaccaagtttcagaaaccaccgatatccagatttccaaaaccaaggtggcacaagaagtcagacatttgatgagtagagggtgaaaaaaaaagtggctgctgatttgctggcaacgtgagcatgctggttctgctgatttctgtggtggctcgtatgagatgttgtaatttcttctaaaatgattggtgtaagaaattatctcttgtggtagctggttgcaacaaaatagaaaggaagagatctgctgttgtaatcttgtaatatacgttggctacttactaagccaaaaaccgtaagcatcggattttgggc

SEQ ID NO: 4319 - protein, 300 aa, Zea mays subsp. mays
  peptide (1)..(300): Ceres Seq. ID no. 12347914
  misc_feature (1)..(187): Homolog of NCBI NO: 26452083 NR Description: unknown protein [Arabidopsis thaliana]
  misc_feature (42)..(216): Homolog of NCBI NO: 15231465 NR Description: unknown protein; protein id: At3g07440.1
MLRCAYTQRRWAHRRGGFVTGSTGWSKPPPPSLGRAAGVGTKKSEWWTVDGEMHEIGESVPHRERFAIPRDNLPNRRRKQMREQFMRRTRLVLKDSEHETWCKKYMELYQELRENWERLYWDEGYSKKIAESHANYDSAEEDDIDFSPYSRRRQSNVEPNKDLGFGVNKRGETWERVTQIRDKFEYDRERRMRERAFAPMNTENNFARRDPRFRSQDDSSFAHTNLSDDFGLHDQTFGNRSDQSYENESNFRNKRDSSFQHEPSVRNQRNLNIQNEPSFRNHRYPDFQNQGGTRSQTFDE

SEQ ID NO: 4320 - protein, 248 aa, Zea mays subsp. mays
  peptide (1)..(248): Ceres Seq. ID no. 12347915
  misc_feature (1)..(135): Homolog of NCBI NO: 26452083 NR Description: unknown protein [Arabidopsis thaliana]
  misc_feature (1)..(164): Homolog of NCBI NO: 15231465 NR Description: unknown protein; protein id: At3g07440.1
MHEIGESVPHRERFAIPRDNLPNRRRKQMREQFMRRTRLVLKDSEHETWCKKYMELYQELRENWERLYWDEGYSKKIAESHANYDSAEEDDIDFSPYSRRRQSNVEPNKDLGFGVNKRGETWERVTQIRDKFEYDRERRMRERAFAPMNTENNFARRDPRFRSQDDSSFAHTNLSDDFGLHDQTFGNRSDQSYENESNFRNKRDSSFQHEPSVRNQRNLNIQNEPSFRNHRYPDFQNQGGTRSQTFDE

SEQ ID NO: 4321 - protein, 220 aa, Zea mays subsp. mays
  peptide (1)..(220): Ceres Seq. ID no. 12347916
  misc_feature (1)..(107): Homolog of NCBI NO: 26452083 NR Description: unknown protein [Arabidopsis thaliana]
  misc_feature (1)..(136): Homolog of NCBI NO: 15231465 NR Description: unknown protein; protein id: At3g07440.1
MREQFMRRTRLVLKDSEHETWCKKYMELYQELRENWERLYWDEGYSKKIAESHANYDSAEEDDIDFSPYSRRRQSNVEPNKDLGFGVNKRGETWERVTQIRDKFEYDRERRMRERAFAPMNTENNFARRDPRFRSQDDSSFAHTNLSDDFGLHDQTFGNRSDQSYENESNFRNKRDSSFQHEPSVRNQRNLNIQNEPSFRNHRYPDFQNQGGTRSQTFDE

SEQ ID NO: 4322 - DNA, 1000 bp, Zea mays subsp. mays
  misc_feature (1)..(1000): Ceres Seq. ID no. 12409957
  misc_feature: MA Experiment ID: 20000487 Result: Up-regulated in Transcription
  misc_feature: MA Experiment 20000487 PARAMETER Experiment Name: Zm_50mM_NH4NO3_L_to_H_P Parameter: Organism Value: Zea mays
  misc_feature: MA Experiment 20000487 PARAMETER Experiment Name: Zm_50mM_NH4NO3_L_to_H_P Parameter: Timepoint (hr) Value: 4
  misc_feature: MA Experiment 20000487 PARAMETER Experiment Name: Zm_50mM_NH4NO3_L_to_H_P Parameter: Tissue Value: Leaves
  misc_feature: MA Experiment 20000487 PARAMETER Experiment Name: Zm_50mM_NH4NO3_L_to_H_P Parameter: Treatment Value: 50mM NH4NO3 vs. 100mM Mannitol
  misc_feature: MA Experiment ID: 20000492 Result: Up-regulated in Transcription
  misc_feature: MA Experiment 20000492 PARAMETER Experiment Name: Zm_Hybrid_Seed_Dev_P Parameter: DAP Value: 12
  misc_feature: MA Experiment 20000492 PARAMETER Experiment Name: Zm_Hybrid_Seed_Dev_P Parameter: Organism Value: Zea mays
  misc_feature: MA Experiment 20000492 PARAMETER Experiment Name: Zm_Hybrid_Seed_Dev_P Parameter: Plant Line Value: 35A19
  misc_feature: MA Experiment 20000492 PARAMETER Experiment Name: Zm_Hybrid_Seed_Dev_P Parameter: Tissue Value: Fert Kernel vs. Unfert Floret
acacgctcggctgagcactttcccgccgtcttcagaccgtcacaccctcggtcgtgacaggtttctgcctccactgccttccccgccgccgccatgccctcctccgccgcccgggccctcacatccgtctcccgcgcagccttctcctggaagccgacggggcggccgcagcaaacgctggcggcggcggtgagcaggtcgggcgtggggctccactcgggagcgcgcgtcaccgccacgctgtttccgacgcaagctggagagggtaggtatttcctcgtggagggtgatgaggaggcgagggtggcggcagaggtggggaacgccgagccactgtcgcagctctgcacgacgcttcgtcggggcgatggcgcccacacgcgggtccggacggtggaacaccttctttcggcgatggaggcgcttggcgtcgacaactgccgtatcgaggttagcggcggggatgagattcctttgcttgatggatcagcgcaagagtgggtagaggcagtacaaggcgttggcttgtgtgcggcagaggatgccaatggggaaaagttggataaactggcgcctgaaattcaggagcctgtttacctacggaaacacgattgctttatagctgcattccctagcccacaaatccacataacctgtggcattgatttcccaaaggtgccagcgattgagtgtcaatgggtttctacattcctggatgataatatatactcaagcaagattgcgcctgcaagaactttctgtatatttgaagaggttgaaaaaatgcgtgctgctggactcatcaaaggagggtcactagaaaatgctatggtttgcagcatatctggtggctggctgaatccaccactgcggttcgaggatgagcttccgccacaagattttagatcttattggtgacttctcgctgtttgcacagaatggtaaccagggctttccaattgctcatataattgcctataaggctggtcacgcgctgcac

SEQ ID NO: 4323 - protein, 274 aa, Zea mays subsp. mays
  peptide (1)..(274): Ceres Seq. ID no. 12409958
  misc_feature (25)..(264): Pfam Name: UDP-3-O-acyl N-acetylglycosamine deacetylase Pfam Description: UDP-3-O-acyl N-acetylglycosamine deacetylase
  misc_feature (7)..(264): Homolog of NCBI NO: 26451306 NR Description: unknown protein [Arabidopsis thaliana]
  misc_feature (1)..(248): Homolog of NCBI NO: 35190846 NR Description: OJ1743A09.22 [Oryza sativa (japonica
  misc_feature (7)..(251): Homolog of NCBI NO: 20453133 NR Description: At1g25190/F4F7_4 [Arabidopsis thaliana]
  misc_feature (7)..(264): Homolog of NCBI NO: 15221839 NR Description: F5A9.8; protein id: At1g25054.1 [Arabidopsis
  misc_feature (7)..(264): Homolog of NCBI NO: 25518507 NR Description: hypothetical protein F4F7.4 [imported] -
  misc_feature (7)..(264): Homolog of NCBI NO: 30689101 NR Description: expressed protein [Arabidopsis thaliana]
  misc_feature (7)..(264): Homolog of NCBI NO: 25518320 NR Description: hypothetical protein F4F7.1 [imported] -
  misc_feature (7)..(260): Homolog of NCBI NO: 15221809 NR Description: F5A9.18; protein id: At1g24793.1 [Arabidopsis
  misc_feature (26)..(264): Homolog of NCBI NO: 17229762 NR Description: UDP-3-O-acyl N-acetylglucosamine deacetylase
  misc_feature (1)..(264): Homolog of NCBI NO: 34902272 NR Description: Hypothetical protein [Oryza sativa (japonica
MPSSAARALTSVSRAAFSWKPTGRPQQTLAAAVSRSGVGLHSGARVTATLFPTQAGEGRYFLVEGDEEARVAAEVGNAEPLSQLCTTLRRGDGAHTRVRTVEHLLSAMEALGVDNCRIEVSGGDEIPLLDGSAQEWVEAVQGVGLCAAEDANGEKLDKLAPEIQEPVYLRKHDCFIAAFPSPQIHITCGIDFPKVPAIECQWVSTFLDDNIYSSKIAPARTFCIFEEVEKMRAAGLIKGGSLENAMVCSISGGWLNPPLRFEDELPPQDFRSYW

SEQ ID NO: 4324 - protein, 167 aa, Zea mays subsp. mays
  peptide (1)..(167): Ceres Seq. ID no. 12409959
  misc_feature (1)..(157): Pfam Name: UDP-3-O-acyl N-acetylglycosamine deacetylase Pfam Description: UDP-3-O-acyl N-acetylglycosamine deacetylase
  misc_feature (1)..(157): Homolog of NCBI NO: 17229762 NR Description: UDP-3-O-acyl N-acetylglucosamine deacetylase
  misc_feature (1)..(144): Homolog of NCBI NO: 20453133 NR Description: At1g25190/F4F7_4 [Arabidopsis thaliana]
  misc_feature (1)..(153): Homolog of NCBI NO: 15221809 NR Description: F5A9.18; protein id: At1g24793.1 [Arabidopsis
  misc_feature (1)..(157): Homolog of NCBI NO: 15221839 NR Description: F5A9.8; protein id: At1g25054.1 [Arabidopsis
  misc_feature (1)..(157): Homolog of NCBI NO: 25518320 NR Description: hypothetical protein F4F7.1 [imported] -
  misc_feature (1)..(157): Homolog of NCBI NO: 25518507 NR Description: hypothetical protein F4F7.4 [imported] -
  misc_feature (1)..(157): Homolog of NCBI NO: 30689101 NR Description: expressed protein [Arabidopsis thaliana]
  misc_feature (1)..(157): Homolog of NCBI NO: 26451306 NR Description: unknown protein [Arabidopsis thaliana]
  misc_feature (1)..(141): Homolog of NCBI NO: 35190846 NR Description: OJ1743A09.22 [Oryza sativa (japonica
  misc_feature (1)..(157): Homolog of NCBI NO: 34902272 NR Description: Hypothetical protein [Oryza sativa (japonica
MEALGVDNCRIEVSGGDEIPLLDGSAQEWVEAVQGVGLCAAEDANGEKLDKLAPEIQEPVYLRKHDCFIAAFPSPQIHITCGIDFPKVPAIECQWVSTFLDDNIYSSKIAPARTFCIFEEVEKMRAAGLIKGGSLENAMVCSISGGWLNPPLRFEDELPPQDFRSYW

SEQ ID NO: 4325 - DNA, 1391 bp, Zea mays subsp. mays
  misc_feature (1)..(1391): Ceres Seq. ID no. 12348999
  misc_feature: MA Experiment ID: 108535 Result: Up-regulated in Transcription
  misc_feature: MA Experiment 108535 PARAMETER Experiment Name: Zm_Meristem_P Parameter: Age (day) Value: 8
  misc_feature: MA Experiment 108535 PARAMETER Experiment Name: Zm_Meristem_P Parameter: Organism Value: Zea mays
  misc_feature: MA Experiment 108535 PARAMETER Experiment Name: Zm_Meristem_P Parameter: Plant Line Value: 35A19
  misc_feature: MA Experiment 108535 PARAMETER Experiment Name: Zm_Meristem_P Parameter: Tissue Value: Root Meristem vs. Above Root Meristem
  misc_feature: MA Experiment ID: 108543 Result: Up-regulated in Transcription
  misc_feature: MA Experiment ID: 108544 Result: Down-regulated in Transcription
  misc_feature: MA Experiment ID: 108556 Result: Down-regulated in Transcription
  misc_feature: MA Experiment 108556 PARAMETER Experiment Name: Zm_Drought_P Parameter: Age (day) Value: 9
  misc_feature: MA Experiment 108556 PARAMETER Experiment Name: Zm_Drought_P Parameter: Organism Value: Zea mays
  misc_feature: MA Experiment 108556 PARAMETER Experiment Name: Zm_Drought_P Parameter: Plant Line Value: 35A19
  misc_feature: MA Experiment 108556 PARAMETER Experiment Name: Zm_Drought_P Parameter: Timepoint (hr) Value: 24
  misc_feature: MA Experiment 108556 PARAMETER Experiment Name: Zm_Drought_P Parameter: Tissue Value: Aerial
  misc_feature: MA Experiment 108556 PARAMETER Experiment Name: Zm_Drought_P Parameter: Treatment Value: Drought vs. No Drought
  misc_feature: MA Experiment ID: 20000108 Result: Up-regulated in Transcription
  misc_feature: MA Experiment 20000108 PARAMETER Experiment Name: Zm_Root-Tips_P Parameter: Age (day) Value: 12
  misc_feature: MA Experiment 20000108 PARAMETER Experiment Name: Zm_Root-Tips_P Parameter: Organism Value: Zea mays
  misc_feature: MA Experiment 20000108 PARAMETER Experiment Name: Zm_Root-Tips_P Parameter: Tissue Value: Root tips vs. Root mid region    35
  misc_feature: MA Experiment 20000108 PARAMETER Experiment Name: Zm_Root-Tips_P Parameter: Tissue Value: Root tips vs. Root mid region   Sequence Listing-Misc Features (4)
  misc_feature: MA Experiment ID: 20000477 Result: Down-regulated in Transcription
  misc_feature: MA Experiment 20000477 PARAMETER Experiment Name: Zm_5mM_SA_P Parameter: Age (day) Value: 10
  misc_feature: MA Experiment 20000477 PARAMETER Experiment Name: Zm_5mM_SA_P Parameter: Organism Value: Zea mays
  misc_feature: MA Experiment 20000477 PARAMETER Experiment Name: Zm_5mM_SA_P Parameter: Plant Line Value: 35A19
  misc_feature: MA Experiment 20000477 PARAMETER Experiment Name: Zm_5mM_SA_P Parameter: Timepoint (hr) Value: 48
  misc_feature: MA Experiment 20000477 PARAMETER Experiment Name: Zm_5mM_SA_P Parameter: Tissue Value: Aerial
  misc_feature: MA Experiment 20000477 PARAMETER Experiment Name: Zm_5mM_SA_P Parameter: Treatment Value: 5mM SA vs. No Treatment
  misc_feature: MA Experiment ID: 20000478 Result: Down-regulated in Transcription
  misc_feature: MA Experiment 20000478 PARAMETER Experiment Name: Zm_5mM_SA_P Parameter: Age (day) Value: 11
  misc_feature: MA Experiment 20000478 PARAMETER Experiment Name: Zm_5mM_SA_P Parameter: Organism Value: Zea mays
  misc_feature: MA Experiment 20000478 PARAMETER Experiment Name: Zm_5mM_SA_P Parameter: Plant Line Value: 35A19
  misc_feature: MA Experiment 20000478 PARAMETER Experiment Name: Zm_5mM_SA_P Parameter: Timepoint (hr) Value: 72
  misc_feature: MA Experiment 20000478 PARAMETER Experiment Name: Zm_5mM_SA_P Parameter: Tissue Value: Aerial
  misc_feature: MA Experiment 20000478 PARAMETER Experiment Name: Zm_5mM_SA_P Parameter: Treatment Value: 5mM SA vs. No Treatment
  misc_feature: MA Experiment ID: 20000479 Result: Down-regulated in Transcription
  misc_feature: MA Experiment 20000479 PARAMETER Experiment Name: Zm_Drought_P Parameter: Age (day) Value: 10
  misc_feature: MA Experiment 20000479 PARAMETER Experiment Name: Zm_Drought_P Parameter: Organism Value: Zea mays
  misc_feature: MA Experiment 20000479 PARAMETER Experiment Name: Zm_Drought_P Parameter: Plant Line Value: 35A19
  misc_feature: MA Experiment 20000479 PARAMETER Experiment Name: Zm_Drought_P Parameter: Timepoint (hr) Value: 48
  misc_feature: MA Experiment 20000479 PARAMETER Experiment Name: Zm_Drought_P Parameter: Tissue Value: Aerial
  misc_feature: MA Experiment 20000479 PARAMETER Experiment Name: Zm_Drought_P Parameter: Treatment Value: Drought vs. No Drought
  misc_feature: MA Experiment ID: 20000480 Result: Down-regulated in Transcription
  misc_feature: MA Experiment 20000480 PARAMETER Experiment Name: Zm_Drought_P Parameter: Age (day) Value: 11
  misc_feature: MA Experiment 20000480 PARAMETER Experiment Name: Zm_Drought_P Parameter: Organism Value: Zea mays
  misc_feature: MA Experiment 20000480 PARAMETER Experiment Name: Zm_Drought_P Parameter: Plant Line Value: 35A19
  misc_feature: MA Experiment 20000480 PARAMETER Experiment Name: Zm_Drought_P Parameter: Timepoint (hr) Value: 72
  misc_feature: MA Experiment 20000480 PARAMETER Experiment Name: Zm_Drought_P Parameter: Tissue Value: Aerial
  misc_feature: MA Experiment 20000480 PARAMETER Experiment Name: Zm_Drought_P Parameter: Treatment Value: Drought vs. No Drought
  misc_feature: MA Experiment ID: 20000626 Result: Down-regulated in Transcription
  misc_feature: MA Experiment 20000626 PARAMETER Experiment Name: Zm_Herbicide-Treatments_P Parameter: Timepoint (hr) Value: 12
  misc_feature: MA Experiment 20000626 PARAMETER Experiment Name: Zm_Herbicide-Treatments_P Parameter: Tissue Value: Aerial
  misc_feature: MA Experiment 20000626 PARAMETER Experiment Name: Zm_Herbicide-Treatments_P Parameter: Treatment Value: Roundup vs. No Treatment
atcctgaacccgaaagctgaactaccacacacaacaaataactgacgcaggcgatccatcactccacacaccggtcggaaccgaggccaaccaacgacgccgccgccaatgtcgtcccctgcagcgccggtgcagccgccgccgccgcgcgcggtgcgcttcggcgtcctgggatgcgctgacattgcgcgtaagatctcgcgcgcaatgctgatgctccctccgggcgccgccaccatcgccgccgtaggcagtcgctccgatgacaaggcccgccgcttcatctccgaaatcggcttccccgcggcgcgcgtccacgggtcctacgagtctctcctagaggacccggacgtggaggccgtgtacctcccgctccccaccagtctccacgtgccctgggccacagccgtcgctgcgcgtggcaagcacctgctcctcgagaagcccaccgcgctctgcactgccgaactcgacgccatcctcggcgcctgcgacgcctccggggtccagttcatggacaccaccatgtggatccacaacccgcgcaccgccaagatgcgggagatcgtcagcgacaaggacgcctttggcgacgtcagagtgataaacagtatgtgcagctttcgggcatccgaggaattcctcaagaatgacatcagggtaaagccagaccttgacgccttgggtgtcctcggtgatgttggatggtactgcatccgctcaatcctgtgggctgttgactatgagctgcctgagaccgtgatcgctcaccgccatcctgtcaagaaccaggctggcgtgctccttgcttgcggtgcgaccttgtactgggcagatggcaagactgcaaacttcaactgctcgtttcttgctaacctcgcctttgacgtgaccgtctatggcacaaacggcactctccatgtcactgacctggtcattccgtacgaagagagctctgcggagttcagtgtggcctcgaagtcaagcttcgtcaaacccaccatcggatgggatccattgccagagaagcatgttgttactactgatctgccacaggaggcactcatgatccaggaattcacaaggcttgtgcagaacgtccgcgccggtggcaggcctgagggtaagtggccggctatcacccggaagacgcaggtggtactggatgccgtgaaagcttctattgacaagggatctgaaccagttgaggttgccagctaaatacaacaaatgccagctccttgtgctaggtttgtacttaatggcttctactcgtatttgctgtcgcgcaaatgaaggtagtaattgtaatactgtcacgtaaattgaaactggtaattgtaataatcttaaggaatctggtcaaattgaggagaacatttttacagttt

SEQ ID NO: 4326 - protein, 370 aa, Zea mays subsp. mays
  peptide (1)..(370): Ceres Seq. ID no. 12349000
  misc_feature (151)..(263): Pfam Name: Oxidoreductase family, C-terminal alpha/beta domain Pfam Description: Oxidoreductase family, C-terminal alpha/beta
  misc_feature (16)..(279): Homolog of NCBI NO: 15616405 NR Description: oxidoreductase [Bacillus halodurans]
  misc_feature (17)..(358): Homolog of NCBI NO: 32474689 NR Description: putative oxidoreductase [Pirellula sp.]
  misc_feature (1)..(366): Homolog of NCBI NO: 17549134 NR Description: CONSERVED HYPOTHETICAL PROTEIN [Ralstonia
  misc_feature (14)..(368): Homolog of NCBI NO: 15218937 NR Description: oxidoreductase, putative; protein id: At1g66130.1
  misc_feature (16)..(366): Homolog of NCBI NO: 25518452 NR Description: hypothetical protein F23M19.12 [imported] -
  misc_feature (16)..(366): Homolog of NCBI NO: 18399170 NR Description: expressed protein
  misc_feature (37)..(369): Homolog of NCBI NO: 21954073 NR Description: putative AX110P protein [Arabidopsis thaliana]
  misc_feature (16)..(359): Homolog of NCBI NO: 7488933 NR Description: protein AX110P - carrot
  misc_feature (16)..(369): Homolog of NCBI NO: 15233990 NR Description: AX110P -like protein
  misc_feature (2)..(325): Homolog of NCBI NO: 37534168 NR Description: putative oxidoreductase [Oryza sativa (japonica
MSSPAAPVQPPPPRAVRFGVLGCADIARKISRAMLMLPPGAATIAAVGSRSDDKARRFISEIGFPAARVHGSYESLLEDPDVEAVYLPLPTSLHVPWATAVAARGKHLLLEKPTALCTAELDAILGACDASGVQFMDTTMWIHNPRTAKMREIVSDKDAFGDVRVINSMCSFRASEEFLKNDIRVKPDLDALGVLGDVGWYCIRSILWAVDYELPETVIAHRHPVKNQAGVLLACGATLYWADGKTANFNCSFLANLAFDVTVYGTNGTLHVTDLVIPYEESSAEFSVASKSSFVKPTIGWDPLPEKHVVTTDLPQEALMIQEFTRLVQNVRAGGRPEGKWPAITRKTQVVLDAVKASIDKGSEPVEVAS

SEQ ID NO: 4327 - protein, 337 aa, Zea mays subsp. mays
  peptide (1)..(337): Ceres Seq. ID no. 12349001
  misc_feature (118)..(230): Pfam Name: Oxidoreductase family, C-terminal alpha/beta domain Pfam Description: Oxidoreductase family, C-terminal alpha/beta
  misc_feature (1)..(246): Homolog of NCBI NO: 15616405 NR Description: oxidoreductase [Bacillus halodurans]
  misc_feature (1)..(325): Homolog of NCBI NO: 32474689 NR Description: putative oxidoreductase [Pirellula sp.]
  misc_feature (1)..(333): Homolog of NCBI NO: 17549134 NR Description: CONSERVED HYPOTHETICAL PROTEIN [Ralstonia
  misc_feature (1)..(335): Homolog of NCBI NO: 15218937 NR Description: oxidoreductase, putative; protein id: At1g66130.1
  misc_feature (1)..(333): Homolog of NCBI NO: 25518452 NR Description: hypothetical protein F23M19.12 [imported] -
  misc_feature (1)..(333): Homolog of NCBI NO: 18399170 NR Description: expressed protein
  misc_feature (4)..(336): Homolog of NCBI NO: 21954073 NR Description: putative AX110P protein [Arabidopsis thaliana]
  misc_feature (1)..(326): Homolog of NCBI NO: 7488933 NR Description: protein AX110P - carrot
  misc_feature (1)..(336): Homolog of NCBI NO: 15233990 NR Description: AX110P -like protein
  misc_feature (1)..(292): Homolog of NCBI NO: 37534168 NR Description: putative oxidoreductase [Oryza sativa (japonica
MLMLPPGAATIAAVGSRSDDKARRFISEIGFPAARVHGSYESLLEDPDVEAVYLPLPTSLHVPWATAVAARGKHLLLEKPTALCTAELDAILGACDASGVQFMDTTMWIHNPRTAKMREIVSDKDAFGDVRVINSMCSFRASEEFLKNDIRVKPDLDALGVLGDVGWYCIRSILWAVDYELPETVIAHRHPVKNQAGVLLACGATLYWADGKTANFNCSFLANLAFDVTVYGTNGTLHVTDLVIPYEESSAEFSVASKSSFVKPTIGWDPLPEKHVVTTDLPQEALMIQEFTRLVQNVRAGGRPEGKWPAITRKTQVVLDAVKASIDKGSEPVEVAS

SEQ ID NO: 4328 - protein, 335 aa, Zea mays subsp. mays
  peptide (1)..(335): Ceres Seq. ID no. 12349002
  misc_feature (116)..(228): Pfam Name: Oxidoreductase family, C-terminal alpha/beta domain Pfam Description: Oxidoreductase family, C-terminal alpha/beta
  misc_feature (1)..(244): Homolog of NCBI NO: 15616405 NR Description: oxidoreductase [Bacillus halodurans]
  misc_feature (1)..(323): Homolog of NCBI NO: 32474689 NR Description: putative oxidoreductase [Pirellula sp.]
  misc_feature (1)..(331): Homolog of NCBI NO: 17549134 NR Description: CONSERVED HYPOTHETICAL PROTEIN [Ralstonia
  misc_feature (1)..(333): Homolog of NCBI NO: 15218937 NR Description: oxidoreductase, putative; protein id: At1g66130.1
  misc_feature (1)..(331): Homolog of NCBI NO: 25518452 NR Description: hypothetical protein F23M19.12 [imported] -
  misc_feature (1)..(331): Homolog of NCBI NO: 18399170 NR Description: expressed protein
  misc_feature (2)..(334): Homolog of NCBI NO: 21954073 NR Description: putative AX110P protein [Arabidopsis thaliana]
  misc_feature (1)..(324): Homolog of NCBI NO: 7488933 NR Description: protein AX110P - carrot
  misc_feature (1)..(334): Homolog of NCBI NO: 15233990 NR Description: AX110P -like protein
  misc_feature (1)..(290): Homolog of NCBI NO: 37534168 NR Description: putative oxidoreductase [Oryza sativa (japonica
MLPPGAATIAAVGSRSDDKARRFISEIGFPAARVHGSYESLLEDPDVEAVYLPLPTSLHVPWATAVAARGKHLLLEKPTALCTAELDAILGACDASGVQFMDTTMWIHNPRTAKMREIVSDKDAFGDVRVINSMCSFRASEEFLKNDIRVKPDLDALGVLGDVGWYCIRSILWAVDYELPETVIAHRHPVKNQAGVLLACGATLYWADGKTANFNCSFLANLAFDVTVYGTNGTLHVTDLVIPYEESSAEFSVASKSSFVKPTIGWDPLPEKHVVTTDLPQEALMIQEFTRLVQNVRAGGRPEGKWPAITRKTQVVLDAVKASIDKGSEPVEVAS

SEQ ID NO: 4329 - DNA, 1374 bp, Zea mays subsp. mays
  misc_feature (1)..(1374): Ceres Seq. ID no. 12435065
  misc_feature: MA Experiment ID: 108535 Result: Up-regulated in Transcription
  misc_feature: MA Experiment 108535 PARAMETER Experiment Name: Zm_Meristem_P Parameter: Age (day) Value: 8
  misc_feature: MA Experiment 108535 PARAMETER Experiment Name: Zm_Meristem_P Parameter: Organism Value: Zea mays
  misc_feature: MA Experiment 108535 PARAMETER Experiment Name: Zm_Meristem_P Parameter: Plant Line Value: 35A19
  misc_feature: MA Experiment 108535 PARAMETER Experiment Name: Zm_Meristem_P Parameter: Tissue Value: Root Meristem vs. Above Root Meristem
acgaccgactccctcaattacctgcccgtcccaattgtttccgcaagtcgcccagaccagatttgccagaacgcaacctcggctccgaaaccctagccgcacgcagctgtccacttctactcccctcgcctcgccacacccgccgcgcggcacgatcagacgccatggccgccgagaactactggaggtacgctgatgcgcggcagcagcagcaggcgatggtngccgccgcggcggcgcagcggggatggctcccgcggcgaccgtcgccgcgncccanacggtcgggagtncgncgncgnctatgaaccagcaggctgccgccgccgccatggcgcagcaggccgccgctgcgccgcctctcaagcgcgcgcgccccgacttcggtgatgtgtctggtgggcaagacatgacaggatattatccacgtgaaactgacaggtcaggataccattccctcagagagaacgacacacttggggcatcttatgaccgttacttgcgcaatgggatggcctccgtcggtgcaaatgacacttctagggctgccgggatgggtgctggattggctgcagggatgactgcagggatgggtgctggaatggctgcagggatggctggctatggtgttgatggtcagcgtatgatgggtgttgttggtatggacagcagagggatgggatatggtggcagacctgagccacctcttccgcctgatgcatcaagcactctatatattgagggcttacctgcaaactgcacacgacgggaggtttcacatatatttcgcccatttgttggttttcgtgaagttcgtcttgtcaacaaggagtccagacatcctggtggagatccacatgtgttgtgtttcgtcgattttgacaaccctgctcaggctacaattgctctggaagcattacaaggttataagtttgacgaacacgagcgtgattcagcccatttgcgtctgcaattctcacgctttcccggtccaaggtcagctggtgggcctcgcggtaggcgttaagacgtgcggacctcgtggttgccgaacctatcgtttatacgagcgatccaactacggtgggctaacgcttcgatatgcgctgaatttcggggcggtggctttttagggttcgtcagctcatttcgtgaatgcgtgaaagggacaatgcaataagtgatattctgccatatgttattagatgccgtataatgtgttaggcatggaaagttattcgacatactgtatctgctgccttagctattgtggtctactgtaacttcattaccttgcttcacatccgagacaatttgagtttgttatcatgtggattatctgttttgaaaatgaaaactagatgatgttagcct

SEQ ID NO: 4330 - protein, 259 aa, Zea mays subsp. mays
  peptide (1)..(259): Ceres Seq. ID no. 12435066
  misc_feature (162)..(236): Pfam Name: RNA recognition motif. (a.k.a. RRM, RBD, or RNP domain) Pfam Description: RNA recognition motif. (a.k.a. RRM, RBD, or RNP
  misc_feature (24)..(186): Homolog of NCBI NO: 25553563 NR Description: OSJNBa0038F22.13 [Oryza sativa (japonica
  misc_feature (179)..(259): Homolog of NCBI NO: 25553563 NR Description: OSJNBa0038F22.13 [Oryza sativa (japonica
  misc_feature (40)..(256): Homolog of NCBI NO: 23304837 NR Description: RNA-binding protein [Medicago truncatula]
  misc_feature (38)..(259): Homolog of NCBI NO: 30699215 NR Description: expressed protein [Arabidopsis thaliana]
  misc_feature (110)..(259): Homolog of NCBI NO: 26450151 NR Description: unknown protein [Arabidopsis thaliana]
  misc_feature (39)..(162): Homolog of NCBI NO: 15218968 NR Description: hypothetical protein; protein id: At1g21320.1
  misc_feature (201)..(259): Homolog of NCBI NO: 15218968 NR Description: hypothetical protein; protein id: At1g21320.1
  misc_feature (39)..(259): Homolog of NCBI NO: 25513502 NR Description: F16F4.3 protein - Arabidopsis thaliana
  misc_feature (10)..(10): Xaa is any aa, unknown or other
  misc_feature (11)..(11): Xaa is any aa, unknown or other
  misc_feature (16)..(16): Xaa is any aa, unknown or other
  misc_feature (17)..(17): Xaa is any aa, unknown or other
  misc_feature (18)..(18): Xaa is any aa, unknown or other
  misc_feature (19)..(19): Xaa is any aa, unknown or other
MAPAATVAAXXTVGSXXXXMNQQAAAAAMAQQAAAAPPLKRARPDFGDVSGGQDMTGYYPRETDRSGYHSLRENDTLGASYDRYLRNGMASVGANDTSRAAGMGAGLAAGMTAGMGAGMAAGMAGYGVDGQRMMGVVGMDSRGMGYGGRPEPPLPPDASSTLYIEGLPANCTRREVSHIFRPFVGFREVRLVNKESRHPGGDPHVLCFVDFDNPAQATIALEALQGYKFDEHERDSAHLRLQFSRFPGPRSAGGPRGRR

SEQ ID NO: 4331 - protein, 240 aa, Zea mays subsp. mays
  peptide (1)..(240): Ceres Seq. ID no. 12435067
  misc_feature (143)..(217): Pfam Name: RNA recognition motif. (a.k.a. RRM, RBD, or RNP domain) Pfam Description: RNA recognition motif. (a.k.a. RRM, RBD, or RNP
  misc_feature (5)..(167): Homolog of NCBI NO: 25553563 NR Description: OSJNBa0038F22.13 [Oryza sativa (japonica
  misc_feature (160)..(240): Homolog of NCBI NO: 25553563 NR Description: OSJNBa0038F22.13 [Oryza sativa (japonica
  misc_feature (21)..(237): Homolog of NCBI NO: 23304837 NR Description: RNA-binding protein [Medicago truncatula]
  misc_feature (19)..(240): Homolog of NCBI NO: 30699215 NR Description: expressed protein [Arabidopsis thaliana]
  misc_feature (91)..(240): Homolog of NCBI NO: 26450151 NR Description: unknown protein [Arabidopsis thaliana]
  misc_feature (20)..(143): Homolog of NCBI NO: 15218968 NR Description: hypothetical protein; protein id: At1g21320.1
  misc_feature (182)..(240): Homolog of NCBI NO: 15218968 NR Description: hypothetical protein; protein id: At1g21320.1
  misc_feature (20)..(240): Homolog of NCBI NO: 25513502 NR Description: F16F4.3 protein - Arabidopsis thaliana
MNQQAAAAAMAQQAAAAPPLKRARPDFGDVSGGQDMTGYYPRETDRSGYHSLRENDTLGASYDRYLRNGMASVGANDTSRAAGMGAGLAAGMTAGMGAGMAAGMAGYGVDGQRMMGVVGMDSRGMGYGGRPEPPLPPDASSTLYIEGLPANCTRREVSHIFRPFVGFREVRLVNKESRHPGGDPHVLCFVDFDNPAQATIALEALQGYKFDEHERDSAHLRLQFSRFPGPRSAGGPRGRR

SEQ ID NO: 4332 - protein, 231 aa, Zea mays subsp. mays
  peptide (1)..(231): Ceres Seq. ID no. 12435068
  misc_feature (134)..(208): Pfam Name: RNA recognition motif. (a.k.a. RRM, RBD, or RNP domain) Pfam Description: RNA recognition motif. (a.k.a. RRM, RBD, or RNP
  misc_feature (1)..(158): Homolog of NCBI NO: 25553563 NR Description: OSJNBa0038F22.13 [Oryza sativa (japonica
  misc_feature (151)..(231): Homolog of NCBI NO: 25553563 NR Description: OSJNBa0038F22.13 [Oryza sativa (japonica
  misc_feature (12)..(228): Homolog of NCBI NO: 23304837 NR Description: RNA-binding protein [Medicago truncatula]
  misc_feature (10)..(231): Homolog of NCBI NO: 30699215 NR Description: expressed protein [Arabidopsis thaliana]
  misc_feature (82)..(231): Homolog of NCBI NO: 26450151 NR Description: unknown protein [Arabidopsis thaliana]
  misc_feature (11)..(134): Homolog of NCBI NO: 15218968 NR Description: hypothetical protein; protein id: At1g21320.1
  misc_feature (173)..(231): Homolog of NCBI NO: 15218968 NR Description: hypothetical protein; protein id: At1g21320.1
  misc_feature (11)..(231): Homolog of NCBI NO: 25513502 NR Description: F16F4.3 protein - Arabidopsis thaliana
MAQQAAAAPPLKRARPDFGDVSGGQDMTGYYPRETDRSGYHSLRENDTLGASYDRYLRNGMASVGANDTSRAAGMGAGLAAGMTAGMGAGMAAGMAGYGVDGQRMMGVVGMDSRGMGYGGRPEPPLPPDASSTLYIEGLPANCTRREVSHIFRPFVGFREVRLVNKESRHPGGDPHVLCFVDFDNPAQATIALEALQGYKFDEHERDSAHLRLQFSRFPGPRSAGGPRGRR

SEQ ID NO: 4333 - DNA, 1097 bp, Zea mays subsp. mays
  misc_feature (1)..(1097): Ceres Seq. ID no. 12367604
  misc_feature: MA Experiment ID: 108536 Result: Down-regulated in Transcription
  misc_feature: MA Experiment 108536 PARAMETER Experiment Name: Zm_Meristem_P Parameter: Age (day) Value: 8
  misc_feature: MA Experiment 108536 PARAMETER Experiment Name: Zm_Meristem_P Parameter: Organism Value: Zea mays
  misc_feature: MA Experiment 108536 PARAMETER Experiment Name: Zm_Meristem_P Parameter: Plant Line Value: 35A19
  misc_feature: MA Experiment 108536 PARAMETER Experiment Name: Zm_Meristem_P Parameter: Tissue Value: Shoot Meristem vs. Above Shoot Meristem
  misc_feature: MA Experiment ID: 108543 Result: Up-regulated in Transcription
  misc_feature: MA Experiment ID: 108687 Result: Down-regulated in Transcription
  misc_feature: MA Experiment 108687 PARAMETER Experiment Name: Zm_Embryos-Flowers__P Parameter: Tissue Value: Embryo vs. Aerial+
  misc_feature: MA Experiment ID: 20000480 Result: Down-regulated in Transcription
  misc_feature: MA Experiment 20000480 PARAMETER Experiment Name: Zm_Drought_P Parameter: Age (day) Value: 11
  misc_feature: MA Experiment 20000480 PARAMETER Experiment Name: Zm_Drought_P Parameter: Organism Value: Zea mays
  misc_feature: MA Experiment 20000480 PARAMETER Experiment Name: Zm_Drought_P Parameter: Plant Line Value: 35A19
  misc_feature: MA Experiment 20000480 PARAMETER Experiment Name: Zm_Drought_P Parameter: Timepoint (hr) Value: 72
  misc_feature: MA Experiment 20000480 PARAMETER Experiment Name: Zm_Drought_P Parameter: Tissue Value: Aerial
  misc_feature: MA Experiment 20000480 PARAMETER Experiment Name: Zm_Drought_P Parameter: Treatment Value: Drought vs. No Drought
gctcccctccgcatctccgttcgccatggcatcctcctccgagccctcggcgctgccgacgctcctggtgttccgcgtccgagagctgcggttcctcgcggcgctgcgcgagcggtaccgcgtcctcgacttcttcacgtcgggctcgccgctcgccgccttcctggccgcggcggccggcggcgcggacccgccccgcgcgttggtgaccgtggggggcgactccgtccgcgtggacgccgcgctcctggacgccgtcccgtcgctccgcttcgtccacagcacgggggccgggctggaccacatcgacctcggcgagtgcgcgcgccgcggcgtgggcgtcgccagctccggcacggtctactccaccgacgtcgccgaccacgccgtcggcttgctcgtcgacgtgctccgccgcgtgtccgccgccgaccggttcgtccgccgcgggctctggccgctccacggcgactatcccctcggcagcaagctgggcggcaagcgcgtgggcatcatcggcctgggcaacatcggcacgctgatcgcgaagaggctggcagccttcggctgcgtcatctgctacagctccagaaagcccaaggaatccgtctcctactggtacttccctagcgtccacgacctcgcgtcggaatcggacgtgctcgtcgtcgcgtgcgcgctgaccagggagacgcgccacatcgtgaacaaggacgtgctggcggcgctcgggaaggacggggtcgtggtaaacatcggccggggcccgaacatcgacgaggcggagctggtcgcggcgctcaaggaggggaggatcgccggagccagcctggatgtctttgataaggagcctaaggtgccggcagaggctcttctccatggacaatgtggtgctgacgcatcacgtcgcggtcttcacgacagagtccaggtccgacctccgtgacgtcaccatcagtaaccttgaagctttcttcgccggtaggccgctgcttaacccggtgcttcactcttgatggtttgttcgtgttattgcagcaggtcgatccatgtacgtgtaggaatgtgatttgttgaatacattttattttcgaccc

SEQ ID NO: 4334 - protein, 314 aa, Zea mays subsp. mays
  peptide (1)..(314): Ceres Seq. ID no. 12367605
  misc_feature (125)..(291): Pfam Name: D-isomer specific 2-hydroxyacid dehydrogenase, Pfam Description: D-isomer specific 2-hydroxyacid dehydrogenase,
  misc_feature (35)..(291): Homolog of NCBI NO: 15890302 NR Description: AGR_L_379p [Agrobacterium tumefaciens]
  misc_feature (39)..(286): Homolog of NCBI NO: 23104708 NR Description: hypothetical protein [Azotobacter vinelandii]
  misc_feature (33)..(291): Homolog of NCBI NO: 22979887 NR Description: hypothetical protein [Ralstonia metallidurans]
  misc_feature (78)..(292): Homolog of NCBI NO: 34904262 NR Description: putative Caulobacter crescentus D-isomer specific
  misc_feature (35)..(289): Homolog of NCBI NO: 15220005 NR Description: putative D-isomer specific 2-hydroxyacid
  misc_feature (9)..(289): Homolog of NCBI NO: 15222015 NR Description: hypothetical protein; protein id: At1g12550.1
  misc_feature (9)..(289): Homolog of NCBI NO: 7485630 NR Description: probable glycerate dehydrogenase [imported] -
  misc_feature (9)..(289): Homolog of NCBI NO: 38345308 NR Description: OSJNBb0085F13.13 [Oryza sativa (japonica
  misc_feature (32)..(291): Homolog of NCBI NO: 21636166 NR Description: unknown [Aegilops tauschii]
  misc_feature (9)..(289): Homolog of NCBI NO: 38345306 NR Description: OSJNBb0085F13.6 [Oryza sativa (japonica
LPSASPFAMASSSEPSALPTLLVFRVRELRFLAALRERYRVLDFFTSGSPLAAFLAAAAGGADPPRALVTVGGDSVRVDAALLDAVPSLRFVHSTGAGLDHIDLGECARRGVGVASSGTVYSTDVADHAVGLLVDVLRRVSAADRFVRRGLWPLHGDYPLGSKLGGKRVGIIGLGNIGTLIAKRLAAFGCVICYSSRKPKESVSYWYFPSVHDLASESDVLVVACALTRETRHIVNKDVLAALGKDGVVVNIGRGPNIDEAELVAALKEGRIAGASLDVFDKEPKVPAEALLHGQCGADASRRGLHDRVQVRPP

SEQ ID NO: 4335 - protein, 306 aa, Zea mays subsp. mays
  peptide (1)..(306): Ceres Seq. ID no. 12367606
  misc_feature (117)..(283): Pfam Name: D-isomer specific 2-hydroxyacid dehydrogenase, Pfam Description: D-isomer specific 2-hydroxyacid dehydrogenase,
  misc_feature (27)..(283): Homolog of NCBI NO: 15890302 NR Description: AGR_L_379p [Agrobacterium tumefaciens]
  misc_feature (31)..(278): Homolog of NCBI NO: 23104708 NR Description: hypothetical protein [Azotobacter vinelandii]
  misc_feature (25)..(283): Homolog of NCBI NO: 22979887 NR Description: hypothetical protein [Ralstonia metallidurans]
  misc_feature (70)..(284): Homolog of NCBI NO: 34904262 NR Description: putative Caulobacter crescentus D-isomer specific
  misc_feature (27)..(281): Homolog of NCBI NO: 15220005 NR Description: putative D-isomer specific 2-hydroxyacid
  misc_feature (1)..(281): Homolog of NCBI NO: 15222015 NR Description: hypothetical protein; protein id: At1g12550.1
  misc_feature (1)..(281): Homolog of NCBI NO: 7485630 NR Description: probable glycerate dehydrogenase [imported] -
  misc_feature (1)..(281): Homolog of NCBI NO: 38345308 NR Description: OSJNBb0085F13.13 [Oryza sativa (japonica
  misc_feature (24)..(283): Homolog of NCBI NO: 21636166 NR Description: unknown [Aegilops tauschii]
  misc_feature (1)..(281): Homolog of NCBI NO: 38345306 NR Description: OSJNBb0085F13.6 [Oryza sativa (japonica
MASSSEPSALPTLLVFRVRELRFLAALRERYRVLDFFTSGSPLAAFLAAAAGGADPPRALVTVGGDSVRVDAALLDAVPSLRFVHSTGAGLDHIDLGECARRGVGVASSGTVYSTDVADHAVGLLVDVLRRVSAADRFVRRGLWPLHGDYPLGSKLGGKRVGIIGLGNIGTLIAKRLAAFGCVICYSSRKPKESVSYWYFPSVHDLASESDVLVVACALTRETRHIVNKDVLAALGKDGVVVNIGRGPNIDEAELVAALKEGRIAGASLDVFDKEPKVPAEALLHGQCGADASRRGLHDRVQVRPP

SEQ ID NO: 4336 - protein, 209 aa, Zea mays subsp. mays
  peptide (1)..(209): Ceres Seq. ID no. 12367607
  misc_feature (19)..(179): Pfam Name: HlyD family secretion protein Pfam Description: HlyD family secretion protein
APLRISVRHGILLRALGAADAPGVPRPRAAVPRGAARAVPRPRLLHVGLAARRLPGRGGRRRGPAPRVGDRGGRLRPRGRRAPGRRPVAPLRPQHGGRAGPHRPRRVRAPRRGRRQLRHGLLHRRRRPRRRLARRRAPPRVRRRPVRPPRALAAPRRLSPRQQAGRQARGHHRPGQHRHADREEAGSLRLRHLLQLQKAQGIRLLLVLP

SEQ ID NO: 4337 - DNA, 1017 bp, Zea mays subsp. mays
  misc_feature (1)..(1017): Ceres Seq. ID no. 12409953
  misc_feature: MA Experiment ID: 108528 Result: Down-regulated in Transcription
  misc_feature: MA Experiment 108528 PARAMETER Experiment Name: Zm_Imbibed_Seeds_P Parameter: Age (day) Value: 5 vs. 2
  misc_feature: MA Experiment 108528 PARAMETER Experiment Name: Zm_Imbibed_Seeds_P Parameter: Organism Value: Zea mays
  misc_feature: MA Experiment 108528 PARAMETER Experiment Name: Zm_Imbibed_Seeds_P Parameter: Plant Line Value: 35A19
  misc_feature: MA Experiment 108528 PARAMETER Experiment Name: Zm_Imbibed_Seeds_P Parameter: Tissue Value: Aerial vs. Embryo
  misc_feature: MA Experiment ID: 108529 Result: Down-regulated in Transcription
  misc_feature: MA Experiment 108529 PARAMETER Experiment Name: Zm_Imbibed_Seeds_P Parameter: Age (day) Value: 5 vs. 2
  misc_feature: MA Experiment 108529 PARAMETER Experiment Name: Zm_Imbibed_Seeds_P Parameter: Organism Value: Zea mays
  misc_feature: MA Experiment 108529 PARAMETER Experiment Name: Zm_Imbibed_Seeds_P Parameter: Plant Line Value: 35A19
  misc_feature: MA Experiment 108529 PARAMETER Experiment Name: Zm_Imbibed_Seeds_P Parameter: Tissue Value: Roots vs. Embryo
  misc_feature: MA Experiment ID: 108530 Result: Down-regulated in Transcription
  misc_feature: MA Experiment 108530 PARAMETER Experiment Name: Zm_Imbibed_Seeds_P Parameter: Age (day) Value: 6 vs. 2
  misc_feature: MA Experiment 108530 PARAMETER Experiment Name: Zm_Imbibed_Seeds_P Parameter: Organism Value: Zea mays
  misc_feature: MA Experiment 108530 PARAMETER Experiment Name: Zm_Imbibed_Seeds_P Parameter: Plant Line Value: 35A19
  misc_feature: MA Experiment 108530 PARAMETER Experiment Name: Zm_Imbibed_Seeds_P Parameter: Tissue Value: Aerial vs. Embryo
  misc_feature: MA Experiment ID: 108535 Result: Up-regulated in Transcription
  misc_feature: MA Experiment 108535 PARAMETER Experiment Name: Zm_Meristem_P Parameter: Age (day) Value: 8
  misc_feature: MA Experiment 108535 PARAMETER Experiment Name: Zm_Meristem_P Parameter: Organism Value: Zea mays
  misc_feature: MA Experiment 108535 PARAMETER Experiment Name: Zm_Meristem_P Parameter: Plant Line Value: 35A19
  misc_feature: MA Experiment 108535 PARAMETER Experiment Name: Zm_Meristem_P Parameter: Tissue Value: Root Meristem vs. Above Root Meristem
  misc_feature: MA Experiment ID: 108544 Result: Down-regulated in Transcription
  misc_feature: MA Experiment ID: 20000480 Result: Up-regulated in Transcription
  misc_feature: MA Experiment 20000480 PARAMETER Experiment Name: Zm_Drought_P Parameter: Age (day) Value: 11
  misc_feature: MA Experiment 20000480 PARAMETER Experiment Name: Zm_Drought_P Parameter: Organism Value: Zea mays
  misc_feature: MA Experiment 20000480 PARAMETER Experiment Name: Zm_Drought_P Parameter: Plant Line Value: 35A19
  misc_feature: MA Experiment 20000480 PARAMETER Experiment Name: Zm_Drought_P Parameter: Timepoint (hr) Value: 72
  misc_feature: MA Experiment 20000480 PARAMETER Experiment Name: Zm_Drought_P Parameter: Tissue Value: Aerial
  misc_feature: MA Experiment 20000480 PARAMETER Experiment Name: Zm_Drought_P Parameter: Treatment Value: Drought vs. No Drought
  misc_feature: MA Experiment ID: 20000488 Result: Up-regulated in Transcription
  misc_feature: MA Experiment 20000488 PARAMETER Experiment Name: Zm_50mM_NH4NO3_L_to_H_P Parameter: Organism Value: Zea mays
  misc_feature: MA Experiment 20000488 PARAMETER Experiment Name: Zm_50mM_NH4NO3_L_to_H_P Parameter: Timepoint (hr) Value: 8
  misc_feature: MA Experiment 20000488 PARAMETER Experiment Name: Zm_50mM_NH4NO3_L_to_H_P Parameter: Tissue Value: Leaves
  misc_feature: MA Experiment 20000488 PARAMETER Experiment Name: Zm_50mM_NH4NO3_L_to_H_P Parameter: Treatment Value: 50mM NH4NO3 vs. 100mM Mannitol
  misc_feature: MA Experiment ID: 20000535 Result: Up-regulated in Transcription
  misc_feature: MA Experiment 20000535 PARAMETER Experiment Name: Zm_Hybrid_Seed_Dev_P Parameter: DAP Value: 30 vs. 12
  misc_feature: MA Experiment 20000535 PARAMETER Experiment Name: Zm_Hybrid_Seed_Dev_P Parameter: Organism Value: Zea mays
  misc_feature: MA Experiment 20000535 PARAMETER Experiment Name: Zm_Hybrid_Seed_Dev_P Parameter: Plant Line Value: 35A19
  misc_feature: MA Experiment 20000535 PARAMETER Experiment Name: Zm_Hybrid_Seed_Dev_P Parameter: Tissue Value: Embryo vs. Unfert Floret
  misc_feature: MA Experiment ID: 20000626 Result: Up-regulated in Transcription
  misc_feature: MA Experiment 20000626 PARAMETER Experiment Name: Zm_Herbicide-Treatments_P Parameter: Timepoint (hr) Value: 12
  misc_feature: MA Experiment 20000626 PARAMETER Experiment Name: Zm_Herbicide-Treatments_P Parameter: Tissue Value: Aerial
  misc_feature: MA Experiment 20000626 PARAMETER Experiment Name: Zm_Herbicide-Treatments_P Parameter: Treatment Value: Roundup vs. No Treatment
aaaccctaacccctctctttcgttgcccatcctcgtgacggctcctcgccagtcgcctcgtctctccctgccgcgtcgcctccagttccgacgccagcgcgcctcccgcctccgccgcgcctgacgaacgcagtgtaggactgtgcaggtagagaggaggagggtccggcgagatggggatgcgagataagaagcggaaccagaagcgagtgctcgcgcgccgtaccgcggtaccgcgcccaggcgagggcaaggacttcctgccgctggaaggaggccccggtaagaagctgcggaaggtgcagcagcctgaagagcccgaaaacacagccacagtcgtctacattgggcatgtcccccatggtttctacgaggacgagatgaaagggttctttaagcagtttggggatattaagaggcttaggatcgctcgtaaccgcaagacaggaaagtccaagcactatggattcattgagtttgagaaccctgctgtggcaaaggttgtagcagatgagatgaataactatctcttgtttgagcgcaccttgcaagttgcacttgttgagccggagaaagttcatcctaaattatggaaaggggtgcgaaggggatttatacctgttgatcgagtagcaattgaacggaagagacacaacaaggataagactgtagcagagcacaaaaagatggttgaaggaattgtaaagcgggatggaaagcgtcgcaaaagaatcaaggcagctggtattgactatgagtgtccagctcttatagggagcattcgaccatcagcgaaaaagatcaagttcgatgaggcatagtattttactctaatttactctaatgggctgttggatccttagtagacgaggcggtggaatggttgagcaatatattcaccttttgaggagacggcagacaactatgtatttcacttttgaatttctctatgttttatgaatgacaccgacacagatgttacaacttaagtatgaaaatgcaatgagctgtgttctt

SEQ ID NO: 4338 - protein, 215 aa, Zea mays subsp. mays
  peptide (1)..(215): Ceres Seq. ID no. 12409954
  misc_feature (56)..(127): Pfam Name: RNA recognition motif. (a.k.a. RRM, RBD, or RNP domain) Pfam Description: RNA recognition motif. (a.k.a. RRM, RBD, or RNP
  misc_feature (39)..(200): Homolog of NCBI NO: 13774097 NR Description: RNA binding protein [Mus musculus]
  misc_feature (39)..(215): Homolog of NCBI NO: 38111220 NR Description: hypothetical protein MG07186.4 [Magnaporthe
  misc_feature (41)..(200): Homolog of NCBI NO: 13699902 NR Description: nucleolar phosphoprotein Nopp34 [Homo sapiens]
  misc_feature (41)..(200): Homolog of NCBI NO: 21314753 NR Description: MKI67 (FHA domain) interacting nucleolar
  misc_feature (41)..(195): Homolog of NCBI NO: 19076051 NR Description: putative RNA-binding protein [Schizosaccharomyces
  misc_feature (28)..(215): Homolog of NCBI NO: 20302745 NR Description: unknown [Branchiostoma floridae]
  misc_feature (38)..(208): Homolog of NCBI NO: 27545352 NR Description: mki67 (FHA domain) interacting nucleolar
  misc_feature (39)..(199): Homolog of NCBI NO: 40741317 NR Description: hypothetical protein AN4346.2 [Aspergillus
  misc_feature (1)..(214): Homolog of NCBI NO: 15238220 NR Description: RRM-containing protein
  misc_feature (1)..(214): Homolog of NCBI NO: 18652180 NR Description: RNA binding protein [Elaeis oleifera]
MGMRDKKRNQKRVLARRTAVPRPGEGKDFLPLEGGPGKKLRKVQQPEEPENTATVVYIGHVPHGFYEDEMKGFFKQFGDIKRLRIARNRKTGKSKHYGFIEFENPAVAKVVADEMNNYLLFERTLQVALVEPEKVHPKLWKGVRRGFIPVDRVAIERKRHNKDKTVAEHKKMVEGIVKRDGKRRKRIKAAGIDYECPALIGSIRPSAKKIKFDEA

SEQ ID NO: 4339 - protein, 213 aa, Zea mays subsp. mays
  peptide (1)..(213): Ceres Seq. ID no. 12409955
  misc_feature (54)..(125): Pfam Name: RNA recognition motif. (a.k.a. RRM, RBD, or RNP domain) Pfam Description: RNA recognition motif. (a.k.a. RRM, RBD, or RNP
  misc_feature (37)..(198): Homolog of NCBI NO: 13774097 NR Description: RNA binding protein [Mus musculus]
  misc_feature (37)..(213): Homolog of NCBI NO: 38111220 NR Description: hypothetical protein MG07186.4 [Magnaporthe
  misc_feature (39)..(198): Homolog of NCBI NO: 13699902 NR Description: nucleolar phosphoprotein Nopp34 [Homo sapiens]
  misc_feature (39)..(198): Homolog of NCBI NO: 21314753 NR Description: MKI67 (FHA domain) interacting nucleolar
  misc_feature (39)..(193): Homolog of NCBI NO: 19076051 NR Description: putative RNA-binding protein [Schizosaccharomyces
  misc_feature (26)..(213): Homolog of NCBI NO: 20302745 NR Description: unknown [Branchiostoma floridae]
  misc_feature (36)..(206): Homolog of NCBI NO: 27545352 NR Description: mki67 (FHA domain) interacting nucleolar
  misc_feature (37)..(197): Homolog of NCBI NO: 40741317 NR Description: hypothetical protein AN4346.2 [Aspergillus
  misc_feature (1)..(212): Homolog of NCBI NO: 15238220 NR Description: RRM-containing protein
  misc_feature (1)..(212): Homolog of NCBI NO: 18652180 NR Description: RNA binding protein [Elaeis oleifera]
MRDKKRNQKRVLARRTAVPRPGEGKDFLPLEGGPGKKLRKVQQPEEPENTATVVYIGHVPHGFYEDEMKGFFKQFGDIKRLRIARNRKTGKSKHYGFIEFENPAVAKVVADEMNNYLLFERTLQVALVEPEKVHPKLWKGVRRGFIPVDRVAIERKRHNKDKTVAEHKKMVEGIVKRDGKRRKRIKAAGIDYECPALIGSIRPSAKKIKFDEA

SEQ ID NO: 4340 - protein, 146 aa, Zea mays subsp. mays
  peptide (1)..(146): Ceres Seq. ID no. 12409956
  misc_feature (1)..(58): Pfam Name: RNA recognition motif. (a.k.a. RRM, RBD, or RNP domain) Pfam Description: RNA recognition motif. (a.k.a. RRM, RBD, or RNP
  misc_feature (1)..(131): Homolog of NCBI NO: 13774097 NR Description: RNA binding protein [Mus musculus]
  misc_feature (1)..(146): Homolog of NCBI NO: 38111220 NR Description: hypothetical protein MG07186.4 [Magnaporthe
  misc_feature (1)..(131): Homolog of NCBI NO: 13699902 NR Description: nucleolar phosphoprotein Nopp34 [Homo sapiens]
  misc_feature (1)..(131): Homolog of NCBI NO: 21314753 NR Description: MKI67 (FHA domain) interacting nucleolar
  misc_feature (1)..(126): Homolog of NCBI NO: 19076051 NR Description: putative RNA-binding protein [Schizosaccharomyces
  misc_feature (1)..(146): Homolog of NCBI NO: 20302745 NR Description: unknown [Branchiostoma floridae]
  misc_feature (1)..(139): Homolog of NCBI NO: 27545352 NR Description: mki67 (FHA domain) interacting nucleolar
  misc_feature (1)..(130): Homolog of NCBI NO: 40741317 NR Description: hypothetical protein AN4346.2 [Aspergillus
  misc_feature (1)..(145): Homolog of NCBI NO: 15238220 NR Description: RRM-containing protein
  misc_feature (1)..(145): Homolog of NCBI NO: 18652180 NR Description: RNA binding protein [Elaeis oleifera]
MKGFFKQFGDIKRLRIARNRKTGKSKHYGFIEFENPAVAKVVADEMNNYLLFERTLQVALVEPEKVHPKLWKGVRRGFIPVDRVAIERKRHNKDKTVAEHKKMVEGIVKRDGKRRKRIKAAGIDYECPALIGSIRPSAKKIKFDEA

SEQ ID NO: 4341 - DNA, 1276 bp, Zea mays subsp. mays
  misc_feature (1)..(1276): Ceres Seq. ID no. 12405671
  misc_feature: MA Experiment ID: 108530 Result: Up-regulated in Transcription
  misc_feature: MA Experiment 108530 PARAMETER Experiment Name: Zm_Imbibed_Seeds_P Parameter: Age (day) Value: 6 vs. 2
  misc_feature: MA Experiment 108530 PARAMETER Experiment Name: Zm_Imbibed_Seeds_P Parameter: Organism Value: Zea mays
  misc_feature: MA Experiment 108530 PARAMETER Experiment Name: Zm_Imbibed_Seeds_P Parameter: Plant Line Value: 35A19
  misc_feature: MA Experiment 108530 PARAMETER Experiment Name: Zm_Imbibed_Seeds_P Parameter: Tissue Value: Aerial vs. Embryo
tctctctctctctctctcgtgcgtgtcgaagactcgaagtcgaactcaaaacacgcaacacgcaagtcacgaacgcacgacaaaaggaagaaaaacccaagaaatatctctgcggccctgctcgtcccgagccgagccggcgagatggcggggatgtctcgcgcgatccgcaacttcgccgccgcgtcccggcgaaccctgaccgctgcttcggggccggcgctgccgaaggaggcggcggcgcgggtgagggcgggggcgcccgggcgcatggggcgggatcaggaggacgggaggcgcgtgcagtgggtgttcctcgggtgccccggggtggggaagggcacctacgccagccgcctctcgcagctgctcggcgtcccgcacatcgccaccggcgacctcgtccgcgacgccctggccacccctggccccttctccaacaagcttgctgagattgtcaatcatggaaaactggtgtctgatgagatcatcataaatctgctgtcaagacgtctggaagagggagaggaaaagggtgaattggggttcatccttgatggctttcctcgaaccataggacaagcggagatacttgaaggagtcacagacattgatttggtgatcaatctcaaactccgagaagaagctctgcttgcgaaatgccttggcaggaggatgtgcagccagtgtggagggaacttcaatgtggcctccattgatattgagggtgaagacggcgggcctcgaatgtacatgcccccactgttgcctcctccacagtgtgaatcgaagctgattgctagagcagacgatactgaagaagtggtaaaagagcggctgcgtgtgtaccatgatttgactgaaccagtggaggagttctacagagcacgtgggaaactgctggagttcaatctgcctggtgggatacccgaatcatggccgaagttactgcaggccctgaacatagaagaccccgacaataagcgatctgcagcagcatgattcttgttttgttataggaatgcacattctaaattgaacatctgtagactatgtcaaagctagtcaaattggtgggcattccttacatctttgggaagcctactccattctggatccagattattgtggcatggcactcaactgtacagtagattgatcatcgattggcaaggtcgatcgatggatgtgctgactgtgatcctcgaacgtaaggtgtgtaaaaaggcaagaaaataattgttgggcgtcgagacattcacttgtaggtcgtacc

SEQ ID NO: 4342 - protein, 333 aa, Zea mays subsp. mays
  peptide (1)..(333): Ceres Seq. ID no. 12405672
  misc_feature (146)..(223): Pfam Name: Adenylate kinase Pfam Description: Adenylate kinase
  misc_feature (104)..(324): Homolog of NCBI NO: 26985214 NR Description: adenylate kinase [Thermotoga neapolitana]
  misc_feature (104)..(304): Homolog of NCBI NO: 23112485 NR Description: hypothetical protein [Desulfitobacterium
  misc_feature (104)..(309): Homolog of NCBI NO: 23510140 NR Description: adenylate kinase 1 [Plasmodium falciparum 3D7]
  misc_feature (104)..(320): Homolog of NCBI NO: 11498284 NR Description: adenylate kinase (adk) [Archaeoglobus fulgidus]
  misc_feature (104)..(324): Homolog of NCBI NO: 15644227 NR Description: adenylate kinase [Thermotoga maritima]
  misc_feature (49)..(333): Homolog of NCBI NO: 29427816 NR Description: Adenylate kinase, chloroplast precursor (ATP-AMP
  misc_feature (38)..(333): Homolog of NCBI NO: 15228109 NR Description: putative adenylate kinase
  misc_feature (45)..(146): Homolog of NCBI NO: 6063552 NR Description: ESTs AU065232(E60855),C23624(S1554), correspond to a region of the predicted gene.~similar to putative
  misc_feature (146)..(333): Homolog of NCBI NO: 6063552 NR Description: ESTs AU065232(E60855),C23624(S1554), correspond to a region of the predicted gene.~similar to putative
  misc_feature (56)..(333): Homolog of NCBI NO: 30687836 NR Description: adenylate kinase -related [Arabidopsis thaliana]
SLSLSLVRVEDSKSNSKHATRKSRTHDKRKKNPRNISAALLVPSRAGEMAGMSRAIRNFAAASRRTLTAASGPALPKEAAARVRAGAPGRMGRDQEDGRRVQWVFLGCPGVGKGTYASRLSQLLGVPHIATGDLVRDALATPGPFSNKLAEIVNHGKLVSDEIIINLLSRRLEEGEEKGELGFILDGFPRTIGQAEILEGVTDIDLVINLKLREEALLAKCLGRRMCSQCGGNFNVASIDIEGEDGGPRMYMPPLLPPPQCESKLIARADDTEEVVKERLRVYHDLTEPVEEFYRARGKLLEFNLPGGIPESWPKLLQALNIEDPDNKRSAAA

SEQ ID NO: 4343 - protein, 285 aa, Zea mays subsp. mays
  peptide (1)..(285): Ceres Seq. ID no. 12405673
  misc_feature (98)..(175): Pfam Name: Adenylate kinase Pfam Description: Adenylate kinase
  misc_feature (56)..(276): Homolog of NCBI NO: 26985214 NR Description: adenylate kinase [Thermotoga neapolitana]
  misc_feature (56)..(256): Homolog of NCBI NO: 23112485 NR Description: hypothetical protein [Desulfitobacterium
  misc_feature (56)..(261): Homolog of NCBI NO: 23510140 NR Description: adenylate kinase 1 [Plasmodium falciparum 3D7]
  misc_feature (56)..(272): Homolog of NCBI NO: 11498284 NR Description: adenylate kinase (adk) [Archaeoglobus fulgidus]
  misc_feature (56)..(276): Homolog of NCBI NO: 15644227 NR Description: adenylate kinase [Thermotoga maritima]
  misc_feature (1)..(285): Homolog of NCBI NO: 29427816 NR Description: Adenylate kinase, chloroplast precursor (ATP-AMP
  misc_feature (1)..(285): Homolog of NCBI NO: 15228109 NR Description: putative adenylate kinase
  misc_feature (1)..(98): Homolog of NCBI NO: 6063552 NR Description: ESTs AU065232(E60855),C23624(S1554), correspond to a region of the predicted gene.~similar to putative
  misc_feature (98)..(285): Homolog of NCBI NO: 6063552 NR Description: ESTs AU065232(E60855),C23624(S1554), correspond to a region of the predicted gene.~similar to putative
  misc_feature (8)..(285): Homolog of NCBI NO: 30687836 NR Description: adenylate kinase -related [Arabidopsis thaliana]
MAGMSRAIRNFAAASRRTLTAASGPALPKEAAARVRAGAPGRMGRDQEDGRRVQWVFLGCPGVGKGTYASRLSQLLGVPHIATGDLVRDALATPGPFSNKLAEIVNHGKLVSDEIIINLLSRRLEEGEEKGELGFILDGFPRTIGQAEILEGVTDIDLVINLKLREEALLAKCLGRRMCSQCGGNFNVASIDIEGEDGGPRMYMPPLLPPPQCESKLIARADDTEEVVKERLRVYHDLTEPVEEFYRARGKLLEFNLPGGIPESWPKLLQALNIEDPDNKRSAAA

SEQ ID NO: 4344 - protein, 282 aa, Zea mays subsp. mays
  peptide (1)..(282): Ceres Seq. ID no. 12405674
  misc_feature (95)..(172): Pfam Name: Adenylate kinase Pfam Description: Adenylate kinase
  misc_feature (53)..(273): Homolog of NCBI NO: 26985214 NR Description: adenylate kinase [Thermotoga neapolitana]
  misc_feature (53)..(253): Homolog of NCBI NO: 23112485 NR Description: hypothetical protein [Desulfitobacterium
  misc_feature (53)..(258): Homolog of NCBI NO: 23510140 NR Description: adenylate kinase 1 [Plasmodium falciparum 3D7]
  misc_feature (53)..(269): Homolog of NCBI NO: 11498284 NR Description: adenylate kinase (adk) [Archaeoglobus fulgidus]
  misc_feature (53)..(273): Homolog of NCBI NO: 15644227 NR Description: adenylate kinase [Thermotoga maritima]
  misc_feature (1)..(282): Homolog of NCBI NO: 29427816 NR Description: Adenylate kinase, chloroplast precursor (ATP-AMP
  misc_feature (1)..(282): Homolog of NCBI NO: 15228109 NR Description: putative adenylate kinase
  misc_feature (1)..(95): Homolog of NCBI NO: 6063552 NR Description: ESTs AU065232(E60855),C23624(S1554), correspond to a region of the predicted gene.~similar to putative
  misc_feature (95)..(282): Homolog of NCBI NO: 6063552 NR Description: ESTs AU065232(E60855),C23624(S1554), correspond to a region of the predicted gene.~similar to putative
  misc_feature (5)..(282): Homolog of NCBI NO: 30687836 NR Description: adenylate kinase -related [Arabidopsis thaliana]
MSRAIRNFAAASRRTLTAASGPALPKEAAARVRAGAPGRMGRDQEDGRRVQWVFLGCPGVGKGTYASRLSQLLGVPHIATGDLVRDALATPGPFSNKLAEIVNHGKLVSDEIIINLLSRRLEEGEEKGELGFILDGFPRTIGQAEILEGVTDIDLVINLKLREEALLAKCLGRRMCSQCGGNFNVASIDIEGEDGGPRMYMPPLLPPPQCESKLIARADDTEEVVKERLRVYHDLTEPVEEFYRARGKLLEFNLPGGIPESWPKLLQALNIEDPDNKRSAAA

SEQ ID NO: 4345 - DNA, 422 bp, Zea mays subsp. mays
  misc_feature (1)..(422): Ceres Seq. ID no. 13564422
  misc_feature: MA Experiment ID: 108527 Result: Down-regulated in Transcription
  misc_feature: MA Experiment 108527 PARAMETER Experiment Name: Zm_5mM_NO_P Parameter: Age (day) Value: 8
  misc_feature: MA Experiment 108527 PARAMETER Experiment Name: Zm_5mM_NO_P Parameter: Organism Value: Zea mays
  misc_feature: MA Experiment 108527 PARAMETER Experiment Name: Zm_5mM_NO_P Parameter: Plant Line Value: 35A19
  misc_feature: MA Experiment 108527 PARAMETER Experiment Name: Zm_5mM_NO_P Parameter: Timepoint (hr) Value: 6
  misc_feature: MA Experiment 108527 PARAMETER Experiment Name: Zm_5mM_NO_P Parameter: Tissue Value: Aerial
  misc_feature: MA Experiment 108527 PARAMETER Experiment Name: Zm_5mM_NO_P Parameter: Treatment Value: 5mM NO vs. No Treatment
  misc_feature: MA Experiment ID: 20000492 Result: Down-regulated in Transcription
  misc_feature: MA Experiment 20000492 PARAMETER Experiment Name: Zm_Hybrid_Seed_Dev_P Parameter: DAP Value: 12
  misc_feature: MA Experiment 20000492 PARAMETER Experiment Name: Zm_Hybrid_Seed_Dev_P Parameter: Organism Value: Zea mays
  misc_feature: MA Experiment 20000492 PARAMETER Experiment Name: Zm_Hybrid_Seed_Dev_P Parameter: Plant Line Value: 35A19
  misc_feature: MA Experiment 20000492 PARAMETER Experiment Name: Zm_Hybrid_Seed_Dev_P Parameter: Tissue Value: Fert Kernel vs. Unfert Floret
ggccggcaactcgacagggaaaaggaagacgcaccgctagagctgagatgtccttcttcttccgcatggcgtcgcggctgcggccgtcgacgccggaggaggtggtgcgctccatcaaggactccttcctcgcgctccacacgcgcacccacgccaaggctctggaagaggtcgagaaaaatatgtcatctttgagattgttgatctttggtgatggagaagtcgaaccaaatgaagagcaggtcctgcaaataaccctcgagatttgcaaggaggacgtcatttccctgatcgtccaggatctgccttccttgggctggggagtaagaaaagatctggctatctgctggtgcatcttgcttargcagaargttgatgaaacttattgctgtgtgcagtatcttgaaaatcatctgnagctt

SEQ ID NO: 4346 - protein, 140 aa, Zea mays subsp. mays
  peptide (1)..(140): Ceres Seq. ID no. 13564423
  misc_feature (49)..(139): Pfam Name: Mo25 protein family Pfam Description: Mo25 protein family
  misc_feature (27)..(135): Homolog of NCBI NO: 34901086 NR Description: putative MO25 protein (CGI-66)
  misc_feature (16)..(137): Homolog of NCBI NO: 19115597 NR Description: similarity to mo25 [Schizosaccharomyces pombe]
  misc_feature (16)..(139): Homolog of NCBI NO: 18419772 NR Description: expressed protein [Arabidopsis thaliana]
  misc_feature (27)..(139): Homolog of NCBI NO: 15238126 NR Description: MO25 protein family [Arabidopsis thaliana]
  misc_feature (30)..(134): Homolog of NCBI NO: 17537411 NR Description: Mouse Mo25 protein like (39.4 kD) [Caenorhabditis
  misc_feature (27)..(139): Homolog of NCBI NO: 15236013 NR Description: MO25 protein family [Arabidopsis thaliana]
  misc_feature (27)..(139): Homolog of NCBI NO: 15214076 NR Description: Hypothetical MO25-like protein At5g47540
  misc_feature (30)..(134): Homolog of NCBI NO: 39589256 NR Description: Hypothetical protein CBG01052 [Caenorhabditis
  misc_feature (16)..(139): Homolog of NCBI NO: 34898912 NR Description: hypothetical protein, similar to Arabidopsis
  misc_feature (16)..(139): Homolog of NCBI NO: 33146499 NR Description: unknown protein [Oryza sativa (japonica
  misc_feature (121)..(121): Xaa is any aa, unknown or other
  misc_feature (123)..(123): Xaa is any aa, unknown or other
  misc_feature (139)..(139): Xaa is any aa, unknown or other
PATRQGKGRRTARAEMSFFFRMASRLRPSTPEEVVRSIKDSFLALHTRTHAKALEEVEKNMSSLRLLIFGDGEVEPNEEQVLQITLEICKEDVISLIVQDLPSLGWGVRKDLAICWCILLXQXVDETYCCVQYLENHLXL

SEQ ID NO: 4347 - protein, 125 aa, Zea mays subsp. mays
  peptide (1)..(125): Ceres Seq. ID no. 13564424
  misc_feature (34)..(124): Pfam Name: Mo25 protein family Pfam Description: Mo25 protein family
  misc_feature (15)..(119): Homolog of NCBI NO: 39589256 NR Description: Hypothetical protein CBG01052 [Caenorhabditis
  misc_feature (12)..(124): Homolog of NCBI NO: 15238126 NR Description: MO25 protein family [Arabidopsis thaliana]
  misc_feature (12)..(124): Homolog of NCBI NO: 15214076 NR Description: Hypothetical MO25-like protein At5g47540
  misc_feature (15)..(119): Homolog of NCBI NO: 17537411 NR Description: Mouse Mo25 protein like (39.4 kD) [Caenorhabditis
  misc_feature (12)..(124): Homolog of NCBI NO: 15236013 NR Description: MO25 protein family [Arabidopsis thaliana]
  misc_feature (12)..(120): Homolog of NCBI NO: 34901086 NR Description: putative MO25 protein (CGI-66)
  misc_feature (1)..(122): Homolog of NCBI NO: 19115597 NR Description: similarity to mo25 [Schizosaccharomyces pombe]
  misc_feature (1)..(124): Homolog of NCBI NO: 18419772 NR Description: expressed protein [Arabidopsis thaliana]
  misc_feature (1)..(124): Homolog of NCBI NO: 34898912 NR Description: hypothetical protein, similar to Arabidopsis
  misc_feature (1)..(124): Homolog of NCBI NO: 33146499 NR Description: unknown protein [Oryza sativa (japonica
  misc_feature (106)..(106): Xaa is any aa, unknown or other
  misc_feature (108)..(108): Xaa is any aa, unknown or other
  misc_feature (124)..(124): Xaa is any aa, unknown or other
MSFFFRMASRLRPSTPEEVVRSIKDSFLALHTRTHAKALEEVEKNMSSLRLLIFGDGEVEPNEEQVLQITLEICKEDVISLIVQDLPSLGWGVRKDLAICWCILLXQXVDETYCCVQYLENHLXL

SEQ ID NO: 4348 - protein, 119 aa, Zea mays subsp. mays
  peptide (1)..(119): Ceres Seq. ID no. 13564425
  misc_feature (28)..(118): Pfam Name: Mo25 protein family Pfam Description: Mo25 protein family
  misc_feature (9)..(113): Homolog of NCBI NO: 39589256 NR Description: Hypothetical protein CBG01052 [Caenorhabditis
  misc_feature (6)..(118): Homolog of NCBI NO: 15238126 NR Description: MO25 protein family [Arabidopsis thaliana]
  misc_feature (6)..(118): Homolog of NCBI NO: 15214076 NR Description: Hypothetical MO25-like protein At5g47540
  misc_feature (9)..(113): Homolog of NCBI NO: 17537411 NR Description: Mouse Mo25 protein like (39.4 kD) [Caenorhabditis
  misc_feature (6)..(118): Homolog of NCBI NO: 15236013 NR Description: MO25 protein family [Arabidopsis thaliana]
  misc_feature (6)..(114): Homolog of NCBI NO: 34901086 NR Description: putative MO25 protein (CGI-66)
  misc_feature (1)..(116): Homolog of NCBI NO: 19115597 NR Description: similarity to mo25 [Schizosaccharomyces pombe]
  misc_feature (1)..(118): Homolog of NCBI NO: 18419772 NR Description: expressed protein [Arabidopsis thaliana]
  misc_feature (1)..(118): Homolog of NCBI NO: 34898912 NR Description: hypothetical protein, similar to Arabidopsis
  misc_feature (1)..(118): Homolog of NCBI NO: 33146499 NR Description: unknown protein [Oryza sativa (japonica
  misc_feature (100)..(100): Xaa is any aa, unknown or other
  misc_feature (102)..(102): Xaa is any aa, unknown or other
  misc_feature (118)..(118): Xaa is any aa, unknown or other
MASRLRPSTPEEVVRSIKDSFLALHTRTHAKALEEVEKNMSSLRLLIFGDGEVEPNEEQVLQITLEICKEDVISLIVQDLPSLGWGVRKDLAICWCILLXQXVDETYCCVQYLENHLXL

SEQ ID NO: 4349 - DNA, 1622 bp, Zea mays subsp. mays
  misc_feature (1)..(1622): Ceres Seq. ID no. 12351540
  misc_feature: MA Experiment ID: 20000492 Result: Up-regulated in Transcription
  misc_feature: MA Experiment 20000492 PARAMETER Experiment Name: Zm_Hybrid_Seed_Dev_P Parameter: DAP Value: 12
  misc_feature: MA Experiment 20000492 PARAMETER Experiment Name: Zm_Hybrid_Seed_Dev_P Parameter: Organism Value: Zea mays
  misc_feature: MA Experiment 20000492 PARAMETER Experiment Name: Zm_Hybrid_Seed_Dev_P Parameter: Plant Line Value: 35A19
  misc_feature: MA Experiment 20000492 PARAMETER Experiment Name: Zm_Hybrid_Seed_Dev_P Parameter: Tissue Value: Fert Kernel vs. Unfert Floret
aattccttcctctcctctcgccccacgcccctctccatctgctcccgctccgcctcgcctagggttttgcccccaaacctagcctcccccgaatctcccacgccatggacgtcgagggcgaggtccccgccgccgccgcggcggcggtggcgaacggcctgggcggcgcgggcgcggaggaggcctctccggcgccggtctcggctgagcagctcgacgtggaggcgtacgcggcgcagtactcggggcggacccgcctcgtgcgcctcctctttgtcgccgaccggtgcggggtggaggcgatgcagctcgaggcgctgcggatggcttacgacgagatcaagcgcggggaggacgtgcagctccaccgcgacgtcgtcaccaagatcggcggccgcctcggtccgcgctacggcctcgaccaggcgtgggtcttcagcgtctcccgccgcgccgaccagcgcaaggagaagctcgagagcgagctcaatggatacaggactaacttaatcaaagagagcatcagaatgggctacaatgacattggtgatttcttctatgcccatggccaactttcagatgctttcaaaagctacatcaggactcgggactattgcaccacttccaaacatatagttcagatgtgcatgaatgtgattctggttagcattgagctggggcaatatgcacatgtttcaaactatgtcagcaaagcagagcaaacccccgactctctggatcctaccattgttgcaaagctgaaggcagctgcaggattagccaacttggaaacaaagaaatacaaatttgctgctcgtaagtttgttgagacaggaattgaactaggaaacaacttctctgaagtcatagctcctcaagacgtggcagtctatggtgccctttgtgcacttgcttcttttgaccgttcagacctgaagagcaaagtcattgacaatatcaacttccgtaactttctggacctggtgcctgaagtaagggagctggttaatgatttttatgcaagtcgctatggatcttgcttgggtcatcttgagaagctaaagcctaacctgctcctggatatccatttgcatcagcatgtagagactctgtatatggagattcgccacaaagcgatcatacagtacacacttccttttatatctgttgacctcaacacgatggcagccgcctttaagacttcggtctccatgctgcagaaggagctggccgcactgattactgaggacaaaatacaggcccggatagactcccacaacaagatcctttacgcaaggcatgctgaccagagaaatgcaactttccagcgtgtccttcaaaccggcaatgactttgagagagatgtcaagtccatgcttctgcgtgccaacctcctcaagcatgattacattcagaagacaagcggaccaaggaagatgtaaagattgcgggcgtcgctgctaggcaaggcttcctgctgcatgcctctccacttttttttttgaagaattgttctgtgacataaaagggaccgaagtctgtctaaatgccctccccctctttctttttattggttgatgaaagttattgtcgaagtaatgtatggttgagcatctggatgt

SEQ ID NO: 4350 - protein, 445 aa, Zea mays subsp. mays
  peptide (1)..(445): Ceres Seq. ID no. 12351541
  misc_feature (295)..(399): Pfam Name: PCI domain Pfam Description: PCI domain
  misc_feature (32)..(89): Homolog of NCBI NO: 4732103 NR Description: COP9 signalosome subunit 1 CSN1 [Drosophila
  misc_feature (103)..(440): Homolog of NCBI NO: 4732103 NR Description: COP9 signalosome subunit 1 CSN1 [Drosophila
  misc_feature (32)..(89): Homolog of NCBI NO: 24666528 NR Description: COP9 complex homolog subunit 1 CG3889-PA
  misc_feature (103)..(440): Homolog of NCBI NO: 24666528 NR Description: COP9 complex homolog subunit 1 CG3889-PA
  misc_feature (23)..(445): Homolog of NCBI NO: 11282867 NR Description: FUSCA PROTEIN FUS6 - Arabidopsis thaliana
  misc_feature (23)..(445): Homolog of NCBI NO: 26450149 NR Description: putative FUSCA protein FUS6 [Arabidopsis thaliana]
  misc_feature (23)..(445): Homolog of NCBI NO: 18411857 NR Description: COP9 complex subunit, FUS6
  misc_feature (23)..(445): Homolog of NCBI NO: 432446 NR Description: FUS6
  misc_feature (1)..(445): Homolog of NCBI NO: 10443485 NR Description: rCOP11 protein [Oryza sativa]
  misc_feature (1)..(445): Homolog of NCBI NO: 7208213 NR Description: constitutive photomorphogenic 11 [Oryza sativa
MDVEGEVPAAAAAAVANGLGGAGAEEASPAPVSAEQLDVEAYAAQYSGRTRLVRLLFVADRCGVEAMQLEALRMAYDEIKRGEDVQLHRDVVTKIGGRLGPRYGLDQAWVFSVSRRADQRKEKLESELNGYRTNLIKESIRMGYNDIGDFFYAHGQLSDAFKSYIRTRDYCTTSKHIVQMCMNVILVSIELGQYAHVSNYVSKAEQTPDSLDPTIVAKLKAAAGLANLETKKYKFAARKFVETGIELGNNFSEVIAPQDVAVYGALCALASFDRSDLKSKVIDNINFRNFLDLVPEVRELVNDFYASRYGSCLGHLEKLKPNLLLDIHLHQHVETLYMEIRHKAIIQYTLPFISVDLNTMAAAFKTSVSMLQKELAALITEDKIQARIDSHNKILYARHADQRNATFQRVLQTGNDFERDVKSMLLRANLLKHDYIQKTSGPRKM

SEQ ID NO: 4351 - protein, 379 aa, Zea mays subsp. mays
  peptide (1)..(379): Ceres Seq. ID no. 12351542
  misc_feature (229)..(333): Pfam Name: PCI domain Pfam Description: PCI domain
  misc_feature (1)..(23): Homolog of NCBI NO: 4732103 NR Description: COP9 signalosome subunit 1 CSN1 [Drosophila
  misc_feature (37)..(374): Homolog of NCBI NO: 4732103 NR Description: COP9 signalosome subunit 1 CSN1 [Drosophila
  misc_feature (1)..(23): Homolog of NCBI NO: 24666528 NR Description: COP9 complex homolog subunit 1 CG3889-PA
  misc_feature (37)..(374): Homolog of NCBI NO: 24666528 NR Description: COP9 complex homolog subunit 1 CG3889-PA
  misc_feature (1)..(379): Homolog of NCBI NO: 11282867 NR Description: FUSCA PROTEIN FUS6 - Arabidopsis thaliana
  misc_feature (1)..(379): Homolog of NCBI NO: 26450149 NR Description: putative FUSCA protein FUS6 [Arabidopsis thaliana]
  misc_feature (1)..(379): Homolog of NCBI NO: 18411857 NR Description: COP9 complex subunit, FUS6
  misc_feature (1)..(379): Homolog of NCBI NO: 432446 NR Description: FUS6
  misc_feature (1)..(379): Homolog of NCBI NO: 10443485 NR Description: rCOP11 protein [Oryza sativa]
  misc_feature (1)..(379): Homolog of NCBI NO: 7208213 NR Description: constitutive photomorphogenic 11 [Oryza sativa
MQLEALRMAYDEIKRGEDVQLHRDVVTKIGGRLGPRYGLDQAWVFSVSRRADQRKEKLESELNGYRTNLIKESIRMGYNDIGDFFYAHGQLSDAFKSYIRTRDYCTTSKHIVQMCMNVILVSIELGQYAHVSNYVSKAEQTPDSLDPTIVAKLKAAAGLANLETKKYKFAARKFVETGIELGNNFSEVIAPQDVAVYGALCALASFDRSDLKSKVIDNINFRNFLDLVPEVRELVNDFYASRYGSCLGHLEKLKPNLLLDIHLHQHVETLYMEIRHKAIIQYTLPFISVDLNTMAAAFKTSVSMLQKELAALITEDKIQARIDSHNKILYARHADQRNATFQRVLQTGNDFERDVKSMLLRANLLKHDYIQKTSGPRKM

SEQ ID NO: 4352 - protein, 372 aa, Zea mays subsp. mays
  peptide (1)..(372): Ceres Seq. ID no. 12351543
  misc_feature (222)..(326): Pfam Name: PCI domain Pfam Description: PCI domain
  misc_feature (1)..(16): Homolog of NCBI NO: 4732103 NR Description: COP9 signalosome subunit 1 CSN1 [Drosophila
  misc_feature (30)..(367): Homolog of NCBI NO: 4732103 NR Description: COP9 signalosome subunit 1 CSN1 [Drosophila
  misc_feature (1)..(16): Homolog of NCBI NO: 24666528 NR Description: COP9 complex homolog subunit 1 CG3889-PA
  misc_feature (30)..(367): Homolog of NCBI NO: 24666528 NR Description: COP9 complex homolog subunit 1 CG3889-PA
  misc_feature (1)..(372): Homolog of NCBI NO: 11282867 NR Description: FUSCA PROTEIN FUS6 - Arabidopsis thaliana
  misc_feature (1)..(372): Homolog of NCBI NO: 26450149 NR Description: putative FUSCA protein FUS6 [Arabidopsis thaliana]
  misc_feature (1)..(372): Homolog of NCBI NO: 18411857 NR Description: COP9 complex subunit, FUS6
  misc_feature (1)..(372): Homolog of NCBI NO: 432446 NR Description: FUS6
  misc_feature (1)..(372): Homolog of NCBI NO: 10443485 NR Description: rCOP11 protein [Oryza sativa]
  misc_feature (1)..(372): Homolog of NCBI NO: 7208213 NR Description: constitutive photomorphogenic 11 [Oryza sativa
MAYDEIKRGEDVQLHRDVVTKIGGRLGPRYGLDQAWVFSVSRRADQRKEKLESELNGYRTNLIKESIRMGYNDIGDFFYAHGQLSDAFKSYIRTRDYCTTSKHIVQMCMNVILVSIELGQYAHVSNYVSKAEQTPDSLDPTIVAKLKAAAGLANLETKKYKFAARKFVETGIELGNNFSEVIAPQDVAVYGALCALASFDRSDLKSKVIDNINFRNFLDLVPEVRELVNDFYASRYGSCLGHLEKLKPNLLLDIHLHQHVETLYMEIRHKAIIQYTLPFISVDLNTMAAAFKTSVSMLQKELAALITEDKIQARIDSHNKILYARHADQRNATFQRVLQTGNDFERDVKSMLLRANLLKHDYIQKTSGPRKM

SEQ ID NO: 4353 - DNA, 1181 bp, Zea mays subsp. mays
  misc_feature (1)..(1181): Ceres Seq. ID no. 12413563
  misc_feature: MA Experiment ID: 108535 Result: Up-regulated in Transcription
  misc_feature: MA Experiment 108535 PARAMETER Experiment Name: Zm_Meristem_P Parameter: Age (day) Value: 8
  misc_feature: MA Experiment 108535 PARAMETER Experiment Name: Zm_Meristem_P Parameter: Organism Value: Zea mays
  misc_feature: MA Experiment 108535 PARAMETER Experiment Name: Zm_Meristem_P Parameter: Plant Line Value: 35A19
  misc_feature: MA Experiment 108535 PARAMETER Experiment Name: Zm_Meristem_P Parameter: Tissue Value: Root Meristem vs. Above Root Meristem
  misc_feature: MA Experiment ID: 108544 Result: Down-regulated in Transcription
aaatttccccacacgcgcccacctcctccgggtcctcccctctagtcctctctcccgaccccacctctgccgtccgtgcgtccgtccggcaaccgcgacgcaacaatggcggccgggcgagagctggtggtgagtttcggcgagatgctgatagacttcgtgccgaccgtggcgggggtctcgctggccgaggcgccggccttcctcaaggcggccgggggcgcgcccgccaacgtcgccatcgcggtctcgcgcctcggtggcggggccgccttcgttggcaagctcggcgacgacgagttcggccgcatgctcgccgccatcctccgcgacaacggcgtcgacggcggcggcgtcgtcttcgacgcgggcgcgcgcaccggnntnttnccttcgtcaccctgcgcgccgacggcgagcgcgagttcatgttctaccgcaaccccagcgccgacatgctcctcactgccgacgagctcaacgtcgggctcatccggagggctgcggtctttcactacggatcaataagcttgattgctgagccttgccggacagcacatctccgtgccatggaaattgccaaagaggctggtgcactgctctcttacgacccaaacctgagggaggcactttggccatcccgtgaggaggcccgcacccagatcttgagcatctgggaccaggcagatatcgtcaaggtcagcgaagtcgagcttgagttcttgacaggcatcaactcagtggaggacgatgttgtcatgaagctgtggcgacctaccatgaagctgctcctggtgactcttggagatcaaggatgcaagtactataccagggatttccatggagctgtcccttccttcaaagtacaacaagtcgatacgactggcgcaggcgatgcgtttgttggtgcgctgctccgaaggatcgttaaagatccatcctcgctacaagacgagaagaagcttgtagagtctattaaattcgctaatgcgtgtggagcaatcaccgccacgaagaagggtgcgatcccgtctttgcccactgaaactgaggtcttgcagctaatagagaaggcatagatagatcactgtaattgctttggttttcactagcttccacttctgcaaattgcaaaatgtattgtattctgatctggaacagaagaagtgggtgctccatcc

SEQ ID NO: 4354 - protein, 358 aa, Zea mays subsp. mays
  peptide (1)..(358): Ceres Seq. ID no. 12413564
  misc_feature (125)..(348): Pfam Name: pfkB family carbohydrate kinase Pfam Description: pfkB family carbohydrate kinase
  misc_feature (125)..(356): Homolog of NCBI NO: 32765547 NR Description: fructokinase 2 [Lycopersicon hirsutum]
  misc_feature (125)..(356): Homolog of NCBI NO: 1915974 NR Description: fructokinase [Lycopersicon esculentum]
  misc_feature (125)..(356): Homolog of NCBI NO: 15221365 NR Description: fructokinase, putative
  misc_feature (125)..(356): Homolog of NCBI NO: 15221364 NR Description: fructokinase, putative; protein id: At1g06020.1
  misc_feature (125)..(357): Homolog of NCBI NO: 7434223 NR Description: fructokinase (EC 2.7.1.4) - beet
  misc_feature (125)..(357): Homolog of NCBI NO: 33329198 NR Description: putative fructokinase
  misc_feature (125)..(357): Homolog of NCBI NO: 33329200 NR Description: putative fructokinase 2
  misc_feature (125)..(357): Homolog of NCBI NO: 14423528 NR Description: putative fructokinase [Arabidopsis thaliana]
  misc_feature (125)..(357): Homolog of NCBI NO: 15224669 NR Description: putative fructokinase
  misc_feature (125)..(358): Homolog of NCBI NO: 34907582 NR Description: putative fructokinase I [Oryza sativa (japonica
  misc_feature (128)..(128): Xaa is any aa, unknown or other
  misc_feature (129)..(129): Xaa is any aa, unknown or other
  misc_feature (130)..(130): Xaa is any aa, unknown or other
ISPHAPTSSGSSPLVLSPDPTSAVRASVRQPRRNNGGRARAGGEFRRDADRLRADRGGGLAGRGAGLPQGGRGRARQRRHRGLAPRWRGRLRWQARRRRVRPHARRHPPRQRRRRRRRRLRRGRAHRXXXFVTLRADGEREFMFYRNPSADMLLTADELNVGLIRRAAVFHYGSISLIAEPCRTAHLRAMEIAKEAGALLSYDPNLREALWPSREEARTQILSIWDQADIVKVSEVELEFLTGINSVEDDVVMKLWRPTMKLLLVTLGDQGCKYYTRDFHGAVPSFKVQQVDTTGAGDAFVGALLRRIVKDPSSLQDEKKLVESIKFANACGAITATKKGAIPSLPTETEVLQLIEKA

SEQ ID NO: 4355 - protein, 216 aa, Zea mays subsp. mays
  peptide (1)..(216): Ceres Seq. ID no. 12413565
  misc_feature (1)..(206): Pfam Name: pfkB family carbohydrate kinase Pfam Description: pfkB family carbohydrate kinase
  misc_feature (1)..(214): Homolog of NCBI NO: 32765547 NR Description: fructokinase 2 [Lycopersicon hirsutum]
  misc_feature (1)..(214): Homolog of NCBI NO: 1915974 NR Description: fructokinase [Lycopersicon esculentum]
  misc_feature (1)..(214): Homolog of NCBI NO: 15221365 NR Description: fructokinase, putative
  misc_feature (1)..(214): Homolog of NCBI NO: 15221364 NR Description: fructokinase, putative; protein id: At1g06020.1
  misc_feature (1)..(215): Homolog of NCBI NO: 7434223 NR Description: fructokinase (EC 2.7.1.4) - beet
  misc_feature (1)..(215): Homolog of NCBI NO: 33329198 NR Description: putative fructokinase
  misc_feature (1)..(215): Homolog of NCBI NO: 33329200 NR Description: putative fructokinase 2
  misc_feature (1)..(215): Homolog of NCBI NO: 14423528 NR Description: putative fructokinase [Arabidopsis thaliana]
  misc_feature (1)..(215): Homolog of NCBI NO: 15224669 NR Description: putative fructokinase
  misc_feature (1)..(216): Homolog of NCBI NO: 34907582 NR Description: putative fructokinase I [Oryza sativa (japonica
MFYRNPSADMLLTADELNVGLIRRAAVFHYGSISLIAEPCRTAHLRAMEIAKEAGALLSYDPNLREALWPSREEARTQILSIWDQADIVKVSEVELEFLTGINSVEDDVVMKLWRPTMKLLLVTLGDQGCKYYTRDFHGAVPSFKVQQVDTTGAGDAFVGALLRRIVKDPSSLQDEKKLVESIKFANACGAITATKKGAIPSLPTETEVLQLIEKA

SEQ ID NO: 4356 - protein, 207 aa, Zea mays subsp. mays
  peptide (1)..(207): Ceres Seq. ID no. 12413566
  misc_feature (1)..(197): Pfam Name: pfkB family carbohydrate kinase Pfam Description: pfkB family carbohydrate kinase
  misc_feature (1)..(205): Homolog of NCBI NO: 32765547 NR Description: fructokinase 2 [Lycopersicon hirsutum]
  misc_feature (1)..(205): Homolog of NCBI NO: 1915974 NR Description: fructokinase [Lycopersicon esculentum]
  misc_feature (1)..(205): Homolog of NCBI NO: 15221365 NR Description: fructokinase, putative
  misc_feature (1)..(205): Homolog of NCBI NO: 15221364 NR Description: fructokinase, putative; protein id: At1g06020.1
  misc_feature (1)..(206): Homolog of NCBI NO: 7434223 NR Description: fructokinase (EC 2.7.1.4) - beet
  misc_feature (1)..(206): Homolog of NCBI NO: 33329198 NR Description: putative fructokinase
  misc_feature (1)..(206): Homolog of NCBI NO: 33329200 NR Description: putative fructokinase 2
  misc_feature (1)..(206): Homolog of NCBI NO: 14423528 NR Description: putative fructokinase [Arabidopsis thaliana]
  misc_feature (1)..(206): Homolog of NCBI NO: 15224669 NR Description: putative fructokinase
  misc_feature (1)..(207): Homolog of NCBI NO: 34907582 NR Description: putative fructokinase I [Oryza sativa (japonica
MLLTADELNVGLIRRAAVFHYGSISLIAEPCRTAHLRAMEIAKEAGALLSYDPNLREALWPSREEARTQILSIWDQADIVKVSEVELEFLTGINSVEDDVVMKLWRPTMKLLLVTLGDQGCKYYTRDFHGAVPSFKVQQVDTTGAGDAFVGALLRRIVKDPSSLQDEKKLVESIKFANACGAITATKKGAIPSLPTETEVLQLIEKA

SEQ ID NO: 4357 - DNA, 710 bp, Zea mays subsp. mays
  misc_feature (1)..(710): Ceres Seq. ID no. 12343668
  misc_feature: MA Experiment ID: 108535 Result: Up-regulated in Transcription
  misc_feature: MA Experiment 108535 PARAMETER Experiment Name: Zm_Meristem_P Parameter: Age (day) Value: 8
  misc_feature: MA Experiment 108535 PARAMETER Experiment Name: Zm_Meristem_P Parameter: Organism Value: Zea mays
  misc_feature: MA Experiment 108535 PARAMETER Experiment Name: Zm_Meristem_P Parameter: Plant Line Value: 35A19
  misc_feature: MA Experiment 108535 PARAMETER Experiment Name: Zm_Meristem_P Parameter: Tissue Value: Root Meristem vs. Above Root Meristem
  misc_feature: MA Experiment ID: 20000488 Result: Up-regulated in Transcription
  misc_feature: MA Experiment 20000488 PARAMETER Experiment Name: Zm_50mM_NH4NO3_L_to_H_P Parameter: Organism Value: Zea mays
  misc_feature: MA Experiment 20000488 PARAMETER Experiment Name: Zm_50mM_NH4NO3_L_to_H_P Parameter: Timepoint (hr) Value: 8
  misc_feature: MA Experiment 20000488 PARAMETER Experiment Name: Zm_50mM_NH4NO3_L_to_H_P Parameter: Tissue Value: Leaves
  misc_feature: MA Experiment 20000488 PARAMETER Experiment Name: Zm_50mM_NH4NO3_L_to_H_P Parameter: Treatment Value: 50mM NH4NO3 vs. 100mM Mannitol
  misc_feature: MA Experiment ID: 20000534 Result: Down-regulated in Transcription
  misc_feature: MA Experiment 20000534 PARAMETER Experiment Name: Zm_Hybrid_Pollen_P Parameter: Age (day) Value: 8
  misc_feature: MA Experiment 20000534 PARAMETER Experiment Name: Zm_Hybrid_Pollen_P Parameter: Organism Value: Zea mays
  misc_feature: MA Experiment 20000534 PARAMETER Experiment Name: Zm_Hybrid_Pollen_P Parameter: Plant Line Value: 35A19
  misc_feature: MA Experiment 20000534 PARAMETER Experiment Name: Zm_Hybrid_Pollen_P Parameter: Tissue Value: Pollen vs. Aerial
atgtgatagcccggcccaacactacaactgcctctcctcggcgtcgccactactccttgcctcacgccgccgctcaaacagcagaagggagaagagaagcacgcccaaaaattccaaggtttttcacctcttggagcgcaccaacaccacccggagaccggagcgactcgccaccggcgcggaaaaggagggcggaggttcgatggcggatgagaatcaggctggaaagaaagaggaggaggaatttagcacaggccctctgtcagtcctaatgatgagtgttaagaacaacacccaggtcctcatcaattgtcgcaacaacaagaagctgcttggccgtgttcgtgcttttgatcgccactgtaacatggtgctcgaaaacgtgcgtgagatgtggacagagatccccaagactggcaagggcaaaaagaaggctctgcctgtgaacaaggatagattcatcagtaagatgttcctcaggggcgactcggtcatcatagtgctgaggaacccgaagtgatcgcccaaccagtcacattgcagcagttatgccctttctctgggttcacggaatccgtgcctctattgaaaaaactgtagcttatgtgtgtcttggcggattagctggttatcttgaactgacgttcatgtgacatggcaatggcacatgaacatacgtttcatgagtttggttgttaattggcgcttgc

SEQ ID NO: 4358 - protein, 172 aa, Zea mays subsp. mays
  peptide (1)..(172): Ceres Seq. ID no. 12343669
  misc_feature (90)..(169): Pfam Name: LSM domain Pfam Description: LSM domain
  misc_feature (60)..(171): Homolog of NCBI NO: 17558868 NR Description: Small nuclear ribonucleoprotein (13.3 kD)
  misc_feature (76)..(171): Homolog of NCBI NO: 27677236 NR Description: similar to Small nuclear ribonucleoprotein Sm D2
  misc_feature (76)..(171): Homolog of NCBI NO: 22203734 NR Description: small nuclear ribonucleoprotein D2-like protein
  misc_feature (76)..(171): Homolog of NCBI NO: 26337731 NR Description: unnamed protein product [Mus musculus]
  misc_feature (73)..(171): Homolog of NCBI NO: 21357623 NR Description: CG1249-PA [Drosophila melanogaster]
  misc_feature (76)..(171): Homolog of NCBI NO: 4759158 NR Description: small nuclear ribonucleoprotein polypeptide D2
  misc_feature (73)..(172): Homolog of NCBI NO: 31230450 NR Description: ENSANGP00000002741 [Anopheles gambiae]
  misc_feature (70)..(172): Homolog of NCBI NO: 30690747 NR Description: small nuclear ribonucleo protein D2 -related
  misc_feature (70)..(172): Homolog of NCBI NO: 21554692 NR Description: small nuclear ribonucleoprotein-like protein
  misc_feature (70)..(172): Homolog of NCBI NO: 18407411 NR Description: putative small nuclear ribonucleoprotein D2
CDSPAQHYNCLSSASPLLLASRRRSNSRREKRSTPKNSKVFHLLERTNTTRRPERLATGAEKEGGGSMADENQAGKKEEEEFSTGPLSVLMMSVKNNTQVLINCRNNKKLLGRVRAFDRHCNMVLENVREMWTEIPKTGKGKKKALPVNKDRFISKMFLRGDSVIIVLRNPK

SEQ ID NO: 4359 - protein, 105 aa, Zea mays subsp. mays
  peptide (1)..(105): Ceres Seq. ID no. 12343670
  misc_feature (23)..(102): Pfam Name: LSM domain Pfam Description: LSM domain
  misc_feature (1)..(104): Homolog of NCBI NO: 17558868 NR Description: Small nuclear ribonucleoprotein (13.3 kD)
  misc_feature (9)..(104): Homolog of NCBI NO: 27677236 NR Description: similar to Small nuclear ribonucleoprotein Sm D2
  misc_feature (9)..(104): Homolog of NCBI NO: 22203734 NR Description: small nuclear ribonucleoprotein D2-like protein
  misc_feature (9)..(104): Homolog of NCBI NO: 26337731 NR Description: unnamed protein product [Mus musculus]
  misc_feature (6)..(104): Homolog of NCBI NO: 21357623 NR Description: CG1249-PA [Drosophila melanogaster]
  misc_feature (9)..(104): Homolog of NCBI NO: 4759158 NR Description: small nuclear ribonucleoprotein polypeptide D2
  misc_feature (6)..(105): Homolog of NCBI NO: 31230450 NR Description: ENSANGP00000002741 [Anopheles gambiae]
  misc_feature (3)..(105): Homolog of NCBI NO: 30690747 NR Description: small nuclear ribonucleo protein D2 -related
  misc_feature (3)..(105): Homolog of NCBI NO: 21554692 NR Description: small nuclear ribonucleoprotein-like protein
  misc_feature (3)..(105): Homolog of NCBI NO: 18407411 NR Description: putative small nuclear ribonucleoprotein D2
MADENQAGKKEEEEFSTGPLSVLMMSVKNNTQVLINCRNNKKLLGRVRAFDRHCNMVLENVREMWTEIPKTGKGKKKALPVNKDRFISKMFLRGDSVIIVLRNPK

SEQ ID NO: 4360 - protein, 89 aa, Zea mays subsp. mays
  peptide (1)..(89): Ceres Seq. ID no. 12343671
VIARPNTTTASPRRRHYSLPHAAAQTAEGRREARPKIPRFFTSWSAPTPPGDRSDSPPARKRRAEVRWRMRIRLERKRRRNLAQALCQS

SEQ ID NO: 4361 - DNA, 1572 bp, Zea mays subsp. mays
  misc_feature (1)..(1572): Ceres Seq. ID no. 12373300
  misc_feature: MA Experiment ID: 108527 Result: Down-regulated in Transcription
  misc_feature: MA Experiment 108527 PARAMETER Experiment Name: Zm_5mM_NO_P Parameter: Age (day) Value: 8
  misc_feature: MA Experiment 108527 PARAMETER Experiment Name: Zm_5mM_NO_P Parameter: Organism Value: Zea mays
  misc_feature: MA Experiment 108527 PARAMETER Experiment Name: Zm_5mM_NO_P Parameter: Plant Line Value: 35A19
  misc_feature: MA Experiment 108527 PARAMETER Experiment Name: Zm_5mM_NO_P Parameter: Timepoint (hr) Value: 6
  misc_feature: MA Experiment 108527 PARAMETER Experiment Name: Zm_5mM_NO_P Parameter: Tissue Value: Aerial
  misc_feature: MA Experiment 108527 PARAMETER Experiment Name: Zm_5mM_NO_P Parameter: Treatment Value: 5mM NO vs. No Treatment
  misc_feature: MA Experiment ID: 108528 Result: Up-regulated in Transcription
  misc_feature: MA Experiment 108528 PARAMETER Experiment Name: Zm_Imbibed_Seeds_P Parameter: Age (day) Value: 5 vs. 2
  misc_feature: MA Experiment 108528 PARAMETER Experiment Name: Zm_Imbibed_Seeds_P Parameter: Organism Value: Zea mays
  misc_feature: MA Experiment 108528 PARAMETER Experiment Name: Zm_Imbibed_Seeds_P Parameter: Plant Line Value: 35A19
  misc_feature: MA Experiment 108528 PARAMETER Experiment Name: Zm_Imbibed_Seeds_P Parameter: Tissue Value: Aerial vs. Embryo
  misc_feature: MA Experiment ID: 108530 Result: Up-regulated in Transcription
  misc_feature: MA Experiment 108530 PARAMETER Experiment Name: Zm_Imbibed_Seeds_P Parameter: Age (day) Value: 6 vs. 2
  misc_feature: MA Experiment 108530 PARAMETER Experiment Name: Zm_Imbibed_Seeds_P Parameter: Organism Value: Zea mays
  misc_feature: MA Experiment 108530 PARAMETER Experiment Name: Zm_Imbibed_Seeds_P Parameter: Plant Line Value: 35A19
  misc_feature: MA Experiment 108530 PARAMETER Experiment Name: Zm_Imbibed_Seeds_P Parameter: Tissue Value: Aerial vs. Embryo
  misc_feature: MA Experiment ID: 108545 Result: Up-regulated in Transcription
  misc_feature: MA Experiment 108545 PARAMETER Experiment Name: Zm_Imbibed_Seeds_P Parameter: Age (day) Value: 3 vs. 2
  misc_feature: MA Experiment 108545 PARAMETER Experiment Name: Zm_Imbibed_Seeds_P Parameter: Organism Value: Zea mays
  misc_feature: MA Experiment 108545 PARAMETER Experiment Name: Zm_Imbibed_Seeds_P Parameter: Plant Line Value: 35A19
  misc_feature: MA Experiment 108545 PARAMETER Experiment Name: Zm_Imbibed_Seeds_P Parameter: Tissue Value: Aerial vs. Embryo
  misc_feature: MA Experiment ID: 108547 Result: Up-regulated in Transcription
  misc_feature: MA Experiment 108547 PARAMETER Experiment Name: Zm_Imbibed_Seeds_P Parameter: Age (day) Value: 4 vs. 2
  misc_feature: MA Experiment 108547 PARAMETER Experiment Name: Zm_Imbibed_Seeds_P Parameter: Organism Value: Zea mays
  misc_feature: MA Experiment 108547 PARAMETER Experiment Name: Zm_Imbibed_Seeds_P Parameter: Plant Line Value: 35A19
  misc_feature: MA Experiment 108547 PARAMETER Experiment Name: Zm_Imbibed_Seeds_P Parameter: Tissue Value: Aerial vs. Embryo
  misc_feature: MA Experiment ID: 20000630 Result: Down-regulated in Transcription
  misc_feature: MA Experiment 20000630 PARAMETER Experiment Name: Zm_Herbicide-Treatments_P Parameter: Timepoint (hr) Value: 4
  misc_feature: MA Experiment 20000630 PARAMETER Experiment Name: Zm_Herbicide-Treatments_P Parameter: Tissue Value: Aerial
  misc_feature: MA Experiment 20000630 PARAMETER Experiment Name: Zm_Herbicide-Treatments_P Parameter: Treatment Value: Roundup vs. No Treatment
gaatatccgggcatccggcccaggcatgaacggtcggttaaaccggccaatcttcctctcaagcctcgacgcagcacggcgcgccggcgcgggacgacggcatgacgccgccgtccatcttccaccaccatcgctgcctcgtctccctcccctccgcttccccgacctggacctcgtcccgtcgtctcatccatcaactcgcaaaacccacagtcctgtccctacatctgcgtccagtcttatcctcttccttcgcggttgccgccgtcggcgacgacgaggatgtcgtagtcggggattgcctcgtgttcgacgacgacgctttcgaggaaccggacctggacctcccctcgtccccgtggccgtcggctagcgcctcacgccacggccggaggtcggaggcaggcgagagcgacagcctggtgccggagaggtggaggcatgccgaggaggagatcaacctgacgaagaaggataagcgccgcatcgcgcacgggctgcggttcgggagccgcctcgagcggcgggcgcccccagctgttgctgctcctgatgaattccgcgcgtaccgcaaggggatgctgagcgctgagcgtgagcatgtttctcatgtataccgggggccgctggagaggactcctccgccggaagtgaaggaacatccaccgccggagccggagcctgggacgcgtgtggccccgaggaatccgaggatggggatgggcgttggcacccttgacgacattgatgagtttttcagaagtagggaatatgttcaggatgagatggaggacagcaagagtcctaagggccgtcagaagttgttctcaaatgaggagaagattcttctgaacaagcgagtgcctgatctggaaacagctacttctagtaaatggcttccacttcacacccttgctgcatctggtgatttctatctattgaatagccttttaaaacataacgtggacataaatgcgcttgataaggatggcttaccagcgatccacaaagcaattctttcaaagaaggctgctattatcaattatcttttaaggaactcagcaaatccattcatccaagataaagatggtgcgactctaatgcattatgcggtccaaacagcatgtagtcagaccataaagacacttttactgtacaatgttgacatcaaccgtccagatgattatggatggacacctttgcatcttgcggtacaaacacagaggactgacattgtgaagctgcttttaataaagggcgctgatagaactattagaacccaagatggattgaccccgttggagttgtgcctccggttgggtcatgatgtgcggacgtatgagcttatcaaactacttaaaagtttccgaggacaaaagcagcatgatttagtttagcaactggagggtgtgtgaccctctttgaaccagtgaggttaaccagtgtggtggccttctgggaggccagttttcaatgtaccattcatgattcatggaatcgctcctggtttgagataggtacatgccaacttcattgtatttgtatcatttatatatttcattggcctaaacc

SEQ ID NO: 4362 - protein, 431 aa, Zea mays subsp. mays
  peptide (1)..(431): Ceres Seq. ID no. 12373301
  misc_feature (329)..(361): Pfam Name: Ankyrin repeat Pfam Description: Ankyrin repeat
  misc_feature (248)..(416): Homolog of NCBI NO: 27369638 NR Description: cDNA sequence BC025474; hypothetical protein
  misc_feature (247)..(402): Homolog of NCBI NO: 16758980 NR Description: proteasome (prosome, macropain) 26S subunit,
  misc_feature (247)..(402): Homolog of NCBI NO: 25990817 NR Description: gankyrin oncoprotein [Mesocricetus auratus]
  misc_feature (267)..(409): Homolog of NCBI NO: 28274852 NR Description: ankyrin repeat protein E4_2 [synthetic construct]
  misc_feature (284)..(409): Homolog of NCBI NO: 26354919 NR Description: unnamed protein product [Mus musculus]
  misc_feature (178)..(420): Homolog of NCBI NO: 15242597 NR Description: ankyrin repeat protein EMB506
  misc_feature (10)..(400): Homolog of NCBI NO: 322461 NR Description: ankyrin-repeat protein - Arabidopsis thaliana
  misc_feature (10)..(422): Homolog of NCBI NO: 26450056 NR Description: unknown protein [Arabidopsis thaliana]
  misc_feature (10)..(422): Homolog of NCBI NO: 30698188 NR Description: expressed protein [Arabidopsis thaliana]
  misc_feature (3)..(431): Homolog of NCBI NO: 22758264 NR Description: Putative ankyrin-repeat protein
MTPPSIFHHHRCLVSLPSASPTWTSSRRLIHQLAKPTVLSLHLRPVLSSSFAVAAVGDDEDVVVGDCLVFDDDAFEEPDLDLPSSPWPSASASRHGRRSEAGESDSLVPERWRHAEEEINLTKKDKRRIAHGLRFGSRLERRAPPAVAAPDEFRAYRKGMLSAEREHVSHVYRGPLERTPPPEVKEHPPPEPEPGTRVAPRNPRMGMGVGTLDDIDEFFRSREYVQDEMEDSKSPKGRQKLFSNEEKILLNKRVPDLETATSSKWLPLHTLAASGDFYLLNSLLKHNVDINALDKDGLPAIHKAILSKKAAIINYLLRNSANPFIQDKDGATLMHYAVQTACSQTIKTLLLYNVDINRPDDYGWTPLHLAVQTQRTDIVKLLLIKGADRTIRTQDGLTPLELCLRLGHDVRTYELIKLLKSFRGQKQHDLV

SEQ ID NO: 4363 - protein, 272 aa, Zea mays subsp. mays
  peptide (1)..(272): Ceres Seq. ID no. 12373302
  misc_feature (170)..(202): Pfam Name: Ankyrin repeat Pfam Description: Ankyrin repeat
  misc_feature (89)..(257): Homolog of NCBI NO: 27369638 NR Description: cDNA sequence BC025474; hypothetical protein
  misc_feature (88)..(243): Homolog of NCBI NO: 16758980 NR Description: proteasome (prosome, macropain) 26S subunit,
  misc_feature (88)..(243): Homolog of NCBI NO: 25990817 NR Description: gankyrin oncoprotein [Mesocricetus auratus]
  misc_feature (108)..(250): Homolog of NCBI NO: 28274852 NR Description: ankyrin repeat protein E4_2 [synthetic construct]
  misc_feature (125)..(250): Homolog of NCBI NO: 26354919 NR Description: unnamed protein product [Mus musculus]
  misc_feature (19)..(261): Homolog of NCBI NO: 15242597 NR Description: ankyrin repeat protein EMB506
  misc_feature (1)..(241): Homolog of NCBI NO: 322461 NR Description: ankyrin-repeat protein - Arabidopsis thaliana
  misc_feature (1)..(263): Homolog of NCBI NO: 26450056 NR Description: unknown protein [Arabidopsis thaliana]
  misc_feature (1)..(263): Homolog of NCBI NO: 30698188 NR Description: expressed protein [Arabidopsis thaliana]
  misc_feature (1)..(272): Homolog of NCBI NO: 22758264 NR Description: Putative ankyrin-repeat protein
MLSAEREHVSHVYRGPLERTPPPEVKEHPPPEPEPGTRVAPRNPRMGMGVGTLDDIDEFFRSREYVQDEMEDSKSPKGRQKLFSNEEKILLNKRVPDLETATSSKWLPLHTLAASGDFYLLNSLLKHNVDINALDKDGLPAIHKAILSKKAAIINYLLRNSANPFIQDKDGATLMHYAVQTACSQTIKTLLLYNVDINRPDDYGWTPLHLAVQTQRTDIVKLLLIKGADRTIRTQDGLTPLELCLRLGHDVRTYELIKLLKSFRGQKQHDLV

SEQ ID NO: 4364 - protein, 227 aa, Zea mays subsp. mays
  peptide (1)..(227): Ceres Seq. ID no. 12373303
  misc_feature (125)..(157): Pfam Name: Ankyrin repeat Pfam Description: Ankyrin repeat
  misc_feature (44)..(212): Homolog of NCBI NO: 27369638 NR Description: cDNA sequence BC025474; hypothetical protein
  misc_feature (43)..(198): Homolog of NCBI NO: 16758980 NR Description: proteasome (prosome, macropain) 26S subunit,
  misc_feature (43)..(198): Homolog of NCBI NO: 25990817 NR Description: gankyrin oncoprotein [Mesocricetus auratus]
  misc_feature (63)..(205): Homolog of NCBI NO: 28274852 NR Description: ankyrin repeat protein E4_2 [synthetic construct]
  misc_feature (80)..(205): Homolog of NCBI NO: 26354919 NR Description: unnamed protein product [Mus musculus]
  misc_feature (1)..(216): Homolog of NCBI NO: 15242597 NR Description: ankyrin repeat protein EMB506
  misc_feature (1)..(196): Homolog of NCBI NO: 322461 NR Description: ankyrin-repeat protein - Arabidopsis thaliana
  misc_feature (1)..(218): Homolog of NCBI NO: 26450056 NR Description: unknown protein [Arabidopsis thaliana]
  misc_feature (1)..(218): Homolog of NCBI NO: 30698188 NR Description: expressed protein [Arabidopsis thaliana]
  misc_feature (1)..(227): Homolog of NCBI NO: 22758264 NR Description: Putative ankyrin-repeat protein
MGMGVGTLDDIDEFFRSREYVQDEMEDSKSPKGRQKLFSNEEKILLNKRVPDLETATSSKWLPLHTLAASGDFYLLNSLLKHNVDINALDKDGLPAIHKAILSKKAAIINYLLRNSANPFIQDKDGATLMHYAVQTACSQTIKTLLLYNVDINRPDDYGWTPLHLAVQTQRTDIVKLLLIKGADRTIRTQDGLTPLELCLRLGHDVRTYELIKLLKSFRGQKQHDLV

SEQ ID NO: 4365 - DNA, 999 bp, Zea mays subsp. mays
  misc_feature (1)..(999): Ceres Seq. ID no. 12373297
  misc_feature: MA Experiment ID: 108528 Result: Up-regulated in Transcription
  misc_feature: MA Experiment 108528 PARAMETER Experiment Name: Zm_Imbibed_Seeds_P Parameter: Age (day) Value: 5 vs. 2
  misc_feature: MA Experiment 108528 PARAMETER Experiment Name: Zm_Imbibed_Seeds_P Parameter: Organism Value: Zea mays
  misc_feature: MA Experiment 108528 PARAMETER Experiment Name: Zm_Imbibed_Seeds_P Parameter: Plant Line Value: 35A19
  misc_feature: MA Experiment 108528 PARAMETER Experiment Name: Zm_Imbibed_Seeds_P Parameter: Tissue Value: Aerial vs. Embryo
  misc_feature: MA Experiment ID: 108530 Result: Up-regulated in Transcription
  misc_feature: MA Experiment 108530 PARAMETER Experiment Name: Zm_Imbibed_Seeds_P Parameter: Age (day) Value: 6 vs. 2
  misc_feature: MA Experiment 108530 PARAMETER Experiment Name: Zm_Imbibed_Seeds_P Parameter: Organism Value: Zea mays
  misc_feature: MA Experiment 108530 PARAMETER Experiment Name: Zm_Imbibed_Seeds_P Parameter: Plant Line Value: 35A19
  misc_feature: MA Experiment 108530 PARAMETER Experiment Name: Zm_Imbibed_Seeds_P Parameter: Tissue Value: Aerial vs. Embryo
  misc_feature: MA Experiment ID: 108535 Result: Down-regulated in Transcription
  misc_feature: MA Experiment 108535 PARAMETER Experiment Name: Zm_Meristem_P Parameter: Age (day) Value: 8
  misc_feature: MA Experiment 108535 PARAMETER Experiment Name: Zm_Meristem_P Parameter: Organism Value: Zea mays
  misc_feature: MA Experiment 108535 PARAMETER Experiment Name: Zm_Meristem_P Parameter: Plant Line Value: 35A19
  misc_feature: MA Experiment 108535 PARAMETER Experiment Name: Zm_Meristem_P Parameter: Tissue Value: Root Meristem vs. Above Root Meristem
  misc_feature: MA Experiment ID: 20000534 Result: Down-regulated in Transcription
  misc_feature: MA Experiment 20000534 PARAMETER Experiment Name: Zm_Hybrid_Pollen_P Parameter: Age (day) Value: 8
  misc_feature: MA Experiment 20000534 PARAMETER Experiment Name: Zm_Hybrid_Pollen_P Parameter: Organism Value: Zea mays
  misc_feature: MA Experiment 20000534 PARAMETER Experiment Name: Zm_Hybrid_Pollen_P Parameter: Plant Line Value: 35A19
  misc_feature: MA Experiment 20000534 PARAMETER Experiment Name: Zm_Hybrid_Pollen_P Parameter: Tissue Value: Pollen vs. Aerial
tgcgaggtgcgacaaaccgacaagccaacaatggcgtcgtcagctgctacgaccgcgaagccgatcgcgctcccgccggcgccaacccgcggcggctgctgctgctggaggacacgcaggcccgcgatccccgcggcggcggcacgcctcaaggtctccgcctccgccgcctcgtcggacgtgccggacttcctctcgtccaattggcttgaaacccgcaagagaaagcccttcggtcccaggttgaattttagtgcagaagaagcagtcgaataccagcttgagtccttaaagtacaatgatctgccccgcccagattatgggatagaggtcatgtaccggtttgcaggctttgaccctttcgagaggtcaacttactttggacgacagtttgatctaggacagttcgagcgcttccggcgtctgttttcaccactcaacctacagagtgctgctgggccacagagagagaagaatattgagcagtttatgggttgaagagaaccagttcaagcaaagagtttgggtacaaggagcccgtcccgaggaagaagagatatttcaattcacaatggttcagagggtcggaggatcatgggatggttactggctgacagagagcttaataaacgatggagacgcgttctcgggtgggattgcttactgatgtagtgatgattggtgtaaatcgatcaggtgcagactagcaggtggcgtgaaaaagctgagagacatgttggtgtgtagaatttgccctggctttctggagatgtttggcagtgtcggacacgctagtattgtacaggaagagacctctcacggcgcccatagcaccagatggccaagcatgctgtcatggaccttcggtccatgagatagctgtcttctccggcgaggttatacccctctgccgcaggcttggttctagggtagcagccctaggcgcttgagagggtcattgcaagggagagagattggtttgataatgatcttgcttgc

SEQ ID NO: 4366 - protein, 165 aa, Zea mays subsp. mays
  peptide (1)..(165): Ceres Seq. ID no. 12373298
  misc_feature (56)..(143): Homolog of NCBI NO: 30682820 NR Description: expressed protein [Arabidopsis thaliana]
CEVRQTDKPTMASSAATTAKPIALPPAPTRGGCCCWRTRRPAIPAAAARLKVSASAASSDVPDFLSSNWLETRKRKPFGPRLNFSAEEAVEYQLESLKYNDLPRPDYGIEVMYRFAGFDPFERSTYFGRQFDLGQFERFRRLFSPLNLQSAAGPQREKNIEQFMG

SEQ ID NO: 4367 - protein, 155 aa, Zea mays subsp. mays
  peptide (1)..(155): Ceres Seq. ID no. 12373299
  misc_feature (46)..(133): Homolog of NCBI NO: 30682820 NR Description: expressed protein [Arabidopsis thaliana]
MASSAATTAKPIALPPAPTRGGCCCWRTRRPAIPAAAARLKVSASAASSDVPDFLSSNWLETRKRKPFGPRLNFSAEEAVEYQLESLKYNDLPRPDYGIEVMYRFAGFDPFERSTYFGRQFDLGQFERFRRLFSPLNLQSAAGPQREKNIEQFMG

SEQ ID NO: 4368 - DNA, 1896 bp, Zea mays subsp. mays
  misc_feature (1)..(1896): Ceres Seq. ID no. 12566503
  misc_feature: MA Experiment ID: 108530 Result: Up-regulated in Transcription
  misc_feature: MA Experiment 108530 PARAMETER Experiment Name: Zm_Imbibed_Seeds_P Parameter: Age (day) Value: 6 vs. 2
  misc_feature: MA Experiment 108530 PARAMETER Experiment Name: Zm_Imbibed_Seeds_P Parameter: Organism Value: Zea mays
  misc_feature: MA Experiment 108530 PARAMETER Experiment Name: Zm_Imbibed_Seeds_P Parameter: Plant Line Value: 35A19
  misc_feature: MA Experiment 108530 PARAMETER Experiment Name: Zm_Imbibed_Seeds_P Parameter: Tissue Value: Aerial vs. Embryo
  misc_feature: MA Experiment ID: 108534 Result: Up-regulated in Transcription
  misc_feature: MA Experiment 108534 PARAMETER Experiment Name: Zm_4deg_Cold_P Parameter: Age (hr) Value: 8
  misc_feature: MA Experiment 108534 PARAMETER Experiment Name: Zm_4deg_Cold_P Parameter: Organism Value: Zea mays
  misc_feature: MA Experiment 108534 PARAMETER Experiment Name: Zm_4deg_Cold_P Parameter: Plant Line Value: 35A19
  misc_feature: MA Experiment 108534 PARAMETER Experiment Name: Zm_4deg_Cold_P Parameter: Temperature (deg C) Value: 4 vs. 22
  misc_feature: MA Experiment 108534 PARAMETER Experiment Name: Zm_4deg_Cold_P Parameter: Timepoint (hr) Value: 6
  misc_feature: MA Experiment 108534 PARAMETER Experiment Name: Zm_4deg_Cold_P Parameter: Tissue Value: Aerial
  misc_feature: MA Experiment ID: 108535 Result: Down-regulated in Transcription
  misc_feature: MA Experiment 108535 PARAMETER Experiment Name: Zm_Meristem_P Parameter: Age (day) Value: 8
  misc_feature: MA Experiment 108535 PARAMETER Experiment Name: Zm_Meristem_P Parameter: Organism Value: Zea mays
  misc_feature: MA Experiment 108535 PARAMETER Experiment Name: Zm_Meristem_P Parameter: Plant Line Value: 35A19
  misc_feature: MA Experiment 108535 PARAMETER Experiment Name: Zm_Meristem_P Parameter: Tissue Value: Root Meristem vs. Above Root Meristem
  misc_feature: MA Experiment ID: 108543 Result: Up-regulated in Transcription
  misc_feature: MA Experiment ID: 20000477 Result: Down-regulated in Transcription
  misc_feature: MA Experiment 20000477 PARAMETER Experiment Name: Zm_5mM_SA_P Parameter: Age (day) Value: 10
  misc_feature: MA Experiment 20000477 PARAMETER Experiment Name: Zm_5mM_SA_P Parameter: Organism Value: Zea mays
  misc_feature: MA Experiment 20000477 PARAMETER Experiment Name: Zm_5mM_SA_P Parameter: Plant Line Value: 35A19
  misc_feature: MA Experiment 20000477 PARAMETER Experiment Name: Zm_5mM_SA_P Parameter: Timepoint (hr) Value: 48
  misc_feature: MA Experiment 20000477 PARAMETER Experiment Name: Zm_5mM_SA_P Parameter: Tissue Value: Aerial
  misc_feature: MA Experiment 20000477 PARAMETER Experiment Name: Zm_5mM_SA_P Parameter: Treatment Value: 5mM SA vs. No Treatment
  misc_feature: MA Experiment ID: 20000478 Result: Down-regulated in Transcription
  misc_feature: MA Experiment 20000478 PARAMETER Experiment Name: Zm_5mM_SA_P Parameter: Age (day) Value: 11
  misc_feature: MA Experiment 20000478 PARAMETER Experiment Name: Zm_5mM_SA_P Parameter: Organism Value: Zea mays
  misc_feature: MA Experiment 20000478 PARAMETER Experiment Name: Zm_5mM_SA_P Parameter: Plant Line Value: 35A19
  misc_feature: MA Experiment 20000478 PARAMETER Experiment Name: Zm_5mM_SA_P Parameter: Timepoint (hr) Value: 72
  misc_feature: MA Experiment 20000478 PARAMETER Experiment Name: Zm_5mM_SA_P Parameter: Tissue Value: Aerial
  misc_feature: MA Experiment 20000478 PARAMETER Experiment Name: Zm_5mM_SA_P Parameter: Treatment Value: 5mM SA vs. No Treatment
  misc_feature: MA Experiment ID: 20000492 Result: Up-regulated in Transcription
  misc_feature: MA Experiment 20000492 PARAMETER Experiment Name: Zm_Hybrid_Seed_Dev_P Parameter: DAP Value: 12
  misc_feature: MA Experiment 20000492 PARAMETER Experiment Name: Zm_Hybrid_Seed_Dev_P Parameter: Organism Value: Zea mays
  misc_feature: MA Experiment 20000492 PARAMETER Experiment Name: Zm_Hybrid_Seed_Dev_P Parameter: Plant Line Value: 35A19
  misc_feature: MA Experiment 20000492 PARAMETER Experiment Name: Zm_Hybrid_Seed_Dev_P Parameter: Tissue Value: Fert Kernel vs. Unfert Floret
accccggaccgacaaagcagagcacgcgctggcagccaagtgcacacagacacgtctctctgttcgttctcagcttgctatagcaacctctagtaggtagccatggagatggtcctggactggcgctcgctgggctccctgctggcgaccgtcgtggtgttccgcaccgcgctgcgtaacttcctgccgccggaggccgagatgctcctgcgccgcttcctcgcgtgggtcgccgccgcgttccgcccgcccagcgacaccatcctcatcgacgaggcggacgggcccacggggagcgccaacgacctctacgagtcggcgcagctctacctcagcgcgcgctgcctcgccaccgcgcccgccgtgcgcctgcacaagccgcgccagtcgccgcgccccgtggcgtcgctcccggactcgcacaccaccgacgacaccttccgcggggtccgcgtcaagtggacctccaccacgcgcaccgtcgaccgcagcggcagcggcggcggcggtaacccgtacaacatattcggccgcggcggcgaccagcgcggcctcgagctccagttcccgcgccagcaccgggacctcgtccaccaccactacatcccgcacctcatcgacgaggccacccggatgcggctcaagtcgcgggagcgccgcctctacaccaaccgcggccacggggccctgcgacgaccaccaccgcctctggacgtcgcacgccttcgcgcacccgtccacgttcgacacgctggcgctcgacccggcgctgcgcgacgaggtccgcgccgacctgctgcgcttcgccgcgcgccgggaccactacgcgcgcgtcggccgcgcctggaagcgggggtacctgctccacggcccgcccggcacgggcaagaccagcctcgtcgctgccatcgccaacctgctcgacttcgacgtctacgacctggagctcaccacggtgcccaccaactcccacctccgccgcctgctcgtctccaccacgcccaagtccgtcgtcgtcgtcgaggacatcgactgctccctcgacctctccgaccgcaacaagaagacaaagaagggtgctggcgtcggcgtcggcatcggcaccgccggcgacgaagacgccgcagcacagctcgccgtcatgtcggtgtcgccggtcgcggcggccgtgatggggcgcgagtccgtcagcctctccggggtgctcaacttcgtcgacgggctctggtcgtcctgcgtcggcgagcgcctgatggtgttcacgaccaaccacccggagcggctcgacccggcgctgctccgcccgggccgcatggaccgcaagatcgagctcggctactgcacgccgcccgcgctgcgtgtgctcgccaagaactacctcggcgtcggcgacgagggctgcgacgacgccgacgcggaccccgacacggtcaacgccctcatggcggaggccgagggcctgctcgccgccgccgaggtgcaaatcacacccgccgacatcgccgaggtgttcatgggctgcgacggcgcgggcgccgccgccgcgctgaggaagctcgtgggcgagctgcggcggaggcgggatgctgctgcccttgccacggccgtagcaccgccggaataaaaccagccagggatcctacgtagcgcgccaccatgcatagctgcctagtcagcttccattactttgatgctaggtggtttatttattgagtcgtgacggtgcaatgcgaagtgtcgtgtgtcaggtgtttcccttctcatttagtttgggttcgtgtttttgtgtcgtgctagtacgtacggatcccgtaggctaggcagccaataagccaataatggacgctgattacccaggcacaacaatactgttatatgacagagctcgcccattgc

SEQ ID NO: 4369 - protein, 514 aa, Zea mays subsp. mays
  peptide (1)..(514): Ceres Seq. ID no. 12566504
  misc_feature (7)..(190): Homolog of NCBI NO: 15233010 NR Description: hypothetical protein
  misc_feature (7)..(196): Homolog of NCBI NO: 18416629 NR Description: putative mitochondrial protein
  misc_feature (7)..(211): Homolog of NCBI NO: 15242143 NR Description: putative protein; protein id: At5g57480.1
  misc_feature (9)..(189): Homolog of NCBI NO: 39104562 NR Description: putative BCS1 protein [Arabidopsis thaliana]
  misc_feature (7)..(190): Homolog of NCBI NO: 15242536 NR Description: putative protein; protein id: At5g40010.1
  misc_feature (12)..(197): Homolog of NCBI NO: 30686502 NR Description: BCS1 - like protein [Arabidopsis thaliana]
  misc_feature (7)..(194): Homolog of NCBI NO: 34894444 NR Description: OSJNBa0025P13.17 [Oryza sativa (japonica
  misc_feature (9)..(189): Homolog of NCBI NO: 7485704 NR Description: hypothetical protein F18B3.220 - Arabidopsis
  misc_feature (9)..(189): Homolog of NCBI NO: 30693380 NR Description: AAA-type ATPase family [Arabidopsis thaliana]
  misc_feature (7)..(194): Homolog of NCBI NO: 15233037 NR Description: hypothetical protein
MEMVLDWRSLGSLLATVVVFRTALRNFLPPEAEMLLRRFLAWVAAAFRPPSDTILIDEADGPTGSANDLYESAQLYLSARCLATAPAVRLHKPRQSPRPVASLPDSHTTDDTFRGVRVKWTSTTRTVDRSGSGGGGNPYNIFGRGGDQRGLELQFPRQHRDLVHHHYIPHLIDEATRMRLKSRERRLYTNRGHGALRRPPPPLDVARLRAPVHVRHAGARPGAARRGPRRPAALRRAPGPLRARRPRLEAGVPAPRPARHGQDQPRRCHRQPARLRRLRPGAHHGAHQLPPPPPARLHHAQVRRRRRGHRLLPRPLRPQQEDKEGCWRRRRHRHRRRRRRRSTARRHVGVAGRGGRDGARVRQPLRGAQLRRRALVVLRRRAPDGVHDQPPGAARPGAAPPGPHGPQDRARLLHAARAACARQELPRRRRRGLRRRRRGPRHGQRPHGGGRGPARRRRGANHTRRHRRGVHGLRRRGRRRRAEEARGRAAAEAGCCCPCHGRSTAGIKPARDPT

SEQ ID NO: 4370 - protein, 512 aa, Zea mays subsp. mays
  peptide (1)..(512): Ceres Seq. ID no. 12566505
  misc_feature (5)..(188): Homolog of NCBI NO: 15233010 NR Description: hypothetical protein
  misc_feature (5)..(194): Homolog of NCBI NO: 18416629 NR Description: putative mitochondrial protein
  misc_feature (5)..(209): Homolog of NCBI NO: 15242143 NR Description: putative protein; protein id: At5g57480.1
  misc_feature (7)..(187): Homolog of NCBI NO: 39104562 NR Description: putative BCS1 protein [Arabidopsis thaliana]
  misc_feature (5)..(188): Homolog of NCBI NO: 15242536 NR Description: putative protein; protein id: At5g40010.1
  misc_feature (10)..(195): Homolog of NCBI NO: 30686502 NR Description: BCS1 - like protein [Arabidopsis thaliana]
  misc_feature (5)..(192): Homolog of NCBI NO: 34894444 NR Description: OSJNBa0025P13.17 [Oryza sativa (japonica
  misc_feature (7)..(187): Homolog of NCBI NO: 7485704 NR Description: hypothetical protein F18B3.220 - Arabidopsis
  misc_feature (7)..(187): Homolog of NCBI NO: 30693380 NR Description: AAA-type ATPase family [Arabidopsis thaliana]
  misc_feature (5)..(192): Homolog of NCBI NO: 15233037 NR Description: hypothetical protein
MVLDWRSLGSLLATVVVFRTALRNFLPPEAEMLLRRFLAWVAAAFRPPSDTILIDEADGPTGSANDLYESAQLYLSARCLATAPAVRLHKPRQSPRPVASLPDSHTTDDTFRGVRVKWTSTTRTVDRSGSGGGGNPYNIFGRGGDQRGLELQFPRQHRDLVHHHYIPHLIDEATRMRLKSRERRLYTNRGHGALRRPPPPLDVARLRAPVHVRHAGARPGAARRGPRRPAALRRAPGPLRARRPRLEAGVPAPRPARHGQDQPRRCHRQPARLRRLRPGAHHGAHQLPPPPPARLHHAQVRRRRRGHRLLPRPLRPQQEDKEGCWRRRRHRHRRRRRRRSTARRHVGVAGRGGRDGARVRQPLRGAQLRRRALVVLRRRAPDGVHDQPPGAARPGAAPPGPHGPQDRARLLHAARAACARQELPRRRRRGLRRRRRGPRHGQRPHGGGRGPARRRRGANHTRRHRRGVHGLRRRGRRRRAEEARGRAAAEAGCCCPCHGRSTAGIKPARDPT

SEQ ID NO: 4371 - protein, 481 aa, Zea mays subsp. mays
  peptide (1)..(481): Ceres Seq. ID no. 12566506
  misc_feature (1)..(157): Homolog of NCBI NO: 15233010 NR Description: hypothetical protein
  misc_feature (1)..(163): Homolog of NCBI NO: 18416629 NR Description: putative mitochondrial protein
  misc_feature (1)..(178): Homolog of NCBI NO: 15242143 NR Description: putative protein; protein id: At5g57480.1
  misc_feature (1)..(156): Homolog of NCBI NO: 39104562 NR Description: putative BCS1 protein [Arabidopsis thaliana]
  misc_feature (1)..(157): Homolog of NCBI NO: 15242536 NR Description: putative protein; protein id: At5g40010.1
  misc_feature (1)..(164): Homolog of NCBI NO: 30686502 NR Description: BCS1 - like protein [Arabidopsis thaliana]
  misc_feature (1)..(161): Homolog of NCBI NO: 34894444 NR Description: OSJNBa0025P13.17 [Oryza sativa (japonica
  misc_feature (1)..(156): Homolog of NCBI NO: 7485704 NR Description: hypothetical protein F18B3.220 - Arabidopsis
  misc_feature (1)..(156): Homolog of NCBI NO: 30693380 NR Description: AAA-type ATPase family [Arabidopsis thaliana]
  misc_feature (1)..(161): Homolog of NCBI NO: 15233037 NR Description: hypothetical protein
MLLRRFLAWVAAAFRPPSDTILIDEADGPTGSANDLYESAQLYLSARCLATAPAVRLHKPRQSPRPVASLPDSHTTDDTFRGVRVKWTSTTRTVDRSGSGGGGNPYNIFGRGGDQRGLELQFPRQHRDLVHHHYIPHLIDEATRMRLKSRERRLYTNRGHGALRRPPPPLDVARLRAPVHVRHAGARPGAARRGPRRPAALRRAPGPLRARRPRLEAGVPAPRPARHGQDQPRRCHRQPARLRRLRPGAHHGAHQLPPPPPARLHHAQVRRRRRGHRLLPRPLRPQQEDKEGCWRRRRHRHRRRRRRRSTARRHVGVAGRGGRDGARVRQPLRGAQLRRRALVVLRRRAPDGVHDQPPGAARPGAAPPGPHGPQDRARLLHAARAACARQELPRRRRRGLRRRRRGPRHGQRPHGGGRGPARRRRGANHTRRHRRGVHGLRRRGRRRRAEEARGRAAAEAGCCCPCHGRSTAGIKPARDPT

SEQ ID NO: 4372 - DNA, 1772 bp, Zea mays subsp. mays
  misc_feature (1)..(1772): Ceres Seq. ID no. 12367879
  misc_feature: MA Experiment ID: 108522 Result: Up-regulated in Transcription
  misc_feature: MA Experiment 108522 PARAMETER Experiment Name: Zm_42deg_Heat_P Parameter: Age (day) Value: 8
  misc_feature: MA Experiment 108522 PARAMETER Experiment Name: Zm_42deg_Heat_P Parameter: Organism Value: Zea mays
  misc_feature: MA Experiment 108522 PARAMETER Experiment Name: Zm_42deg_Heat_P Parameter: Plant Line Value: 35A19
  misc_feature: MA Experiment 108522 PARAMETER Experiment Name: Zm_42deg_Heat_P Parameter: Temperature (deg C) Value: 42 vs. 22
  misc_feature: MA Experiment 108522 PARAMETER Experiment Name: Zm_42deg_Heat_P Parameter: Timepoint (hr) Value: 1
  misc_feature: MA Experiment 108522 PARAMETER Experiment Name: Zm_42deg_Heat_P Parameter: Tissue Value: Aerial
  misc_feature: MA Experiment ID: 108527 Result: Up-regulated in Transcription
  misc_feature: MA Experiment 108527 PARAMETER Experiment Name: Zm_5mM_NO_P Parameter: Age (day) Value: 8
  misc_feature: MA Experiment 108527 PARAMETER Experiment Name: Zm_5mM_NO_P Parameter: Organism Value: Zea mays
  misc_feature: MA Experiment 108527 PARAMETER Experiment Name: Zm_5mM_NO_P Parameter: Plant Line Value: 35A19
  misc_feature: MA Experiment 108527 PARAMETER Experiment Name: Zm_5mM_NO_P Parameter: Timepoint (hr) Value: 6
  misc_feature: MA Experiment 108527 PARAMETER Experiment Name: Zm_5mM_NO_P Parameter: Tissue Value: Aerial
  misc_feature: MA Experiment 108527 PARAMETER Experiment Name: Zm_5mM_NO_P Parameter: Treatment Value: 5mM NO vs. No Treatment
  misc_feature: MA Experiment ID: 108556 Result: Up-regulated in Transcription
  misc_feature: MA Experiment 108556 PARAMETER Experiment Name: Zm_Drought_P Parameter: Age (day) Value: 9
  misc_feature: MA Experiment 108556 PARAMETER Experiment Name: Zm_Drought_P Parameter: Organism Value: Zea mays
  misc_feature: MA Experiment 108556 PARAMETER Experiment Name: Zm_Drought_P Parameter: Plant Line Value: 35A19
  misc_feature: MA Experiment 108556 PARAMETER Experiment Name: Zm_Drought_P Parameter: Timepoint (hr) Value: 24
  misc_feature: MA Experiment 108556 PARAMETER Experiment Name: Zm_Drought_P Parameter: Tissue Value: Aerial
  misc_feature: MA Experiment 108556 PARAMETER Experiment Name: Zm_Drought_P Parameter: Treatment Value: Drought vs. No Drought
  misc_feature: MA Experiment ID: 108559 Result: Up-regulated in Transcription
  misc_feature: MA Experiment 108559 PARAMETER Experiment Name: Zm_5mM_NO_P Parameter: Age (day) Value: 8
  misc_feature: MA Experiment 108559 PARAMETER Experiment Name: Zm_5mM_NO_P Parameter: Organism Value: Zea mays
  misc_feature: MA Experiment 108559 PARAMETER Experiment Name: Zm_5mM_NO_P Parameter: Plant Line Value: 35A19
  misc_feature: MA Experiment 108559 PARAMETER Experiment Name: Zm_5mM_NO_P Parameter: Timepoint (hr) Value: 12
  misc_feature: MA Experiment 108559 PARAMETER Experiment Name: Zm_5mM_NO_P Parameter: Tissue Value: Aerial
  misc_feature: MA Experiment 108559 PARAMETER Experiment Name: Zm_5mM_NO_P Parameter: Treatment Value: 5mM NO vs. No Treatment
  misc_feature: MA Experiment ID: 20000477 Result: Up-regulated in Transcription
  misc_feature: MA Experiment 20000477 PARAMETER Experiment Name: Zm_5mM_SA_P Parameter: Age (day) Value: 10
  misc_feature: MA Experiment 20000477 PARAMETER Experiment Name: Zm_5mM_SA_P Parameter: Organism Value: Zea mays
  misc_feature: MA Experiment 20000477 PARAMETER Experiment Name: Zm_5mM_SA_P Parameter: Plant Line Value: 35A19
  misc_feature: MA Experiment 20000477 PARAMETER Experiment Name: Zm_5mM_SA_P Parameter: Timepoint (hr) Value: 48
  misc_feature: MA Experiment 20000477 PARAMETER Experiment Name: Zm_5mM_SA_P Parameter: Tissue Value: Aerial
  misc_feature: MA Experiment 20000477 PARAMETER Experiment Name: Zm_5mM_SA_P Parameter: Treatment Value: 5mM SA vs. No Treatment
  misc_feature: MA Experiment ID: 20000478 Result: Up-regulated in Transcription
  misc_feature: MA Experiment 20000478 PARAMETER Experiment Name: Zm_5mM_SA_P Parameter: Age (day) Value: 11
  misc_feature: MA Experiment 20000478 PARAMETER Experiment Name: Zm_5mM_SA_P Parameter: Organism Value: Zea mays
  misc_feature: MA Experiment 20000478 PARAMETER Experiment Name: Zm_5mM_SA_P Parameter: Plant Line Value: 35A19
  misc_feature: MA Experiment 20000478 PARAMETER Experiment Name: Zm_5mM_SA_P Parameter: Timepoint (hr) Value: 72
  misc_feature: MA Experiment 20000478 PARAMETER Experiment Name: Zm_5mM_SA_P Parameter: Tissue Value: Aerial
  misc_feature: MA Experiment 20000478 PARAMETER Experiment Name: Zm_5mM_SA_P Parameter: Treatment Value: 5mM SA vs. No Treatment
  misc_feature: MA Experiment ID: 20000480 Result: Up-regulated in Transcription
  misc_feature: MA Experiment 20000480 PARAMETER Experiment Name: Zm_Drought_P Parameter: Age (day) Value: 11
  misc_feature: MA Experiment 20000480 PARAMETER Experiment Name: Zm_Drought_P Parameter: Organism Value: Zea mays
  misc_feature: MA Experiment 20000480 PARAMETER Experiment Name: Zm_Drought_P Parameter: Plant Line Value: 35A19
  misc_feature: MA Experiment 20000480 PARAMETER Experiment Name: Zm_Drought_P Parameter: Timepoint (hr) Value: 72
  misc_feature: MA Experiment 20000480 PARAMETER Experiment Name: Zm_Drought_P Parameter: Tissue Value: Aerial
  misc_feature: MA Experiment 20000480 PARAMETER Experiment Name: Zm_Drought_P Parameter: Treatment Value: Drought vs. No Drought
aaagcaagtcctccccatgctcctcccgctcctcctcctcgccgccttcctccatggcttggcggaggcgcagggcggcctcccgtcgctgccgatcggggtgaactacggcgcgaacgcagacaacctaccctcgcccgccgccgtggcggcgttcctggccaagagcacgaccatcgaccgcgtgaagctgttcgacgcgaacccggccttcctcgacgcgttcgccgccaacgcgccctccatcgccctcgccgtctccatccccaactccgccctcccgtccttcgccgacagatccacgggcctggacgcggcgcgcgggtgggtccgcgacaacctgtccccgcacgtgtccgcgggcgccaacatcaccctcctcatggcggggaacgaggtgctgggccccaccgtggtgcccgacctcgtcgtggcgctgctcccggccatgcgccgcctgtaccaggcgctgcagctggagggcctgcccaaggtccgcgtcaccacgccgcactacctcggcatcctggcgccctcggacgggatcccctccaacgcgagcttccgcccggggctggacgccaaggtgctggcgcccatgctcaggttccacaacgacaccggctcccccttcatggtgaacgcctacccctacttcagctacaacgccgccacgctggactacgcggtgttccgccccaacgccggcgtgtacgacccggcgacgcggctcaactacaccagcatgttcgacgcgcagatggacgccatccacacggcgatgaagaagctcgggtacggcggcgtgcagatcgcggtgggcgaggccgggtggcccaccaaggcggaggccgggcaggtcggcgtaggccccgaggaggccagggatttcaacgccggcatgatccgggtgtgcagcggcgggaagggcacgccgctgatgcctgggaggacgttcgagacgtacgtcttctcgctgttcgacgagaaccagaagcccgggccggtcgcggagcggaacttcggcatcttcaacacggatctcacacccaaatacgacctggggctgctccgccaaggaccgcagtctggatctccaaccccatctccggagccctcgccgtcggtcggcggaggcaagtggtgcgtggccaagtccggcgcgagcgcaaccgacctgcagaacaacattaactacgcctgtgcctacgtcgactgtaggccgatccagagcggcggcgcgtgcttggaccccaacaacatccactcacatgcctcgtacgtcatgaacgcgtactaccaggccaatggcatgcacgactatgactgcgacttcaagggcaccggcgtggtcacctccagtgaccccagttacgggagctgcaaatacaacgcctcctcctgacggcgcgcagcaagtccagctggcactactgcaccagcctccagtccacatcgtcctccagctccaggctccagccatggccacgctggggacgggaggaggtccgtactgccgccgggcttgcgccacatacttgtatactcatgtctcacacccatgcttcttgttgctctcaaccactactagcactactatttgtctagttccataattacaagtccctctcccctcatgttaacttgatcattgtccgtgtgtagtggactagtggtggtgaataaaatagcttccattccatgtagacaaacaaacaaattgtaacatctgttatccttgggttatttgatatatttatttttcatatagt

SEQ ID NO: 4373 - protein, 467 aa, Zea mays subsp. mays
  peptide (1)..(467): Ceres Seq. ID no. 12367880
  misc_feature (32)..(356): Pfam Name: Glycosyl hydrolases family 17 Pfam Description: Glycosyl hydrolases family 17
  misc_feature (27)..(414): Homolog of NCBI NO: 34900642 NR Description: putative glucan endo-1,3-beta-glucosidase
  misc_feature (27)..(378): Homolog of NCBI NO: 34395169 NR Description: putative glucan endo-1,3-beta-glucosidase
  misc_feature (32)..(467): Homolog of NCBI NO: 14279169 NR Description: beta-1,3-glucanase-like protein [Olea europaea]
  misc_feature (1)..(461): Homolog of NCBI NO: 15225516 NR Description: glycosyl hydrolase family 17; protein id:
  misc_feature (32)..(463): Homolog of NCBI NO: 31126737 NR Description: putative beta 1,3-glucanase
  misc_feature (32)..(463): Homolog of NCBI NO: 15233271 NR Description: glycosyl hydrolase family 17 (beta-1,3-glucanase)
  misc_feature (32)..(463): Homolog of NCBI NO: 15028379 NR Description: putative beta-1,3-glucanase [Arabidopsis thaliana]
  misc_feature (32)..(463): Homolog of NCBI NO: 21617932 NR Description: beta-1,3-glucanase-like protein [Arabidopsis
  misc_feature (9)..(462): Homolog of NCBI NO: 11279328 NR Description: glucan endo-1,3-beta-D-glucosidase (EC 3.2.1.39)
  misc_feature (4)..(463): Homolog of NCBI NO: 1706551 NR Description: GLUCAN ENDO-1,3-BETA-GLUCOSIDASE PRECURSOR ((1-
KQVLPMLLPLLLLAAFLHGLAEAQGGLPSLPIGVNYGANADNLPSPAAVAAFLAKSTTIDRVKLFDANPAFLDAFAANAPSIALAVSIPNSALPSFADRSTGLDAARGWVRDNLSPHVSAGANITLLMAGNEVLGPTVVPDLVVALLPAMRRLYQALQLEGLPKVRVTTPHYLGILAPSDGIPSNASFRPGLDAKVLAPMLRFHNDTGSPFMVNAYPYFSYNAATLDYAVFRPNAGVYDPATRLNYTSMFDAQMDAIHTAMKKLGYGGVQIAVGEAGWPTKAEAGQVGVGPEEARDFNAGMIRVCSGGKGTPLMPGRTFETYVFSLFDENQKPGPVAERNFGIFNTDLTPKYDLGLLRQGPQSGSPTPSPEPSPSVGGGKWCVAKSGASATDLQNNINYACAYVDCRPIQSGGACLDPNNIHSHASYVMNAYYQANGMHDYDCDFKGTGVVTSSDPSYGSCKYNASS

SEQ ID NO: 4374 - protein, 462 aa, Zea mays subsp. mays
  peptide (1)..(462): Ceres Seq. ID no. 12367881
  misc_feature (27)..(351): Pfam Name: Glycosyl hydrolases family 17 Pfam Description: Glycosyl hydrolases family 17
  misc_feature (22)..(409): Homolog of NCBI NO: 34900642 NR Description: putative glucan endo-1,3-beta-glucosidase
  misc_feature (22)..(373): Homolog of NCBI NO: 34395169 NR Description: putative glucan endo-1,3-beta-glucosidase
  misc_feature (27)..(462): Homolog of NCBI NO: 14279169 NR Description: beta-1,3-glucanase-like protein [Olea europaea]
  misc_feature (1)..(456): Homolog of NCBI NO: 15225516 NR Description: glycosyl hydrolase family 17; protein id:
  misc_feature (27)..(458): Homolog of NCBI NO: 31126737 NR Description: putative beta 1,3-glucanase
  misc_feature (27)..(458): Homolog of NCBI NO: 15233271 NR Description: glycosyl hydrolase family 17 (beta-1,3-glucanase)
  misc_feature (27)..(458): Homolog of NCBI NO: 15028379 NR Description: putative beta-1,3-glucanase [Arabidopsis thaliana]
  misc_feature (27)..(458): Homolog of NCBI NO: 21617932 NR Description: beta-1,3-glucanase-like protein [Arabidopsis
  misc_feature (4)..(457): Homolog of NCBI NO: 11279328 NR Description: glucan endo-1,3-beta-D-glucosidase (EC 3.2.1.39)
  misc_feature (1)..(458): Homolog of NCBI NO: 1706551 NR Description: GLUCAN ENDO-1,3-BETA-GLUCOSIDASE PRECURSOR ((1-
MLLPLLLLAAFLHGLAEAQGGLPSLPIGVNYGANADNLPSPAAVAAFLAKSTTIDRVKLFDANPAFLDAFAANAPSIALAVSIPNSALPSFADRSTGLDAARGWVRDNLSPHVSAGANITLLMAGNEVLGPTVVPDLVVALLPAMRRLYQALQLEGLPKVRVTTPHYLGILAPSDGIPSNASFRPGLDAKVLAPMLRFHNDTGSPFMVNAYPYFSYNAATLDYAVFRPNAGVYDPATRLNYTSMFDAQMDAIHTAMKKLGYGGVQIAVGEAGWPTKAEAGQVGVGPEEARDFNAGMIRVCSGGKGTPLMPGRTFETYVFSLFDENQKPGPVAERNFGIFNTDLTPKYDLGLLRQGPQSGSPTPSPEPSPSVGGGKWCVAKSGASATDLQNNINYACAYVDCRPIQSGGACLDPNNIHSHASYVMNAYYQANGMHDYDCDFKGTGVVTSSDPSYGSCKYNASS

SEQ ID NO: 4375 - protein, 397 aa, Zea mays subsp. mays
  peptide (1)..(397): Ceres Seq. ID no. 12367882
  misc_feature (1)..(294): Homolog of NCBI NO: 23018055 NR Description: hypothetical protein [Thermobifida fusca]
KASPPHAPPAPPPRRLPPWLGGGAGRPPVAADRGELRRERRQPTLARRRGGVPGQEHDHRPREAVRREPGLPRRVRRQRALHRPRRLHPQLRPPVLRRQIHGPGRGARVGPRQPVPARVRGRQHHPPHGGERGAGPHRGARPRRGAAPGHAPPVPGAAAGGPAQGPRHHAALPRHPGALGRDPLQRELPPGAGRQGAGAHAQVPQRHRLPLHGERLPLLQLQRRHAGLRGVPPQRRRVRPGDAAQLHQHVRRADGRHPHGDEEARVRRRADRGGRGRVAHQGGGRAGRRRPRGGQGFQRRHDPGVQRREGHAADAWEDVRDVRLLAVRREPEARAGRGAELRHLQHGSHTQIRPGAAPPRTAVWISNPISGALAVGRRRQVVRGQVRRERNRPAEQH

SEQ ID NO: 4376 - DNA, 1652 bp, Zea mays subsp. mays
  misc_feature (1)..(1652): Ceres Seq. ID no. 12566507
  misc_feature: MA Experiment ID: 108543 Result: Up-regulated in Transcription
  misc_feature: MA Experiment ID: 108597 Result: Up-regulated in Transcription
  misc_feature: MA Experiment 108597 PARAMETER Experiment Name: Zm_100uM_ABA_P Parameter: Age (day) Value: 9
  misc_feature: MA Experiment 108597 PARAMETER Experiment Name: Zm_100uM_ABA_P Parameter: Organism Value: Zea mays
  misc_feature: MA Experiment 108597 PARAMETER Experiment Name: Zm_100uM_ABA_P Parameter: Plant Line Value: 35A19
  misc_feature: MA Experiment 108597 PARAMETER Experiment Name: Zm_100uM_ABA_P Parameter: Timepoint (hr) Value: 24
  misc_feature: MA Experiment 108597 PARAMETER Experiment Name: Zm_100uM_ABA_P Parameter: Tissue Value: Aerial
  misc_feature: MA Experiment 108597 PARAMETER Experiment Name: Zm_100uM_ABA_P Parameter: Treatment Value: 100uM ABA vs. No Treatment
aacaaccacatctgcatctcccgtcatctactcgaactcaactcatcgcctcatccgtgtctcacccattccgtctccgtctccgtctccgtctgaactctccatctataaagcttctctgaggcacaagacgagaaggccacagcccacaagcatgcccggcgagttggaaaagcgcagaatctgcgagacaagaaagcactaggaagggagaaacagggagagaggttgcgtcccagccccacctgccatcgcctcttcttccgctccctcggcggctttccaggattcagattcagattgggggccttttgctgctgcgcggcaattctcgtcgctccagtccccacttcgctgttcctgagcgggaggcgccggccggactcgcgatggggcaggacggccagcagatccgccgcgacaagctcatcatcgacacggatcccggcatcgatgatagcatgacgatcctaatggcgttcagagcacctagtgtggaaatcattgggctcacgaccatattcggcaacgtcgacacaaagggtgcaacacgtaacgcgctattgctgtgtgagagagcaggatgccctgaagttccagtagcagagggcagccatgagcccctaaagggaggaaagccccgtgttgctgatttcgttcatgggtcagatggcattgggaatctgtttcttcctgcaccctctgctaagaaggttgaggaaagtgctgctgatttcctgattaataaggtctctgagtttccaggagaggtctctgtgcttgcgttgggacccctgacaaatgtagcattggccatcaaaagagacccttcctttgcaagcaaggttaagaaaatagttgtactgggtggagctttctttgcggctggaaatgtcaaccctgctgctgaagcaaatatccatggagacccagaagcagctgacatagtttttacttcaggagcagatatcgttgtggttggcattaacataacaacacaagtctgcctgacagatgaggatctcttggagctaagaaactcgaaggggaagcatgcagcgttcttatatgagatgtgcaagttctacagagattggcatgccaagtctgatggttttcatggaattttccttcatgatcctgtgagcttcactgccgtacttcatccagagtacttcacattcaagaagggtgtggtgagagtagagacccagggcatttgcactggccacactttgatggatcagggattgaaaaagtggaattcagagaacccatggtcagggtataaaccgatttcagttgcatggacggttgatgtgccaaaggtcatcagctttataaagaagctgctcatggcaccatgagcaaagtacaaccatttaacgacatgtcaacatcagcgctctctgatgtccaagaaaatttgacgagtacagatgctctttcttagctgcactgtaattagttcctggacctaggatggttcctattcctccaatagtaagaggaacctttcattgtgaaaggtcatgcagcagtctcgaataccatgaagcaaattctggcatacgacatcatgtctcacacatttgtatcaatacatttagaatcaataaagtttccctcactctttactgtgcacttttccc

SEQ ID NO: 4377 - protein, 325 aa, Zea mays subsp. mays
  peptide (1)..(325): Ceres Seq. ID no. 12566508
  misc_feature (11)..(322): Pfam Name: Inosine-uridine preferring nucleoside hydrolase Pfam Description: Inosine-uridine preferring nucleoside hydrolase
  misc_feature (12)..(323): Homolog of NCBI NO: 15888904 NR Description: AGR_C_2923p [Agrobacterium tumefaciens]
  misc_feature (12)..(318): Homolog of NCBI NO: 15966659 NR Description: PUTATIVE NUCLEOSIDE HYDROLASE PROTEIN
  misc_feature (12)..(322): Homolog of NCBI NO: 22984963 NR Description: hypothetical protein [Burkholderia fungorum]
  misc_feature (210)..(323): Homolog of NCBI NO: 25321071 NR Description: hypothetical protein [imported] - Arabidopsis
  misc_feature (10)..(242): Homolog of NCBI NO: 25321071 NR Description: hypothetical protein [imported] - Arabidopsis
  misc_feature (10)..(323): Homolog of NCBI NO: 18390550 NR Description: expressed protein
  misc_feature (10)..(322): Homolog of NCBI NO: 30089728 NR Description: putative inosine-uridine preferring nucleoside
  misc_feature (245)..(291): Homolog of NCBI NO: 25321061 NR Description: hypothetical protein At2g36310 [imported] -
  misc_feature (25)..(245): Homolog of NCBI NO: 25321061 NR Description: hypothetical protein At2g36310 [imported] -
  misc_feature (9)..(325): Homolog of NCBI NO: 18404099 NR Description: expressed protein
MGQDGQQIRRDKLIIDTDPGIDDSMTILMAFRAPSVEIIGLTTIFGNVDTKGATRNALLLCERAGCPEVPVAEGSHEPLKGGKPRVADFVHGSDGIGNLFLPAPSAKKVEESAADFLINKVSEFPGEVSVLALGPLTNVALAIKRDPSFASKVKKIVVLGGAFFAAGNVNPAAEANIHGDPEAADIVFTSGADIVVVGINITTQVCLTDEDLLELRNSKGKHAAFLYEMCKFYRDWHAKSDGFHGIFLHDPVSFTAVLHPEYFTFKKGVVRVETQGICTGHTLMDQGLKKWNSENPWSGYKPISVAWTVDVPKVISFIKKLLMAP

SEQ ID NO: 4378 - protein, 301 aa, Zea mays subsp. mays
  peptide (1)..(301): Ceres Seq. ID no. 12566509
  misc_feature (1)..(298): Pfam Name: Inosine-uridine preferring nucleoside hydrolase Pfam Description: Inosine-uridine preferring nucleoside hydrolase
  misc_feature (1)..(299): Homolog of NCBI NO: 15888904 NR Description: AGR_C_2923p [Agrobacterium tumefaciens]
  misc_feature (1)..(294): Homolog of NCBI NO: 15966659 NR Description: PUTATIVE NUCLEOSIDE HYDROLASE PROTEIN
  misc_feature (1)..(298): Homolog of NCBI NO: 22984963 NR Description: hypothetical protein [Burkholderia fungorum]
  misc_feature (186)..(299): Homolog of NCBI NO: 25321071 NR Description: hypothetical protein [imported] - Arabidopsis
  misc_feature (1)..(218): Homolog of NCBI NO: 25321071 NR Description: hypothetical protein [imported] - Arabidopsis
  misc_feature (1)..(299): Homolog of NCBI NO: 18390550 NR Description: expressed protein
  misc_feature (1)..(298): Homolog of NCBI NO: 30089728 NR Description: putative inosine-uridine preferring nucleoside
  misc_feature (221)..(267): Homolog of NCBI NO: 25321061 NR Description: hypothetical protein At2g36310 [imported] -
  misc_feature (1)..(221): Homolog of NCBI NO: 25321061 NR Description: hypothetical protein At2g36310 [imported] -
  misc_feature (1)..(301): Homolog of NCBI NO: 18404099 NR Description: expressed protein
MTILMAFRAPSVEIIGLTTIFGNVDTKGATRNALLLCERAGCPEVPVAEGSHEPLKGGKPRVADFVHGSDGIGNLFLPAPSAKKVEESAADFLINKVSEFPGEVSVLALGPLTNVALAIKRDPSFASKVKKIVVLGGAFFAAGNVNPAAEANIHGDPEAADIVFTSGADIVVVGINITTQVCLTDEDLLELRNSKGKHAAFLYEMCKFYRDWHAKSDGFHGIFLHDPVSFTAVLHPEYFTFKKGVVRVETQGICTGHTLMDQGLKKWNSENPWSGYKPISVAWTVDVPKVISFIKKLLMAP

SEQ ID NO: 4379 - protein, 297 aa, Zea mays subsp. mays
  peptide (1)..(297): Ceres Seq. ID no. 12566510
  misc_feature (1)..(294): Pfam Name: Inosine-uridine preferring nucleoside hydrolase Pfam Description: Inosine-uridine preferring nucleoside hydrolase
  misc_feature (1)..(295): Homolog of NCBI NO: 15888904 NR Description: AGR_C_2923p [Agrobacterium tumefaciens]
  misc_feature (1)..(290): Homolog of NCBI NO: 15966659 NR Description: PUTATIVE NUCLEOSIDE HYDROLASE PROTEIN
  misc_feature (1)..(294): Homolog of NCBI NO: 22984963 NR Description: hypothetical protein [Burkholderia fungorum]
  misc_feature (182)..(295): Homolog of NCBI NO: 25321071 NR Description: hypothetical protein [imported] - Arabidopsis
  misc_feature (1)..(214): Homolog of NCBI NO: 25321071 NR Description: hypothetical protein [imported] - Arabidopsis
  misc_feature (1)..(295): Homolog of NCBI NO: 18390550 NR Description: expressed protein
  misc_feature (1)..(294): Homolog of NCBI NO: 30089728 NR Description: putative inosine-uridine preferring nucleoside
  misc_feature (217)..(263): Homolog of NCBI NO: 25321061 NR Description: hypothetical protein At2g36310 [imported] -
  misc_feature (1)..(217): Homolog of NCBI NO: 25321061 NR Description: hypothetical protein At2g36310 [imported] -
  misc_feature (1)..(297): Homolog of NCBI NO: 18404099 NR Description: expressed protein
MAFRAPSVEIIGLTTIFGNVDTKGATRNALLLCERAGCPEVPVAEGSHEPLKGGKPRVADFVHGSDGIGNLFLPAPSAKKVEESAADFLINKVSEFPGEVSVLALGPLTNVALAIKRDPSFASKVKKIVVLGGAFFAAGNVNPAAEANIHGDPEAADIVFTSGADIVVVGINITTQVCLTDEDLLELRNSKGKHAAFLYEMCKFYRDWHAKSDGFHGIFLHDPVSFTAVLHPEYFTFKKGVVRVETQGICTGHTLMDQGLKKWNSENPWSGYKPISVAWTVDVPKVISFIKKLLMAP

SEQ ID NO: 4380 - DNA, 1549 bp, Zea mays subsp. mays
  misc_feature (1)..(1549): Ceres Seq. ID no. 12345645
  misc_feature: MA Experiment ID: 108535 Result: Up-regulated in Transcription
  misc_feature: MA Experiment 108535 PARAMETER Experiment Name: Zm_Meristem_P Parameter: Age (day) Value: 8
  misc_feature: MA Experiment 108535 PARAMETER Experiment Name: Zm_Meristem_P Parameter: Organism Value: Zea mays
  misc_feature: MA Experiment 108535 PARAMETER Experiment Name: Zm_Meristem_P Parameter: Plant Line Value: 35A19
  misc_feature: MA Experiment 108535 PARAMETER Experiment Name: Zm_Meristem_P Parameter: Tissue Value: Root Meristem vs. Above Root Meristem
  misc_feature: MA Experiment ID: 108543 Result: Up-regulated in Transcription
  misc_feature: MA Experiment ID: 108556 Result: Down-regulated in Transcription
  misc_feature: MA Experiment 108556 PARAMETER Experiment Name: Zm_Drought_P Parameter: Age (day) Value: 9
  misc_feature: MA Experiment 108556 PARAMETER Experiment Name: Zm_Drought_P Parameter: Organism Value: Zea mays
  misc_feature: MA Experiment 108556 PARAMETER Experiment Name: Zm_Drought_P Parameter: Plant Line Value: 35A19
  misc_feature: MA Experiment 108556 PARAMETER Experiment Name: Zm_Drought_P Parameter: Timepoint (hr) Value: 24
  misc_feature: MA Experiment 108556 PARAMETER Experiment Name: Zm_Drought_P Parameter: Tissue Value: Aerial
  misc_feature: MA Experiment 108556 PARAMETER Experiment Name: Zm_Drought_P Parameter: Treatment Value: Drought vs. No Drought
  misc_feature: MA Experiment ID: 108559 Result: Down-regulated in Transcription
  misc_feature: MA Experiment 108559 PARAMETER Experiment Name: Zm_5mM_NO_P Parameter: Age (day) Value: 8
  misc_feature: MA Experiment 108559 PARAMETER Experiment Name: Zm_5mM_NO_P Parameter: Organism Value: Zea mays
  misc_feature: MA Experiment 108559 PARAMETER Experiment Name: Zm_5mM_NO_P Parameter: Plant Line Value: 35A19
  misc_feature: MA Experiment 108559 PARAMETER Experiment Name: Zm_5mM_NO_P Parameter: Timepoint (hr) Value: 12
  misc_feature: MA Experiment 108559 PARAMETER Experiment Name: Zm_5mM_NO_P Parameter: Tissue Value: Aerial
  misc_feature: MA Experiment 108559 PARAMETER Experiment Name: Zm_5mM_NO_P Parameter: Treatment Value: 5mM NO vs. No Treatment
  misc_feature: MA Experiment ID: 108689 Result: Up-regulated in Transcription
  misc_feature: MA Experiment 108689 PARAMETER Experiment Name: Zm_Drought_Roots_P Parameter: Age (day) Value: 9
  misc_feature: MA Experiment 108689 PARAMETER Experiment Name: Zm_Drought_Roots_P Parameter: Organism Value: Zea mays
  misc_feature: MA Experiment 108689 PARAMETER Experiment Name: Zm_Drought_Roots_P Parameter: Plant Line Value: 35A19
  misc_feature: MA Experiment 108689 PARAMETER Experiment Name: Zm_Drought_Roots_P Parameter: Timepoint (hr) Value: 24
  misc_feature: MA Experiment 108689 PARAMETER Experiment Name: Zm_Drought_Roots_P Parameter: Tissue Value: Roots
  misc_feature: MA Experiment 108689 PARAMETER Experiment Name: Zm_Drought_Roots_P Parameter: Treatment Value: Drought vs. No Drought
  misc_feature: MA Experiment ID: 20000477 Result: Down-regulated in Transcription
  misc_feature: MA Experiment 20000477 PARAMETER Experiment Name: Zm_5mM_SA_P Parameter: Age (day) Value: 10
  misc_feature: MA Experiment 20000477 PARAMETER Experiment Name: Zm_5mM_SA_P Parameter: Organism Value: Zea mays
  misc_feature: MA Experiment 20000477 PARAMETER Experiment Name: Zm_5mM_SA_P Parameter: Plant Line Value: 35A19
  misc_feature: MA Experiment 20000477 PARAMETER Experiment Name: Zm_5mM_SA_P Parameter: Timepoint (hr) Value: 48
  misc_feature: MA Experiment 20000477 PARAMETER Experiment Name: Zm_5mM_SA_P Parameter: Tissue Value: Aerial
  misc_feature: MA Experiment 20000477 PARAMETER Experiment Name: Zm_5mM_SA_P Parameter: Treatment Value: 5mM SA vs. No Treatment
  misc_feature: MA Experiment ID: 20000478 Result: Down-regulated in Transcription
  misc_feature: MA Experiment 20000478 PARAMETER Experiment Name: Zm_5mM_SA_P Parameter: Age (day) Value: 11
  misc_feature: MA Experiment 20000478 PARAMETER Experiment Name: Zm_5mM_SA_P Parameter: Organism Value: Zea mays
  misc_feature: MA Experiment 20000478 PARAMETER Experiment Name: Zm_5mM_SA_P Parameter: Plant Line Value: 35A19
  misc_feature: MA Experiment 20000478 PARAMETER Experiment Name: Zm_5mM_SA_P Parameter: Timepoint (hr) Value: 72
  misc_feature: MA Experiment 20000478 PARAMETER Experiment Name: Zm_5mM_SA_P Parameter: Tissue Value: Aerial
  misc_feature: MA Experiment 20000478 PARAMETER Experiment Name: Zm_5mM_SA_P Parameter: Treatment Value: 5mM SA vs. No Treatment
  misc_feature: MA Experiment ID: 20000479 Result: Down-regulated in Transcription
  misc_feature: MA Experiment 20000479 PARAMETER Experiment Name: Zm_Drought_P Parameter: Age (day) Value: 10
  misc_feature: MA Experiment 20000479 PARAMETER Experiment Name: Zm_Drought_P Parameter: Organism Value: Zea mays
  misc_feature: MA Experiment 20000479 PARAMETER Experiment Name: Zm_Drought_P Parameter: Plant Line Value: 35A19
  misc_feature: MA Experiment 20000479 PARAMETER Experiment Name: Zm_Drought_P Parameter: Timepoint (hr) Value: 48
  misc_feature: MA Experiment 20000479 PARAMETER Experiment Name: Zm_Drought_P Parameter: Tissue Value: Aerial
  misc_feature: MA Experiment 20000479 PARAMETER Experiment Name: Zm_Drought_P Parameter: Treatment Value: Drought vs. No Drought
  misc_feature: MA Experiment ID: 20000480 Result: Down-regulated in Transcription
  misc_feature: MA Experiment 20000480 PARAMETER Experiment Name: Zm_Drought_P Parameter: Age (day) Value: 11
  misc_feature: MA Experiment 20000480 PARAMETER Experiment Name: Zm_Drought_P Parameter: Organism Value: Zea mays
  misc_feature: MA Experiment 20000480 PARAMETER Experiment Name: Zm_Drought_P Parameter: Plant Line Value: 35A19
  misc_feature: MA Experiment 20000480 PARAMETER Experiment Name: Zm_Drought_P Parameter: Timepoint (hr) Value: 72
  misc_feature: MA Experiment 20000480 PARAMETER Experiment Name: Zm_Drought_P Parameter: Tissue Value: Aerial
  misc_feature: MA Experiment 20000480 PARAMETER Experiment Name: Zm_Drought_P Parameter: Treatment Value: Drought vs. No Drought
  misc_feature: MA Experiment ID: 20000492 Result: Up-regulated in Transcription
  misc_feature: MA Experiment 20000492 PARAMETER Experiment Name: Zm_Hybrid_Seed_Dev_P Parameter: DAP Value: 12
  misc_feature: MA Experiment 20000492 PARAMETER Experiment Name: Zm_Hybrid_Seed_Dev_P Parameter: Organism Value: Zea mays
  misc_feature: MA Experiment 20000492 PARAMETER Experiment Name: Zm_Hybrid_Seed_Dev_P Parameter: Plant Line Value: 35A19
  misc_feature: MA Experiment 20000492 PARAMETER Experiment Name: Zm_Hybrid_Seed_Dev_P Parameter: Tissue Value: Fert Kernel vs. Unfert Floret
  misc_feature: MA Experiment ID: 20000535 Result: Up-regulated in Transcription
  misc_feature: MA Experiment 20000535 PARAMETER Experiment Name: Zm_Hybrid_Seed_Dev_P Parameter: DAP Value: 30 vs. 12
  misc_feature: MA Experiment 20000535 PARAMETER Experiment Name: Zm_Hybrid_Seed_Dev_P Parameter: Organism Value: Zea mays
  misc_feature: MA Experiment 20000535 PARAMETER Experiment Name: Zm_Hybrid_Seed_Dev_P Parameter: Plant Line Value: 35A19
  misc_feature: MA Experiment 20000535 PARAMETER Experiment Name: Zm_Hybrid_Seed_Dev_P Parameter: Tissue Value: Embryo vs. Unfert Floret
agtccgcccctcccgcctcgttctctccgccatcgtcgccgccgcctccattcctccaccagtccaccatcgccacctacgcccaaccaaacccaactccatctcttccgactataaacgcaacccaccaccgctgccgcgaacctctgcgctccgaataccccagacccccgatcctcccaatggccaccgcattttcgctgcgcgctgcggccccggccaccactccccgcgccgtctcccgatccacctccgcggcgagggtcgtgcccgtggcctcggcactggcgggacgcggaaggctggtggcgcgtgcagcagttacagcaaaggcggatgtgccatcgagcacgtccgacggccatgaggtcttgctgtttgaagctcttcgtgaggccttgatggaagagatggaattagatccaacagtgtgtgtatttggtgaagatgttggccattacggtggttcttacaaggtgacaaaaggtttggctgatacgtttggagaccttcgagttctggacacccctattgcggagaactcgtttactggcatgggagttggagcgggaatgaaagggttgagacccgtcgttgaaggcatgaacatgggattcctgctccttgcttacaaccagatctcaaataactgtggcatgcttcattacacttccggcggccagttcaaaatcccacttgtgatccgtggccccggtggtgtgggtcgtcagcttggagcagagcactcgcagcgcctggaatcgtatttccagtccatcccaggcctgcagatggtcgcctgctcgactccttacaacgctaagggcctgatgaaagctgccatcaggagcgagaaccctgtggtgctgtttgagcacgtccttctgtacaacctgaaggagaaaatcccggacgaggagtacgtgctctgcttggaggaggccgagatggtgcggcctggggagcacgtgactatactcacatactcgcgcatgaggtaccacgtgatgcaggcagcgaagacgctggtgaacaaagggtacgatcccgaggtcatcgacatcaggtcgttgaagccgtttgatctgcacactattggcaactccatcaagaagacccaccgcgtgctgatcgtggaggagtgcatgcgcacgggtgggatcggcgccagccttaggtcggccatcgtcgacaatttctgggactaccttgacgcccccatcatgtgcctgtcatctcaggatgtgcctacgccatatgctgcgactctggaggatgcaaccgttgtgcagcctgcccagatcgtggctgcggtggaacaactatgtgcatagattgtggcctgggacgtttgggagactgttgttgccatgaaaaagccttccgtttgttagttttgtgctgtaacaagcattctttggagacttaaggtgtaggcttatagtcgttttgttcttgttttaagaagtataatccagcttcgtagctgcacggactcgatcttcttgttcctaaatctgcgctatgcaatgccgaatttgatggttcg

SEQ ID NO: 4381 - protein, 443 aa, Zea mays subsp. mays
  peptide (1)..(443): Ceres Seq. ID no. 12345646
  misc_feature (312)..(434): Pfam Name: Transketolase, C-terminal domain Pfam Description: Transketolase, C-terminal domain
  misc_feature (100)..(442): Homolog of NCBI NO: 15220670 NR Description: pyruvate dehydrogenase E1 beta subunit, putative; id: At1g30120.1, supported by cDNA: 38062., supported by cDNA: supported by cDNA: gi_20334775, supported by cDNA: beta subunit,
  misc_feature (100)..(442): Homolog of NCBI NO: 2454184 NR Description: pyruvate dehydrogenase E1 beta subunit thaliana] >gi|21593321|gb|AAM65270.1| pyruvate dehydrogenase E1
  misc_feature (92)..(442): Homolog of NCBI NO: 15226781 NR Description: putative pyruvate dehydrogenase E1 beta subunit; id: At2g34590.1, supported by cDNA: 38439., supported by cDNA: [Arabidopsis thaliana] >gi|25284457|pir||E84758 probable E1 beta
  misc_feature (92)..(442): Homolog of NCBI NO: 21593379 NR Description: putative pyruvate dehydrogenase E1 beta subunit
  misc_feature (157)..(442): Homolog of NCBI NO: 2982328 NR Description: pyruvate dehydrogenase E1 beta subunit [Picea
  misc_feature (122)..(442): Homolog of NCBI NO: 22711921 NR Description: pyruvate dehydrogenase E1 component beta subunit globosum] >gi|22416925|gb|AAM96525.1| beta subunit of pyruvate
  misc_feature (122)..(441): Homolog of NCBI NO: 22297748 NR Description: pyruvate dehydrogenase E1 component beta subunit
  misc_feature (122)..(443): Homolog of NCBI NO: 23041427 NR Description: hypothetical protein [Trichodesmium erythraeum
  misc_feature (122)..(443): Homolog of NCBI NO: 17227618 NR Description: pyruvate dehydrogenase E1 beta subunit [Nostoc
  misc_feature (122)..(443): Homolog of NCBI NO: 23124048 NR Description: hypothetical protein [Nostoc punctiforme]
SAPPASFSPPSSPPPPFLHQSTIATYAQPNPTPSLPTINATHHRCREPLRSEYPRPPILPMATAFSLRAAAPATTPRAVSRSTSAARVVPVASALAGRGRLVARAAVTAKADVPSSTSDGHEVLLFEALREALMEEMELDPTVCVFGEDVGHYGGSYKVTKGLADTFGDLRVLDTPIAENSFTGMGVGAGMKGLRPVVEGMNMGFLLLAYNQISNNCGMLHYTSGGQFKIPLVIRGPGGVGRQLGAEHSQRLESYFQSIPGLQMVACSTPYNAKGLMKAAIRSENPVVLFEHVLLYNLKEKIPDEEYVLCLEEAEMVRPGEHVTILTYSRMRYHVMQAAKTLVNKGYDPEVIDIRSLKPFDLHTIGNSIKKTHRVLIVEECMRTGGIGASLRSAIVDNFWDYLDAPIMCLSSQDVPTPYAATLEDATVVQPAQIVAAVEQLCA

SEQ ID NO: 4382 - protein, 383 aa, Zea mays subsp. mays
  peptide (1)..(383): Ceres Seq. ID no. 12345647
  misc_feature (252)..(374): Pfam Name: Transketolase, C-terminal domain Pfam Description: Transketolase, C-terminal domain
  misc_feature (40)..(382): Homolog of NCBI NO: 15220670 NR Description: pyruvate dehydrogenase E1 beta subunit, putative; id: At1g30120.1, supported by cDNA: 38062., supported by cDNA: supported by cDNA: gi_20334775, supported by cDNA: beta subunit,
  misc_feature (40)..(382): Homolog of NCBI NO: 2454184 NR Description: pyruvate dehydrogenase E1 beta subunit thaliana] >gi|21593321|gb|AAM65270.1| pyruvate dehydrogenase E1
  misc_feature (32)..(382): Homolog of NCBI NO: 15226781 NR Description: putative pyruvate dehydrogenase E1 beta subunit; id: At2g34590.1, supported by cDNA: 38439., supported by cDNA: [Arabidopsis thaliana] >gi|25284457|pir||E84758 probable E1 beta
  misc_feature (32)..(382): Homolog of NCBI NO: 21593379 NR Description: putative pyruvate dehydrogenase E1 beta subunit
  misc_feature (97)..(382): Homolog of NCBI NO: 2982328 NR Description: pyruvate dehydrogenase E1 beta subunit [Picea
  misc_feature (62)..(382): Homolog of NCBI NO: 22711921 NR Description: pyruvate dehydrogenase E1 component beta subunit globosum] >gi|22416925|gb|AAM96525.1| beta subunit of pyruvate
  misc_feature (62)..(381): Homolog of NCBI NO: 22297748 NR Description: pyruvate dehydrogenase E1 component beta subunit
  misc_feature (62)..(383): Homolog of NCBI NO: 23041427 NR Description: hypothetical protein [Trichodesmium erythraeum
  misc_feature (62)..(383): Homolog of NCBI NO: 17227618 NR Description: pyruvate dehydrogenase E1 beta subunit [Nostoc
  misc_feature (62)..(383): Homolog of NCBI NO: 23124048 NR Description: hypothetical protein [Nostoc punctiforme]
MATAFSLRAAAPATTPRAVSRSTSAARVVPVASALAGRGRLVARAAVTAKADVPSSTSDGHEVLLFEALREALMEEMELDPTVCVFGEDVGHYGGSYKVTKGLADTFGDLRVLDTPIAENSFTGMGVGAGMKGLRPVVEGMNMGFLLLAYNQISNNCGMLHYTSGGQFKIPLVIRGPGGVGRQLGAEHSQRLESYFQSIPGLQMVACSTPYNAKGLMKAAIRSENPVVLFEHVLLYNLKEKIPDEEYVLCLEEAEMVRPGEHVTILTYSRMRYHVMQAAKTLVNKGYDPEVIDIRSLKPFDLHTIGNSIKKTHRVLIVEECMRTGGIGASLRSAIVDNFWDYLDAPIMCLSSQDVPTPYAATLEDATVVQPAQIVAAVEQLCA

SEQ ID NO: 4383 - protein, 310 aa, Zea mays subsp. mays
  peptide (1)..(310): Ceres Seq. ID no. 12345648
  misc_feature (179)..(301): Pfam Name: Transketolase, C-terminal domain Pfam Description: Transketolase, C-terminal domain
  misc_feature (1)..(309): Homolog of NCBI NO: 15220670 NR Description: pyruvate dehydrogenase E1 beta subunit, putative; id: At1g30120.1, supported by cDNA: 38062., supported by cDNA: supported by cDNA: gi_20334775, supported by cDNA: beta subunit,
  misc_feature (1)..(309): Homolog of NCBI NO: 2454184 NR Description: pyruvate dehydrogenase E1 beta subunit thaliana] >gi|21593321|gb|AAM65270.1| pyruvate dehydrogenase E1
  misc_feature (1)..(309): Homolog of NCBI NO: 15226781 NR Description: putative pyruvate dehydrogenase E1 beta subunit; id: At2g34590.1, supported by cDNA: 38439., supported by cDNA: [Arabidopsis thaliana] >gi|25284457|pir||E84758 probable E1 beta
  misc_feature (1)..(309): Homolog of NCBI NO: 21593379 NR Description: putative pyruvate dehydrogenase E1 beta subunit
  misc_feature (24)..(309): Homolog of NCBI NO: 2982328 NR Description: pyruvate dehydrogenase E1 beta subunit [Picea
  misc_feature (1)..(309): Homolog of NCBI NO: 22711921 NR Description: pyruvate dehydrogenase E1 component beta subunit globosum] >gi|22416925|gb|AAM96525.1| beta subunit of pyruvate
  misc_feature (1)..(308): Homolog of NCBI NO: 22297748 NR Description: pyruvate dehydrogenase E1 component beta subunit
  misc_feature (1)..(310): Homolog of NCBI NO: 23041427 NR Description: hypothetical protein [Trichodesmium erythraeum
  misc_feature (1)..(310): Homolog of NCBI NO: 17227618 NR Description: pyruvate dehydrogenase E1 beta subunit [Nostoc
  misc_feature (1)..(310): Homolog of NCBI NO: 23124048 NR Description: hypothetical protein [Nostoc punctiforme]
MEEMELDPTVCVFGEDVGHYGGSYKVTKGLADTFGDLRVLDTPIAENSFTGMGVGAGMKGLRPVVEGMNMGFLLLAYNQISNNCGMLHYTSGGQFKIPLVIRGPGGVGRQLGAEHSQRLESYFQSIPGLQMVACSTPYNAKGLMKAAIRSENPVVLFEHVLLYNLKEKIPDEEYVLCLEEAEMVRPGEHVTILTYSRMRYHVMQAAKTLVNKGYDPEVIDIRSLKPFDLHTIGNSIKKTHRVLIVEECMRTGGIGASLRSAIVDNFWDYLDAPIMCLSSQDVPTPYAATLEDATVVQPAQIVAAVEQLCA

SEQ ID NO: 4384 - DNA, 1250 bp, Zea mays subsp. mays
  misc_feature (1)..(1250): Ceres Seq. ID no. 12566511
  misc_feature: MA Experiment ID: 108536 Result: Up-regulated in Transcription
  misc_feature: MA Experiment 108536 PARAMETER Experiment Name: Zm_Meristem_P Parameter: Age (day) Value: 8
  misc_feature: MA Experiment 108536 PARAMETER Experiment Name: Zm_Meristem_P Parameter: Organism Value: Zea mays
  misc_feature: MA Experiment 108536 PARAMETER Experiment Name: Zm_Meristem_P Parameter: Plant Line Value: 35A19
  misc_feature: MA Experiment 108536 PARAMETER Experiment Name: Zm_Meristem_P Parameter: Tissue Value: Shoot Meristem vs. Above Shoot Meristem
  misc_feature: MA Experiment ID: 108543 Result: Down-regulated in Transcription
  misc_feature: MA Experiment ID: 108544 Result: Down-regulated in Transcription
  misc_feature: MA Experiment ID: 108546 Result: Down-regulated in Transcription
  misc_feature: MA Experiment 108546 PARAMETER Experiment Name: Zm_Imbibed_Seeds_P Parameter: Age (day) Value: 3 vs. 2
  misc_feature: MA Experiment 108546 PARAMETER Experiment Name: Zm_Imbibed_Seeds_P Parameter: Organism Value: Zea mays
  misc_feature: MA Experiment 108546 PARAMETER Experiment Name: Zm_Imbibed_Seeds_P Parameter: Plant Line Value: 35A19
  misc_feature: MA Experiment 108546 PARAMETER Experiment Name: Zm_Imbibed_Seeds_P Parameter: Tissue Value: Roots vs. Embryo
  misc_feature: MA Experiment ID: 108689 Result: Up-regulated in Transcription
  misc_feature: MA Experiment 108689 PARAMETER Experiment Name: Zm_Drought_Roots_P Parameter: Age (day) Value: 9
  misc_feature: MA Experiment 108689 PARAMETER Experiment Name: Zm_Drought_Roots_P Parameter: Organism Value: Zea mays
  misc_feature: MA Experiment 108689 PARAMETER Experiment Name: Zm_Drought_Roots_P Parameter: Plant Line Value: 35A19
  misc_feature: MA Experiment 108689 PARAMETER Experiment Name: Zm_Drought_Roots_P Parameter: Timepoint (hr) Value: 24
  misc_feature: MA Experiment 108689 PARAMETER Experiment Name: Zm_Drought_Roots_P Parameter: Tissue Value: Roots
  misc_feature: MA Experiment 108689 PARAMETER Experiment Name: Zm_Drought_Roots_P Parameter: Treatment Value: Drought vs. No Drought
  misc_feature: MA Experiment ID: 20000480 Result: Up-regulated in Transcription
  misc_feature: MA Experiment 20000480 PARAMETER Experiment Name: Zm_Drought_P Parameter: Age (day) Value: 11
  misc_feature: MA Experiment 20000480 PARAMETER Experiment Name: Zm_Drought_P Parameter: Organism Value: Zea mays
  misc_feature: MA Experiment 20000480 PARAMETER Experiment Name: Zm_Drought_P Parameter: Plant Line Value: 35A19
  misc_feature: MA Experiment 20000480 PARAMETER Experiment Name: Zm_Drought_P Parameter: Timepoint (hr) Value: 72
  misc_feature: MA Experiment 20000480 PARAMETER Experiment Name: Zm_Drought_P Parameter: Tissue Value: Aerial
  misc_feature: MA Experiment 20000480 PARAMETER Experiment Name: Zm_Drought_P Parameter: Treatment Value: Drought vs. No Drought
  misc_feature: MA Experiment ID: 20000535 Result: Up-regulated in Transcription
  misc_feature: MA Experiment 20000535 PARAMETER Experiment Name: Zm_Hybrid_Seed_Dev_P Parameter: DAP Value: 30 vs. 12
  misc_feature: MA Experiment 20000535 PARAMETER Experiment Name: Zm_Hybrid_Seed_Dev_P Parameter: Organism Value: Zea mays
  misc_feature: MA Experiment 20000535 PARAMETER Experiment Name: Zm_Hybrid_Seed_Dev_P Parameter: Plant Line Value: 35A19
  misc_feature: MA Experiment 20000535 PARAMETER Experiment Name: Zm_Hybrid_Seed_Dev_P Parameter: Tissue Value: Embryo vs. Unfert Floret
gcacgagaccattacctagaacatcctaatcgaaaaacagaacagcccgtcgcgcgccgctgcgttgagccaaggcgcaatggcaacctccacctcagttcccgtcctcctgctcctcgccgccgccgccggcctcctcctgctccccggctcgctggcgtggcagagcagcaactgtgcaccgggcgcgcccggcagtggctcgccgacgtggccttcacccggctccggctccggcggcggccacagcaagccgcccaagcaccaccatggcaagccgcccaagtgcccgccgtgcaaccctccgtacgtgcctccgacgcctcggccgtcaccgccgtacgtgccaccgtatgtcccgccgacgcctcggccgtcaccgccctacgtgccaccatacgtccccgtcccgccgacgcctcggccctcaccgccgtacgtgccaccatacgtccccgtccccccgacgcctcggccctcaccgccctacgtgccaccatacgtccccgtcccgccgacgcctcggccgtcaccgccgtacgtacccccgacgccacggccgccgactccgccctacgtcccaccgacgccgccctacgtcccaccgacgcctcggccatcaccaccaccgtacgtgccaccctacgtccccccgacgcctcggccatcaccaccctacgtgccaccgtacgttccgccgacgccgccggcggtgcggacgtgcccgatcgacacgctgaagctgaacgcgtgcgtggacgtgctgagcgggctgatccacctggtgatcgggcaggaggccaggtccaagtgctgcccgctggtgcagggggtggcggacctggacgcggcgctgtgcctctgcaccaccatccgcgcgcgcctgctcaacatcaacatctacctccccatcgcgctcaacctgctcatcacctgcggcaagcacgcgccgtcgggcttccagtgcccgccgctctacgactgatgagcaccaccaccagccaacacttctatacgcgccgccatgcatgcatgatgtgatggcatcctgtgcaagctagcgctagcgctagtagtagcatgtccgtaatttctctagttcttgctctcgcgagtatgcgtacgtaatgcgttgcttctcgtcagtactcgggatcgatcgggaacttttccaactccgatgctaagcgtgtagcttgcttaatcagtcgatgtaccatgttaatcaagtgctagccctttctctgctc

SEQ ID NO: 4385 - protein, 346 aa, Zea mays subsp. mays
  peptide (1)..(346): Ceres Seq. ID no. 12566512
ARDHYLEHPNRKTEQPVARRCVEPRRNGNLHLSSRPPAPRRRRRPPPAPRLAGVAEQQLCTGRARQWLADVAFTRLRLRRRPQQAAQAPPWQAAQVPAVQPSVRASDASAVTAVRATVCPADASAVTALRATIRPRPADASALTAVRATIRPRPPDASALTALRATIRPRPADASAVTAVRTPDATAADSALRPTDAALRPTDASAITTTVRATLRPPDASAITTLRATVRSADAAGGADVPDRHAEAERVRGRAERADPPGDRAGGQVQVLPAGAGGGGPGRGAVPLHHHPRAPAQHQHLPPHRAQPAHHLRQARAVGLPVPAALRLMSTTTSQHFYTRRHACMM

SEQ ID NO: 4386 - protein, 301 aa, Zea mays subsp. mays
  peptide (1)..(301): Ceres Seq. ID no. 12566513
  misc_feature (215)..(296): Pfam Name: Protease inhibitor/seed storage/LTP family Pfam Description: Protease inhibitor/seed storage/LTP family
  misc_feature (38)..(297): Homolog of NCBI NO: 15233282 NR Description: unknown protein; protein id: At3g22120.1
  misc_feature (38)..(297): Homolog of NCBI NO: 11994732 NR Description: contains similarity to cell wall-plasma membrane
  misc_feature (57)..(299): Homolog of NCBI NO: 15233717 NR Description: cell wall protein like; protein id: At4g15160.1
  misc_feature (38)..(297): Homolog of NCBI NO: 7446482 NR Description: probable cell wall-plasma membrane linker protein
  misc_feature (59)..(297): Homolog of NCBI NO: 7446483 NR Description: probable cell wall protein - garden pea
  misc_feature (59)..(297): Homolog of NCBI NO: 1709767 NR Description: 36.4 KD PROLINE-RICH PROTEIN
  misc_feature (59)..(297): Homolog of NCBI NO: 19521 NR Description: proline rich protein [Lycopersicon esculentum]
  misc_feature (58)..(297): Homolog of NCBI NO: 1076501 NR Description: cell wall protein - alfalfa
  misc_feature (101)..(300): Homolog of NCBI NO: 34898430 NR Description: Similar to Zea mays PRP gene.(X60432)
  misc_feature (1)..(301): Homolog of NCBI NO: 283044 NR Description: hybrid proline-rich protein - maize
MATSTSVPVLLLLAAAAGLLLLPGSLAWQSSNCAPGAPGSGSPTWPSPGSGSGGGHSKPPKHHHGKPPKCPPCNPPYVPPTPRPSPPYVPPYVPPTPRPSPPYVPPYVPVPPTPRPSPPYVPPYVPVPPTPRPSPPYVPPYVPVPPTPRPSPPYVPPTPRPPTPPYVPPTPPYVPPTPRPSPPPYVPPYVPPTPRPSPPYVPPYVPPTPPAVRTCPIDTLKLNACVDVLSGLIHLVIGQEARSKCCPLVQGVADLDAALCLCTTIRARLLNINIYLPIALNLLITCGKHAPSGFQCPPLYD

SEQ ID NO: 4387 - DNA, 1421 bp, Zea mays subsp. mays
  misc_feature (1)..(1421): Ceres Seq. ID no. 12566476
  misc_feature: MA Experiment ID: 108523 Result: Down-regulated in Transcription
  misc_feature: MA Experiment 108523 PARAMETER Experiment Name: Zm_42deg_Heat_P Parameter: Age (day) Value: 8
  misc_feature: MA Experiment 108523 PARAMETER Experiment Name: Zm_42deg_Heat_P Parameter: Organism Value: Zea mays
  misc_feature: MA Experiment 108523 PARAMETER Experiment Name: Zm_42deg_Heat_P Parameter: Plant Line Value: 35A19
  misc_feature: MA Experiment 108523 PARAMETER Experiment Name: Zm_42deg_Heat_P Parameter: Temperature (deg C) Value: 42 vs. 22
  misc_feature: MA Experiment 108523 PARAMETER Experiment Name: Zm_42deg_Heat_P Parameter: Timepoint (hr) Value: 6
  misc_feature: MA Experiment 108523 PARAMETER Experiment Name: Zm_42deg_Heat_P Parameter: Tissue Value: Aerial
  misc_feature: MA Experiment ID: 108535 Result: Down-regulated in Transcription
  misc_feature: MA Experiment 108535 PARAMETER Experiment Name: Zm_Meristem_P Parameter: Age (day) Value: 8
  misc_feature: MA Experiment 108535 PARAMETER Experiment Name: Zm_Meristem_P Parameter: Organism Value: Zea mays
  misc_feature: MA Experiment 108535 PARAMETER Experiment Name: Zm_Meristem_P Parameter: Plant Line Value: 35A19
  misc_feature: MA Experiment 108535 PARAMETER Experiment Name: Zm_Meristem_P Parameter: Tissue Value: Root Meristem vs. Above Root Meristem
  misc_feature: MA Experiment ID: 108544 Result: Up-regulated in Transcription
  misc_feature: MA Experiment ID: 108687 Result: Down-regulated in Transcription
  misc_feature: MA Experiment 108687 PARAMETER Experiment Name: Zm_Embryos-Flowers__P Parameter: Tissue Value: Embryo vs. Aerial+
  misc_feature: MA Experiment ID: 20000492 Result: Down-regulated in Transcription
  misc_feature: MA Experiment 20000492 PARAMETER Experiment Name: Zm_Hybrid_Seed_Dev_P Parameter: DAP Value: 12
  misc_feature: MA Experiment 20000492 PARAMETER Experiment Name: Zm_Hybrid_Seed_Dev_P Parameter: Organism Value: Zea mays
  misc_feature: MA Experiment 20000492 PARAMETER Experiment Name: Zm_Hybrid_Seed_Dev_P Parameter: Plant Line Value: 35A19
  misc_feature: MA Experiment 20000492 PARAMETER Experiment Name: Zm_Hybrid_Seed_Dev_P Parameter: Tissue Value: Fert Kernel vs. Unfert Floret
  misc_feature: MA Experiment ID: 20000535 Result: Down-regulated in Transcription
  misc_feature: MA Experiment 20000535 PARAMETER Experiment Name: Zm_Hybrid_Seed_Dev_P Parameter: DAP Value: 30 vs. 12
  misc_feature: MA Experiment 20000535 PARAMETER Experiment Name: Zm_Hybrid_Seed_Dev_P Parameter: Organism Value: Zea mays
  misc_feature: MA Experiment 20000535 PARAMETER Experiment Name: Zm_Hybrid_Seed_Dev_P Parameter: Plant Line Value: 35A19
  misc_feature: MA Experiment 20000535 PARAMETER Experiment Name: Zm_Hybrid_Seed_Dev_P Parameter: Tissue Value: Embryo vs. Unfert Floret
aaacgaggatgtactaatgttgtggtaaataatatggacgatagtcgataacgtgaccagtggtggtgtggtgtatggtctgtattgattacatgcagcctaactaatttgccagcgagtgatgcggtgacgtgctgctgctgttgtagtaggtggtggagcaagcccagtccccaatcccaccctgccacccaaccttgcttcttctccgatagctatttctctggtttctccccaatcttcccgggtttccctgattaaagatggctgagtcctttgttctcaataccggctcgaggatcccatcggttgggcttggcgtatggcaaatacaacctgacgctgccaacgacgccatctacgctgctgtcaaggctgggtatcggcatattgactgtgcagcagcatacaacaatgagaaggaggtgggcctggctttgaagaaattatttgaagatggtgtggttaagcgtgatgatttgtttatcacctctaagctatgggctgctaatcatgcacctgaagatgtggaagagggaatcgacaccacacttcaagatttgcagcttgactacttggacttgtacctcatccatggtccaatccgcatcaaaaaaggaactagcacgatgacccctgaaaactttctccctacagatatccctgctacatgggcagcgatggagaagttatacgactctggcaaagctcgtgcaatcggcgtgagtaacttctcttgtaagaagctgcatgatttgcttgccgttgcacgagtgcctccagcagtcaaccaggttgagtgtcatccggtttggcagcaagacaagctccggaagctatgccaatccaatggtgttcatctttctgcattctcgcctttaggctcacctggatctccttggatcaatgggccaagtgtcctcaagaaccccattgtggtctctgttgcagacaagttgcagaaaacgcctgcccaggtcgctctacgctggggaatccaaatgggccatagtgtactcccgaaaagcgccaatgagtccaggattaaggagaacattgacatatttggctggtctattcctgaagatttgatggccaagttctctgaaatcaaacaggtcaggctgctgacagctgagtttgtagttcaccctcaggccggctacaatacattggaggacttttgggatggtgaaatataaaagcatacaaatttgttcagaataaaagagccaggcgaggaaacaaccacaaaaaaggggagatcgaatgcataggccccaatacgatgaatttgggggtttacgtgattgctgaacacaagtattgtgtgactaatctgtgttttgatgtggttcattggttgaagcatgatgtaaaccgtaaaggatattcatgaaaactaaggacgctatagagcg

SEQ ID NO: 4388 - protein, 312 aa, Zea mays subsp. mays
  peptide (1)..(312): Ceres Seq. ID no. 12566477
  misc_feature (1)..(296): Homolog of NCBI NO: 25283479 NR Description: probable alcohol dehydrogenase [imported] -
  misc_feature (5)..(287): Homolog of NCBI NO: 7431114 NR Description: aldehyde dehydrogenase homolog At2g37770 -
  misc_feature (5)..(312): Homolog of NCBI NO: 15232354 NR Description: aldo/keto reductase family
  misc_feature (9)..(312): Homolog of NCBI NO: 28393400 NR Description: putative aldo/keto reductase [Arabidopsis
  misc_feature (1)..(312): Homolog of NCBI NO: 30687261 NR Description: aldo/keto reductase family [Arabidopsis thaliana]
  misc_feature (5)..(312): Homolog of NCBI NO: 30687247 NR Description: aldo/keto reductase family [Arabidopsis thaliana]
  misc_feature (1)..(312): Homolog of NCBI NO: 13160399 NR Description: aldose reductase [Digitalis purpurea]
  misc_feature (1)..(312): Homolog of NCBI NO: 13160397 NR Description: aldose reductase [Digitalis purpurea]
  misc_feature (1)..(312): Homolog of NCBI NO: 34908276 NR Description: putative aldose reductase
  misc_feature (1)..(312): Homolog of NCBI NO: 34908280 NR Description: putative aldose reductase
MAESFVLNTGSRIPSVGLGVWQIQPDAANDAIYAAVKAGYRHIDCAAAYNNEKEVGLALKKLFEDGVVKRDDLFITSKLWAANHAPEDVEEGIDTTLQDLQLDYLDLYLIHGPIRIKKGTSTMTPENFLPTDIPATWAAMEKLYDSGKARAIGVSNFSCKKLHDLLAVARVPPAVNQVECHPVWQQDKLRKLCQSNGVHLSAFSPLGSPGSPWINGPSVLKNPIVVSVADKLQKTPAQVALRWGIQMGHSVLPKSANESRIKENIDIFGWSIPEDLMAKFSEIKQVRLLTAEFVVHPQAGYNTLEDFWDGEI

SEQ ID NO: 4389 - protein, 190 aa, Zea mays subsp. mays
  peptide (1)..(190): Ceres Seq. ID no. 12566478
  misc_feature (1)..(174): Homolog of NCBI NO: 25283479 NR Description: probable alcohol dehydrogenase [imported] -
  misc_feature (1)..(165): Homolog of NCBI NO: 7431114 NR Description: aldehyde dehydrogenase homolog At2g37770 -
  misc_feature (1)..(190): Homolog of NCBI NO: 15232354 NR Description: aldo/keto reductase family
  misc_feature (1)..(190): Homolog of NCBI NO: 28393400 NR Description: putative aldo/keto reductase [Arabidopsis
  misc_feature (1)..(190): Homolog of NCBI NO: 30687261 NR Description: aldo/keto reductase family [Arabidopsis thaliana]
  misc_feature (1)..(190): Homolog of NCBI NO: 30687247 NR Description: aldo/keto reductase family [Arabidopsis thaliana]
  misc_feature (1)..(190): Homolog of NCBI NO: 13160399 NR Description: aldose reductase [Digitalis purpurea]
  misc_feature (1)..(190): Homolog of NCBI NO: 13160397 NR Description: aldose reductase [Digitalis purpurea]
  misc_feature (1)..(190): Homolog of NCBI NO: 34908276 NR Description: putative aldose reductase
  misc_feature (1)..(190): Homolog of NCBI NO: 34908280 NR Description: putative aldose reductase
MTPENFLPTDIPATWAAMEKLYDSGKARAIGVSNFSCKKLHDLLAVARVPPAVNQVECHPVWQQDKLRKLCQSNGVHLSAFSPLGSPGSPWINGPSVLKNPIVVSVADKLQKTPAQVALRWGIQMGHSVLPKSANESRIKENIDIFGWSIPEDLMAKFSEIKQVRLLTAEFVVHPQAGYNTLEDFWDGEI

SEQ ID NO: 4390 - protein, 173 aa, Zea mays subsp. mays
  peptide (1)..(173): Ceres Seq. ID no. 12566479
  misc_feature (1)..(157): Homolog of NCBI NO: 25283479 NR Description: probable alcohol dehydrogenase [imported] -
  misc_feature (1)..(148): Homolog of NCBI NO: 7431114 NR Description: aldehyde dehydrogenase homolog At2g37770 -
  misc_feature (1)..(173): Homolog of NCBI NO: 15232354 NR Description: aldo/keto reductase family
  misc_feature (1)..(173): Homolog of NCBI NO: 28393400 NR Description: putative aldo/keto reductase [Arabidopsis
  misc_feature (1)..(173): Homolog of NCBI NO: 30687261 NR Description: aldo/keto reductase family [Arabidopsis thaliana]
  misc_feature (1)..(173): Homolog of NCBI NO: 30687247 NR Description: aldo/keto reductase family [Arabidopsis thaliana]
  misc_feature (1)..(173): Homolog of NCBI NO: 13160399 NR Description: aldose reductase [Digitalis purpurea]
  misc_feature (1)..(173): Homolog of NCBI NO: 13160397 NR Description: aldose reductase [Digitalis purpurea]
  misc_feature (1)..(173): Homolog of NCBI NO: 34908276 NR Description: putative aldose reductase
  misc_feature (1)..(173): Homolog of NCBI NO: 34908280 NR Description: putative aldose reductase
MEKLYDSGKARAIGVSNFSCKKLHDLLAVARVPPAVNQVECHPVWQQDKLRKLCQSNGVHLSAFSPLGSPGSPWINGPSVLKNPIVVSVADKLQKTPAQVALRWGIQMGHSVLPKSANESRIKENIDIFGWSIPEDLMAKFSEIKQVRLLTAEFVVHPQAGYNTLEDFWDGEI

SEQ ID NO: 4391 - DNA, 1990 bp, Zea mays subsp. mays
  misc_feature (1)..(1990): Ceres Seq. ID no. 12566790
  misc_feature: MA Experiment ID: 108527 Result: Down-regulated in Transcription
  misc_feature: MA Experiment 108527 PARAMETER Experiment Name: Zm_5mM_NO_P Parameter: Age (day) Value: 8
  misc_feature: MA Experiment 108527 PARAMETER Experiment Name: Zm_5mM_NO_P Parameter: Organism Value: Zea mays
  misc_feature: MA Experiment 108527 PARAMETER Experiment Name: Zm_5mM_NO_P Parameter: Plant Line Value: 35A19
  misc_feature: MA Experiment 108527 PARAMETER Experiment Name: Zm_5mM_NO_P Parameter: Timepoint (hr) Value: 6
  misc_feature: MA Experiment 108527 PARAMETER Experiment Name: Zm_5mM_NO_P Parameter: Tissue Value: Aerial
  misc_feature: MA Experiment 108527 PARAMETER Experiment Name: Zm_5mM_NO_P Parameter: Treatment Value: 5mM NO vs. No Treatment
  misc_feature: MA Experiment ID: 108528 Result: Up-regulated in Transcription
  misc_feature: MA Experiment 108528 PARAMETER Experiment Name: Zm_Imbibed_Seeds_P Parameter: Age (day) Value: 5 vs. 2
  misc_feature: MA Experiment 108528 PARAMETER Experiment Name: Zm_Imbibed_Seeds_P Parameter: Organism Value: Zea mays
  misc_feature: MA Experiment 108528 PARAMETER Experiment Name: Zm_Imbibed_Seeds_P Parameter: Plant Line Value: 35A19
  misc_feature: MA Experiment 108528 PARAMETER Experiment Name: Zm_Imbibed_Seeds_P Parameter: Tissue Value: Aerial vs. Embryo
  misc_feature: MA Experiment ID: 108530 Result: Up-regulated in Transcription
  misc_feature: MA Experiment 108530 PARAMETER Experiment Name: Zm_Imbibed_Seeds_P Parameter: Age (day) Value: 6 vs. 2
  misc_feature: MA Experiment 108530 PARAMETER Experiment Name: Zm_Imbibed_Seeds_P Parameter: Organism Value: Zea mays
  misc_feature: MA Experiment 108530 PARAMETER Experiment Name: Zm_Imbibed_Seeds_P Parameter: Plant Line Value: 35A19
  misc_feature: MA Experiment 108530 PARAMETER Experiment Name: Zm_Imbibed_Seeds_P Parameter: Tissue Value: Aerial vs. Embryo
  misc_feature: MA Experiment ID: 108547 Result: Up-regulated in Transcription
  misc_feature: MA Experiment 108547 PARAMETER Experiment Name: Zm_Imbibed_Seeds_P Parameter: Age (day) Value: 4 vs. 2
  misc_feature: MA Experiment 108547 PARAMETER Experiment Name: Zm_Imbibed_Seeds_P Parameter: Organism Value: Zea mays
  misc_feature: MA Experiment 108547 PARAMETER Experiment Name: Zm_Imbibed_Seeds_P Parameter: Plant Line Value: 35A19
  misc_feature: MA Experiment 108547 PARAMETER Experiment Name: Zm_Imbibed_Seeds_P Parameter: Tissue Value: Aerial vs. Embryo
  misc_feature: MA Experiment ID: 20000532 Result: Up-regulated in Transcription
  misc_feature: MA Experiment 20000532 PARAMETER Experiment Name: Zm_0.001percent_MeJA_P Parameter: Age (day) Value: 10
  misc_feature: MA Experiment 20000532 PARAMETER Experiment Name: Zm_0.001percent_MeJA_P Parameter: Organism Value: Zea mays
  misc_feature: MA Experiment 20000532 PARAMETER Experiment Name: Zm_0.001percent_MeJA_P Parameter: Plant Line Value: 35A19
  misc_feature: MA Experiment 20000532 PARAMETER Experiment Name: Zm_0.001percent_MeJA_P Parameter: Timepoint (hr) Value: 48
  misc_feature: MA Experiment 20000532 PARAMETER Experiment Name: Zm_0.001percent_MeJA_P Parameter: Tissue Value: Aerial
  misc_feature: MA Experiment 20000532 PARAMETER Experiment Name: Zm_0.001percent_MeJA_P Parameter: Treatment Value: 0.001percent MeJA vs. No Treatment
  misc_feature: MA Experiment ID: 20000533 Result: Up-regulated in Transcription
  misc_feature: MA Experiment 20000533 PARAMETER Experiment Name: Zm_0.001percent_MeJA_P Parameter: Age (day) Value: 11
  misc_feature: MA Experiment 20000533 PARAMETER Experiment Name: Zm_0.001percent_MeJA_P Parameter: Organism Value: Zea mays
  misc_feature: MA Experiment 20000533 PARAMETER Experiment Name: Zm_0.001percent_MeJA_P Parameter: Plant Line Value: 35A19
  misc_feature: MA Experiment 20000533 PARAMETER Experiment Name: Zm_0.001percent_MeJA_P Parameter: Timepoint (hr) Value: 72
  misc_feature: MA Experiment 20000533 PARAMETER Experiment Name: Zm_0.001percent_MeJA_P Parameter: Tissue Value: Aerial
  misc_feature: MA Experiment 20000533 PARAMETER Experiment Name: Zm_0.001percent_MeJA_P Parameter: Treatment Value: 0.001percent MeJA vs. No Treatment
gcacgagaccattacctagaacatcctaatcgaaaaattaaaccaccgagctgggcgcctccccgtggcgctcgcggccgcattagcgcggagatcgagagacaagagagggaaggcggcggcttgccggcttaagccttctctccctccgtcgtcgcctcctccttacgtccgcttcttcctcctgaatggagacgtcagcgccgcccaatgcccccgctccgccggcgcagccacggaggcggttgccggacttccagcagtcagtgcggctcaagtacgtgaagctggggtaccactacctcatatcccacgggatgtacctgctgctgtcgccgctgatggcgctcgtcgccgtgcagctctccaccgtctccccgcatgacctcgccgacctgtgggagcagctccgcttcaacctcctctccgtcgtcgcctgctccacgctgctcgtcttcctctccaccgtttacttcctcacccgcccgcgccccgtgtacctgctcgacttcgcctgctacaagccggagtcggagcgcaagtgcacgcgcgagaccttcatgcactgctccaagctcaccggatccttcacggacgagaacctcgagttccagcgcaagatcctcgagcgctccggcctcggcgaggacacgtaccttccccccgccgtgctccgggtgccccctaacccgtgcatggacgaggcgcgtaaggaggcgcgcgccttcatgttcggcgccatcgaccagctgctcgagaagaccggtgtcaggcccaaggacattggcgtcctagtggtcaactgcagcttgttcaacccgacgccgtcgctgtcagccatggtggtgaaccattacaagctgagggggaatattgtgagctacaacctcggcgggatgggctgcagcgccgggcttctgtccatcgacctcgccaaggatctgctgcaggtgcaccccaactcttacgccctggtgatcagcatggagaacatcacactgaattggtactttgggaacaaccggtccatgcttgtgtcgaattgcctgttccggatgggtggcgcggccatcctgctctcgaacaggcggtctgacaggcggaggtccaagtatgagctggtgcacacggtgcgcacgcacaagggcgccgacgacaagtgctttggctgcgtgacacaggaggaagatgatattggcaagattggcgtgtcactgtccaaggacctcatggcagtggccggagacgcacttaagaccaacatcaccacgctggggccgttggtgctcccattatcagagcaacttctcttcatgggcacattgattgccaagaaggtgctcaagatgaagatcaagccatacatccctgacttcaagctggctttcgagcacttctgcatccacgctggcggacgcgccgtgctggatgagctggagaagaacctggagctcaccgactggcacatggagccatcgaggatgaccctgtacaggtttagcaacacatcaagcagctcactctggtacgagctggcgtacactgaggcaaagggtaggatcaggaagcgcgacaggatctggcagatcgcattcggttctggattcaagtgcaacagcgccgtctggaaggcactccggacggtgaacccggccaaggagaagagcccctggatggatgagattgacaacttcccggtggatgttccaaagatttcaaaggttggtggcgcttgaagaaccattcttcttattattaggtggcaagtggagttgggtgattgtcaggggctgggcagagatttattccatcgtttccaccgttggttcttgtattcagttgtagcatggcatctgtgaaggaacttgagtagatgattcggttaggtagaaagggtgtgttcttcggctcgctagggttgtctgaatgcctgatatgtcctatttattcagattggagagagcaatcgatttgcattctttgctgcctg

SEQ ID NO: 4392 - protein, 515 aa, Zea mays subsp. mays
  peptide (1)..(515): Ceres Seq. ID no. 12566791
  misc_feature (341)..(484): Pfam Name: Chalcone and stilbene synthases, C-terminal domain Pfam Description: Chalcone and stilbene synthases, C-terminal
  misc_feature (20)..(507): Homolog of NCBI NO: 19908404 NR Description: putative fatty acid elongase [Tropaeolum majus]
  misc_feature (20)..(512): Homolog of NCBI NO: 1045614 NR Description: beta-ketoacyl-CoA synthase
  misc_feature (18)..(512): Homolog of NCBI NO: 18377979 NR Description: putative beta-ketoacyl-CoA synthase [Arabidopsis
  misc_feature (18)..(512): Homolog of NCBI NO: 15219676 NR Description: putative beta-ketoacyl-CoA synthase; protein id:
  misc_feature (3)..(512): Homolog of NCBI NO: 15239981 NR Description: beta-ketoacyl-CoA synthase
  misc_feature (3)..(512): Homolog of NCBI NO: 14334714 NR Description: putative beta-ketoacyl-CoA synthase [Arabidopsis
  misc_feature (10)..(506): Homolog of NCBI NO: 11066477 NR Description: fatty acid elongase 1-like protein [Limnanthes
  misc_feature (1)..(512): Homolog of NCBI NO: 29417540 NR Description: beta-ketoacyl-CoA-synthase [Marchantia polymorpha]
  misc_feature (18)..(512): Homolog of NCBI NO: 15225767 NR Description: putative beta-ketoacyl-CoA synthase; protein id:
  misc_feature (1)..(515): Homolog of NCBI NO: 9714501 NR Description: putative fatty acid elongase [Zea mays]
METSAPPNAPAPPAQPRRRLPDFQQSVRLKYVKLGYHYLISHGMYLLLSPLMALVAVQLSTVSPHDLADLWEQLRFNLLSVVACSTLLVFLSTVYFLTRPRPVYLLDFACYKPESERKCTRETFMHCSKLTGSFTDENLEFQRKILERSGLGEDTYLPPAVLRVPPNPCMDEARKEARAFMFGAIDQLLEKTGVRPKDIGVLVVNCSLFNPTPSLSAMVVNHYKLRGNIVSYNLGGMGCSAGLLSIDLAKDLLQVHPNSYALVISMENITLNWYFGNNRSMLVSNCLFRMGGAAILLSNRRSDRRRSKYELVHTVRTHKGADDKCFGCVTQEEDDIGKIGVSLSKDLMAVAGDALKTNITTLGPLVLPLSEQLLFMGTLIAKKVLKMKIKPYIPDFKLAFEHFCIHAGGRAVLDELEKNLELTDWHMEPSRMTLYRFSNTSSSSLWYELAYTEAKGRIRKRDRIWQIAFGSGFKCNSAVWKALRTVNPAKEKSPWMDEIDNFPVDVPKISKVGGA

SEQ ID NO: 4393 - protein, 472 aa, Zea mays subsp. mays
  peptide (1)..(472): Ceres Seq. ID no. 12566792
  misc_feature (298)..(441): Pfam Name: Chalcone and stilbene synthases, C-terminal domain Pfam Description: Chalcone and stilbene synthases, C-terminal
  misc_feature (1)..(464): Homolog of NCBI NO: 19908404 NR Description: putative fatty acid elongase [Tropaeolum majus]
  misc_feature (1)..(469): Homolog of NCBI NO: 1045614 NR Description: beta-ketoacyl-CoA synthase
  misc_feature (1)..(469): Homolog of NCBI NO: 18377979 NR Description: putative beta-ketoacyl-CoA synthase [Arabidopsis
  misc_feature (1)..(469): Homolog of NCBI NO: 15219676 NR Description: putative beta-ketoacyl-CoA synthase; protein id:
  misc_feature (1)..(469): Homolog of NCBI NO: 15239981 NR Description: beta-ketoacyl-CoA synthase
  misc_feature (1)..(469): Homolog of NCBI NO: 14334714 NR Description: putative beta-ketoacyl-CoA synthase [Arabidopsis
  misc_feature (1)..(463): Homolog of NCBI NO: 11066477 NR Description: fatty acid elongase 1-like protein [Limnanthes
  misc_feature (1)..(469): Homolog of NCBI NO: 29417540 NR Description: beta-ketoacyl-CoA-synthase [Marchantia polymorpha]
  misc_feature (1)..(469): Homolog of NCBI NO: 15225767 NR Description: putative beta-ketoacyl-CoA synthase; protein id:
  misc_feature (1)..(472): Homolog of NCBI NO: 9714501 NR Description: putative fatty acid elongase [Zea mays]
MYLLLSPLMALVAVQLSTVSPHDLADLWEQLRFNLLSVVACSTLLVFLSTVYFLTRPRPVYLLDFACYKPESERKCTRETFMHCSKLTGSFTDENLEFQRKILERSGLGEDTYLPPAVLRVPPNPCMDEARKEARAFMFGAIDQLLEKTGVRPKDIGVLVVNCSLFNPTPSLSAMVVNHYKLRGNIVSYNLGGMGCSAGLLSIDLAKDLLQVHPNSYALVISMENITLNWYFGNNRSMLVSNCLFRMGGAAILLSNRRSDRRRSKYELVHTVRTHKGADDKCFGCVTQEEDDIGKIGVSLSKDLMAVAGDALKTNITTLGPLVLPLSEQLLFMGTLIAKKVLKMKIKPYIPDFKLAFEHFCIHAGGRAVLDELEKNLELTDWHMEPSRMTLYRFSNTSSSSLWYELAYTEAKGRIRKRDRIWQIAFGSGFKCNSAVWKALRTVNPAKEKSPWMDEIDNFPVDVPKISKVGGA

SEQ ID NO: 4394 - protein, 464 aa, Zea mays subsp. mays
  peptide (1)..(464): Ceres Seq. ID no. 12566793
  misc_feature (290)..(433): Pfam Name: Chalcone and stilbene synthases, C-terminal domain Pfam Description: Chalcone and stilbene synthases, C-terminal
  misc_feature (1)..(456): Homolog of NCBI NO: 19908404 NR Description: putative fatty acid elongase [Tropaeolum majus]
  misc_feature (1)..(461): Homolog of NCBI NO: 1045614 NR Description: beta-ketoacyl-CoA synthase
  misc_feature (1)..(461): Homolog of NCBI NO: 18377979 NR Description: putative beta-ketoacyl-CoA synthase [Arabidopsis
  misc_feature (1)..(461): Homolog of NCBI NO: 15219676 NR Description: putative beta-ketoacyl-CoA synthase; protein id:
  misc_feature (1)..(461): Homolog of NCBI NO: 15239981 NR Description: beta-ketoacyl-CoA synthase
  misc_feature (1)..(461): Homolog of NCBI NO: 14334714 NR Description: putative beta-ketoacyl-CoA synthase [Arabidopsis
  misc_feature (1)..(455): Homolog of NCBI NO: 11066477 NR Description: fatty acid elongase 1-like protein [Limnanthes
  misc_feature (1)..(461): Homolog of NCBI NO: 29417540 NR Description: beta-ketoacyl-CoA-synthase [Marchantia polymorpha]
  misc_feature (1)..(461): Homolog of NCBI NO: 15225767 NR Description: putative beta-ketoacyl-CoA synthase; protein id:
  misc_feature (1)..(464): Homolog of NCBI NO: 9714501 NR Description: putative fatty acid elongase [Zea mays]
MALVAVQLSTVSPHDLADLWEQLRFNLLSVVACSTLLVFLSTVYFLTRPRPVYLLDFACYKPESERKCTRETFMHCSKLTGSFTDENLEFQRKILERSGLGEDTYLPPAVLRVPPNPCMDEARKEARAFMFGAIDQLLEKTGVRPKDIGVLVVNCSLFNPTPSLSAMVVNHYKLRGNIVSYNLGGMGCSAGLLSIDLAKDLLQVHPNSYALVISMENITLNWYFGNNRSMLVSNCLFRMGGAAILLSNRRSDRRRSKYELVHTVRTHKGADDKCFGCVTQEEDDIGKIGVSLSKDLMAVAGDALKTNITTLGPLVLPLSEQLLFMGTLIAKKVLKMKIKPYIPDFKLAFEHFCIHAGGRAVLDELEKNLELTDWHMEPSRMTLYRFSNTSSSSLWYELAYTEAKGRIRKRDRIWQIAFGSGFKCNSAVWKALRTVNPAKEKSPWMDEIDNFPVDVPKISKVGGA

SEQ ID NO: 4395 - DNA, 1831 bp, Zea mays subsp. mays
  misc_feature (1)..(1831): Ceres Seq. ID no. 12344017
  misc_feature: MA Experiment ID: 108556 Result: Down-regulated in Transcription
  misc_feature: MA Experiment 108556 PARAMETER Experiment Name: Zm_Drought_P Parameter: Age (day) Value: 9
  misc_feature: MA Experiment 108556 PARAMETER Experiment Name: Zm_Drought_P Parameter: Organism Value: Zea mays
  misc_feature: MA Experiment 108556 PARAMETER Experiment Name: Zm_Drought_P Parameter: Plant Line Value: 35A19
  misc_feature: MA Experiment 108556 PARAMETER Experiment Name: Zm_Drought_P Parameter: Timepoint (hr) Value: 24
  misc_feature: MA Experiment 108556 PARAMETER Experiment Name: Zm_Drought_P Parameter: Tissue Value: Aerial
  misc_feature: MA Experiment 108556 PARAMETER Experiment Name: Zm_Drought_P Parameter: Treatment Value: Drought vs. No Drought
agcgtggcctcccgttctgacttcggagtccctcggtctcaacgactagttgagagctcgcggctccgttcgggcgaggggaggaggttcatgaggctgctgtaggctccgttgcagccgccgcgggcgggagtccgtgattttggacgccccaccgcggcaagatccggaagcgcgttggctgttgtgccgtgagtttcagtttcggtggtcgattgcttcagcctgctgagaagtaggaggggcggccatggcggggtcgaggttcgggtcgttcaagtcggagaagggcgactccgcctccgcagcggcggcagcgggtggagcggcgcagaggagggacccgtacgaggtgctcggggtgggccgcaccgccaccgaccaggagatcaagagtgcgttccgacgcatggcgctcaagtaccatccggacaagaatggcgatgaccctgttgcatcagacaggttccaggaagtcacattctcctataacatcctgtcagatcccgataagaggcggcagtacgatacatcaggatttgatgcaatcgaatctgatagtcaggaactggagctggacttgtcgagtctcaacactgtaaacacggtgtttgcagctctttttagtaagcttggtgtgccaattaaaacaactgtttcagctacagttttagaggaggcattgaatggttcggttatggtttctcaactccagctaggaaactcagtgcagagaaaggtggaaaagcaatcggcccatttctattctgtggatataactgaaaaacaagctaaaatggggctagtttgtcgtgttcactcaaacgataaaagcaaattcaagttgctatattttgagcttgaagaaaatggcgggcttagtcttgcactacaggaagacagtgtgaaggttgggaaagttactgctgcagggatgtatttccttggttttcctgtgtaccgttttgaacaaaataacctggcagctgctgcaaaagattctgatggtgcattctttaaaagattggatagctttcagccatgtgacatacatgaactgaaacctggaacacacttctttgctgtctacggtgacaacttcttcaagagcgctagttatactatagaggttgtatgtggtgaatcttttcctgccgaaaaggagatgctacgaaatgtggaggccaagatactcacaaaacgagctgaactttccaaatttgagtcagagtatagggaggttttggcgaagttcactgaaatgaccagcaaatacacacaagaaatgcaagcgattgatggccttctgaaggaaaggaatgagatccatgcttcctataccaacaatccacctctaaaacggagttccagcaggaataaagccaagtcgccttcgaaagtggccaaaactggtacagaaaaacatcatcagaaggaaaagaaggtgaaggatcactgcatggagggatgtggaagtgacagcgataactcaagtgaaaagaaatcaaaagagcggttcccaaggaagaaatggctgaaccttccattcaaacttgacaggagaaagacgtgctgagcaatgtattatatgttccgttgctattctatcctgttatgcataatcctgagctgaactcacatttcttctctttctcatgcttttataggaagtccctctcggcccaacactagattgatatacagagaatttccactgtggcctcccgaaccaagccctctcccactgctaccaccttccttcgttgtacccggattatttcgtgtaaagatcacatgtgatcctaagaattaaaacgtgagtcgttttagc

SEQ ID NO: 4396 - protein, 441 aa, Zea mays subsp. mays
  peptide (1)..(441): Ceres Seq. ID no. 12344018
  misc_feature (31)..(96): Pfam Name: DnaJ domain Pfam Description: DnaJ domain
  misc_feature (31)..(383): Homolog of NCBI NO: 17554644 NR Description: DNaJ domain (prokaryotic heat shock protein)
  misc_feature (246)..(383): Homolog of NCBI NO: 25296041 NR Description: hypothetical protein T2K10.3 [imported] -
  misc_feature (28)..(215): Homolog of NCBI NO: 25296041 NR Description: hypothetical protein T2K10.3 [imported] -
  misc_feature (29)..(180): Homolog of NCBI NO: 7433053 NR Description: hypothetical protein F3I6.4 - Arabidopsis
  misc_feature (246)..(441): Homolog of NCBI NO: 7433053 NR Description: hypothetical protein F3I6.4 - Arabidopsis
  misc_feature (27)..(396): Homolog of NCBI NO: 34914630 NR Description: putative ARG1 protein (Altered Response to
  misc_feature (16)..(418): Homolog of NCBI NO: 15221381 NR Description: ARG1 protein (Altered Response to Gravity)
  misc_feature (28)..(383): Homolog of NCBI NO: 30696376 NR Description: Altered Response to Gravity (ARG1) protein,
  misc_feature (28)..(383): Homolog of NCBI NO: 34583424 NR Description: ARG1-like protein 2 [Arabidopsis thaliana]
  misc_feature (29)..(441): Homolog of NCBI NO: 22329767 NR Description: DNAJ-like heatshock protein
MAGSRFGSFKSEKGDSASAAAAAGGAAQRRDPYEVLGVGRTATDQEIKSAFRRMALKYHPDKNGDDPVASDRFQEVTFSYNILSDPDKRRQYDTSGFDAIESDSQELELDLSSLNTVNTVFAALFSKLGVPIKTTVSATVLEEALNGSVMVSQLQLGNSVQRKVEKQSAHFYSVDITEKQAKMGLVCRVHSNDKSKFKLLYFELEENGGLSLALQEDSVKVGKVTAAGMYFLGFPVYRFEQNNLAAAAKDSDGAFFKRLDSFQPCDIHELKPGTHFFAVYGDNFFKSASYTIEVVCGESFPAEKEMLRNVEAKILTKRAELSKFESEYREVLAKFTEMTSKYTQEMQAIDGLLKERNEIHASYTNNPPLKRSSSRNKAKSPSKVAKTGTEKHHQKEKKVKDHCMEGCGSDSDNSSEKKSKERFPRKKWLNLPFKLDRRKTC

SEQ ID NO: 4397 - protein, 388 aa, Zea mays subsp. mays
  peptide (1)..(388): Ceres Seq. ID no. 12344019
  misc_feature (1)..(127): Homolog of NCBI NO: 7433053 NR Description: hypothetical protein F3I6.4 - Arabidopsis
  misc_feature (193)..(388): Homolog of NCBI NO: 7433053 NR Description: hypothetical protein F3I6.4 - Arabidopsis
  misc_feature (1)..(343): Homolog of NCBI NO: 34914630 NR Description: putative ARG1 protein (Altered Response to
  misc_feature (1)..(365): Homolog of NCBI NO: 15221381 NR Description: ARG1 protein (Altered Response to Gravity)
  misc_feature (1)..(330): Homolog of NCBI NO: 30696376 NR Description: Altered Response to Gravity (ARG1) protein,
  misc_feature (1)..(330): Homolog of NCBI NO: 34583424 NR Description: ARG1-like protein 2 [Arabidopsis thaliana]
  misc_feature (1)..(388): Homolog of NCBI NO: 22329767 NR Description: DNAJ-like heatshock protein
  misc_feature (1)..(330): Homolog of NCBI NO: 17554644 NR Description: DNaJ domain (prokaryotic heat shock protein)
  misc_feature (193)..(330): Homolog of NCBI NO: 25296041 NR Description: hypothetical protein T2K10.3 [imported] -
  misc_feature (1)..(162): Homolog of NCBI NO: 25296041 NR Description: hypothetical protein T2K10.3 [imported] -
MALKYHPDKNGDDPVASDRFQEVTFSYNILSDPDKRRQYDTSGFDAIESDSQELELDLSSLNTVNTVFAALFSKLGVPIKTTVSATVLEEALNGSVMVSQLQLGNSVQRKVEKQSAHFYSVDITEKQAKMGLVCRVHSNDKSKFKLLYFELEENGGLSLALQEDSVKVGKVTAAGMYFLGFPVYRFEQNNLAAAAKDSDGAFFKRLDSFQPCDIHELKPGTHFFAVYGDNFFKSASYTIEVVCGESFPAEKEMLRNVEAKILTKRAELSKFESEYREVLAKFTEMTSKYTQEMQAIDGLLKERNEIHASYTNNPPLKRSSSRNKAKSPSKVAKTGTEKHHQKEKKVKDHCMEGCGSDSDNSSEKKSKERFPRKKWLNLPFKLDRRKTC

SEQ ID NO: 4398 - protein, 292 aa, Zea mays subsp. mays
  peptide (1)..(292): Ceres Seq. ID no. 12344020
  misc_feature (1)..(234): Homolog of NCBI NO: 17554644 NR Description: DNaJ domain (prokaryotic heat shock protein)
  misc_feature (97)..(234): Homolog of NCBI NO: 25296041 NR Description: hypothetical protein T2K10.3 [imported] -
  misc_feature (1)..(66): Homolog of NCBI NO: 25296041 NR Description: hypothetical protein T2K10.3 [imported] -
  misc_feature (1)..(31): Homolog of NCBI NO: 7433053 NR Description: hypothetical protein F3I6.4 - Arabidopsis
  misc_feature (97)..(292): Homolog of NCBI NO: 7433053 NR Description: hypothetical protein F3I6.4 - Arabidopsis
  misc_feature (1)..(247): Homolog of NCBI NO: 34914630 NR Description: putative ARG1 protein (Altered Response to
  misc_feature (1)..(269): Homolog of NCBI NO: 15221381 NR Description: ARG1 protein (Altered Response to Gravity)
  misc_feature (1)..(234): Homolog of NCBI NO: 30696376 NR Description: Altered Response to Gravity (ARG1) protein,
  misc_feature (1)..(234): Homolog of NCBI NO: 34583424 NR Description: ARG1-like protein 2 [Arabidopsis thaliana]
  misc_feature (1)..(292): Homolog of NCBI NO: 22329767 NR Description: DNAJ-like heatshock protein
MVSQLQLGNSVQRKVEKQSAHFYSVDITEKQAKMGLVCRVHSNDKSKFKLLYFELEENGGLSLALQEDSVKVGKVTAAGMYFLGFPVYRFEQNNLAAAAKDSDGAFFKRLDSFQPCDIHELKPGTHFFAVYGDNFFKSASYTIEVVCGESFPAEKEMLRNVEAKILTKRAELSKFESEYREVLAKFTEMTSKYTQEMQAIDGLLKERNEIHASYTNNPPLKRSSSRNKAKSPSKVAKTGTEKHHQKEKKVKDHCMEGCGSDSDNSSEKKSKERFPRKKWLNLPFKLDRRKTC

SEQ ID NO: 4399 - DNA, 1812 bp, Zea mays subsp. mays
  misc_feature (1)..(1812): Ceres Seq. ID no. 13498787
  misc_feature: MA Experiment ID: 20000492 Result: Up-regulated in Transcription
  misc_feature: MA Experiment 20000492 PARAMETER Experiment Name: Zm_Hybrid_Seed_Dev_P Parameter: DAP Value: 12
  misc_feature: MA Experiment 20000492 PARAMETER Experiment Name: Zm_Hybrid_Seed_Dev_P Parameter: Organism Value: Zea mays
  misc_feature: MA Experiment 20000492 PARAMETER Experiment Name: Zm_Hybrid_Seed_Dev_P Parameter: Plant Line Value: 35A19
  misc_feature: MA Experiment 20000492 PARAMETER Experiment Name: Zm_Hybrid_Seed_Dev_P Parameter: Tissue Value: Fert Kernel vs. Unfert Floret
attaaaaaagggttccccacagcaccaagcgcgacgtgagcgaggaggcaggcgcgcacggcgtgtcggcgtcgcaccgaacccgacacggctcggcctacggcccccacacatccggctgggccgttccgttccgtttcgttcccttcccattcttctcgtacgcggccgattgctgaccctcgctcgccctcgcttccccaccacagcaccgaaactgccccgcctccgcagccgccgcccgcgcccgctcgtcctccccgcgccgcctcggggacgccccggtcggcgatgtggcgggagcatgctaggcccgctcctcaggctcctctcggcgtgcggcggggtctggcccacctcgccggcccccggcgccgcggcctcctcttccgcctcctccggggacgactctgagggccgcgacggccttctctggtggcgcgacctcgcgcgctgccacgccggcgacgtctccgtcgccgtcgcccaggccaaccaggtgctcgaggaccagtgccgcctcgactccgccccgtccatcggcaccgtcgtcggcgtcttcgacggccacggcggccccgacgccgcccgcttcgcctgcgaccaccttgtccccaacctccgagaggcgtcctccggcccgcggggcgtcaccgcagacgccatcagggaggccttcctggccacggaggaaggattcctcgcgctcgtgtcaagcctctgggaggcccagccggacatcgccacggccgggacatgctgccttgtcggcgtcgtgcacaacaggacccttttcgtcgccaacctcggcgactcccgggccgtcctcgggaagaaggcgggccgcgctggccagatcgccgcggagcagttgtccagcgagcacaatgccaaccaggaggctgtcaggcaggagctcatggcgcaacacccagatgatgctcagattgttgcgctcaagcatggggtctggagagtgaggggcctcatacaggtgtctagatcaatcggtgatgtatacctgaaacatgcaaagtataacacagaccagatcaaacccaagttcaggcttcccgaatcattcagcaagccactattgagtgccgatccatctatcatctcccgcgatcttgaaccaaatgactgtttcatcatattcgcatcagatggattgtgggagcacctcagcaatcaagaagccgttgagattgttcacagccatcaacgtgctggaagcgcaagaagactcattaaagccgctctacaagaagcagcgcggaagcgtgagatgcgttactcggatcttacaaagatcgataagaaagttcgcaggcatttccatgatgacattactgtcatcgtcttatttataaactatgacctattattgaaaggtgctccgcagggacaacccctctccatcagatgtgccctagattattgacagtgagctagttcacccactggtattcaagctcctgcgggcagccatatccagagtcagctgacatggtcaaccggttgtgaaaagcgcacaacctccggcaccagtttccttttcgtttccccttttttgcacataaaattgacaagtcgctgaaattgccagttttcccctcttggattatgtcggataaaatgcgtatactcttcggttttggagatatatgtctagactctagagcgtgagggaaggttataaagtcttgtatgtctttgttctcttgcagtcttgcttacagttacagctagctctttttgtatgtaacaattgtcagcaatcagcatgtttaaccacctccgtgacgtttt

SEQ ID NO: 4400 - protein, 480 aa, Zea mays subsp. mays
  peptide (1)..(480): Ceres Seq. ID no. 13498788
  misc_feature (147)..(429): Pfam Name: Protein phosphatase 2C Pfam Description: Protein phosphatase 2C
  misc_feature (102)..(477): Homolog of NCBI NO: 17064756 NR Description: putative protein phosphatase-2c [Arabidopsis
  misc_feature (102)..(477): Homolog of NCBI NO: 22329238 NR Description: protein phosphatase-2c -related [Arabidopsis
  misc_feature (102)..(475): Homolog of NCBI NO: 20340237 NR Description: protein phosphatase 2c-like protein
  misc_feature (102)..(475): Homolog of NCBI NO: 18855039 NR Description: putative protein phosphatase [Oryza sativa]
  misc_feature (102)..(475): Homolog of NCBI NO: 15239244 NR Description: protein phosphatase 2C-related protein
  misc_feature (102)..(475): Homolog of NCBI NO: 11282004 NR Description: protein phosphatase 2C homolog [imported] -
  misc_feature (102)..(475): Homolog of NCBI NO: 11282001 NR Description: protein phosphatase 2C-like protein - Arabidopsis
  misc_feature (102)..(480): Homolog of NCBI NO: 21537406 NR Description: protein phosphatase-2c, putative [Arabidopsis
  misc_feature (107)..(480): Homolog of NCBI NO: 7670033 NR Description: protein phosphatase 2C-like protein [Arabidopsis
  misc_feature (102)..(480): Homolog of NCBI NO: 18401370 NR Description: protein phosphatase-2c -related [Arabidopsis
LKKGSPQHQARRERGGRRARRVGVAPNPTRLGLRPPHIRLGRSVPFRSLPILLVRGRLLTLARPRFPTTAPKLPRLRSRRPRPLVLPAPPRGRPGRRCGGSMLGPLLRLLSACGGVWPTSPAPGAAASSSASSGDDSEGRDGLLWWRDLARCHAGDVSVAVAQANQVLEDQCRLDSAPSIGTVVGVFDGHGGPDAARFACDHLVPNLREASSGPRGVTADAIREAFLATEEGFLALVSSLWEAQPDIATAGTCCLVGVVHNRTLFVANLGDSRAVLGKKAGRAGQIAAEQLSSEHNANQEAVRQELMAQHPDDAQIVALKHGVWRVRGLIQVSRSIGDVYLKHAKYNTDQIKPKFRLPESFSKPLLSADPSIISRDLEPNDCFIIFASDGLWEHLSNQEAVEIVHSHQRAGSARRLIKAALQEAARKREMRYSDLTKIDKKVRRHFHDDITVIVLFINYDLLLKGAPQGQPLSIRCALDY

SEQ ID NO: 4401 - protein, 379 aa, Zea mays subsp. mays
  peptide (1)..(379): Ceres Seq. ID no. 13498789
  misc_feature (46)..(328): Pfam Name: Protein phosphatase 2C Pfam Description: Protein phosphatase 2C
  misc_feature (1)..(376): Homolog of NCBI NO: 17064756 NR Description: putative protein phosphatase-2c [Arabidopsis
  misc_feature (1)..(376): Homolog of NCBI NO: 22329238 NR Description: protein phosphatase-2c -related [Arabidopsis
  misc_feature (1)..(374): Homolog of NCBI NO: 20340237 NR Description: protein phosphatase 2c-like protein
  misc_feature (1)..(374): Homolog of NCBI NO: 18855039 NR Description: putative protein phosphatase [Oryza sativa]
  misc_feature (1)..(374): Homolog of NCBI NO: 15239244 NR Description: protein phosphatase 2C-related protein
  misc_feature (1)..(374): Homolog of NCBI NO: 11282004 NR Description: protein phosphatase 2C homolog [imported] -
  misc_feature (1)..(374): Homolog of NCBI NO: 11282001 NR Description: protein phosphatase 2C-like protein - Arabidopsis
  misc_feature (1)..(379): Homolog of NCBI NO: 21537406 NR Description: protein phosphatase-2c, putative [Arabidopsis
  misc_feature (6)..(379): Homolog of NCBI NO: 7670033 NR Description: protein phosphatase 2C-like protein [Arabidopsis
  misc_feature (1)..(379): Homolog of NCBI NO: 18401370 NR Description: protein phosphatase-2c -related [Arabidopsis
MLGPLLRLLSACGGVWPTSPAPGAAASSSASSGDDSEGRDGLLWWRDLARCHAGDVSVAVAQANQVLEDQCRLDSAPSIGTVVGVFDGHGGPDAARFACDHLVPNLREASSGPRGVTADAIREAFLATEEGFLALVSSLWEAQPDIATAGTCCLVGVVHNRTLFVANLGDSRAVLGKKAGRAGQIAAEQLSSEHNANQEAVRQELMAQHPDDAQIVALKHGVWRVRGLIQVSRSIGDVYLKHAKYNTDQIKPKFRLPESFSKPLLSADPSIISRDLEPNDCFIIFASDGLWEHLSNQEAVEIVHSHQRAGSARRLIKAALQEAARKREMRYSDLTKIDKKVRRHFHDDITVIVLFINYDLLLKGAPQGQPLSIRCALDY

SEQ ID NO: 4402 - DNA, 1181 bp, Zea mays subsp. mays
  misc_feature (1)..(1181): Ceres Seq. ID no. 12419652
  misc_feature: MA Experiment ID: 108535 Result: Up-regulated in Transcription
  misc_feature: MA Experiment 108535 PARAMETER Experiment Name: Zm_Meristem_P Parameter: Age (day) Value: 8
  misc_feature: MA Experiment 108535 PARAMETER Experiment Name: Zm_Meristem_P Parameter: Organism Value: Zea mays
  misc_feature: MA Experiment 108535 PARAMETER Experiment Name: Zm_Meristem_P Parameter: Plant Line Value: 35A19
  misc_feature: MA Experiment 108535 PARAMETER Experiment Name: Zm_Meristem_P Parameter: Tissue Value: Root Meristem vs. Above Root Meristem
  misc_feature: MA Experiment ID: 108545 Result: Down-regulated in Transcription
  misc_feature: MA Experiment 108545 PARAMETER Experiment Name: Zm_Imbibed_Seeds_P Parameter: Age (day) Value: 3 vs. 2
  misc_feature: MA Experiment 108545 PARAMETER Experiment Name: Zm_Imbibed_Seeds_P Parameter: Organism Value: Zea mays
  misc_feature: MA Experiment 108545 PARAMETER Experiment Name: Zm_Imbibed_Seeds_P Parameter: Plant Line Value: 35A19
  misc_feature: MA Experiment 108545 PARAMETER Experiment Name: Zm_Imbibed_Seeds_P Parameter: Tissue Value: Aerial vs. Embryo
  misc_feature: MA Experiment ID: 108547 Result: Down-regulated in Transcription
  misc_feature: MA Experiment 108547 PARAMETER Experiment Name: Zm_Imbibed_Seeds_P Parameter: Age (day) Value: 4 vs. 2
  misc_feature: MA Experiment 108547 PARAMETER Experiment Name: Zm_Imbibed_Seeds_P Parameter: Organism Value: Zea mays
  misc_feature: MA Experiment 108547 PARAMETER Experiment Name: Zm_Imbibed_Seeds_P Parameter: Plant Line Value: 35A19
  misc_feature: MA Experiment 108547 PARAMETER Experiment Name: Zm_Imbibed_Seeds_P Parameter: Tissue Value: Aerial vs. Embryo
  misc_feature: MA Experiment ID: 20000108 Result: Up-regulated in Transcription
  misc_feature: MA Experiment 20000108 PARAMETER Experiment Name: Zm_Root-Tips_P Parameter: Age (day) Value: 12
  misc_feature: MA Experiment 20000108 PARAMETER Experiment Name: Zm_Root-Tips_P Parameter: Organism Value: Zea mays
  misc_feature: MA Experiment 20000108 PARAMETER Experiment Name: Zm_Root-Tips_P Parameter: Tissue Value: Root tips vs. Root mid region    35
  misc_feature: MA Experiment 20000108 PARAMETER Experiment Name: Zm_Root-Tips_P Parameter: Tissue Value: Root tips vs. Root mid region   Sequence Listing-Misc Features (4)
ggcacgtactcacagctctcaggcaggctttcttcataccacacacacacacaaagagaacacagtcgtcgtccgctccgaaatggcctacgcgacgcagcatcggcgccgagccattcttaccctggccgccatcgccctcctcctggcgtctcccatggcagccgccgccgccgccgccgccgggtgcgagggcgacaagctccccgcgggccggatctacgcgcactgcgcggcgctcccgtccctcggcgccaggctgcactggacgtacgacgccaagacggggtcgctgtccgtggcgttcgtggccaagccggcgggcgcgggcggcgccgggtgggtgtcgtgggcgatcaacccggcgggcgagggcatgaagggcgcgcaggcgctgctggccctcaagagccccgccgccccctcgtcgtcctacgtagtcaacacctacaacgtgaccgggtacaccgcgctcggngccgcgtncacgcccatcgcgtacagggccgcggagctcgccgccgacganagcggcggcggggaggtgcgcatctacgggaagctgcagctggcacccggcctggagaaggtgagccacatctggcaggtgggatccacggtggccaacggcgcgccggtcaagcacgcgttcgacacggccaacctccaggccaagggcacgctcgtcctctccggcgccgcgctgcccgtggaggcggcgccggctcccgccccggtgggctctggtggtgcctcgcccgcgaagggaggaggcgatagtggagccgccccgtctactggcgggagcagcaactcggcggctgctaaggccaccacctacgtgtctgtttcagtgctcacgctgctggcggcggcattggcaggtgcaggttcctttgcgatgtaacaaacagctccgagtcatacggccaagtagttcctgccttcttagcggtggcacgtacgtacgctgacaagcgggagagagatgacacaatcacacaacacacacatgagattaagattattagcatcctcttgtcttgctagctgatgcatatgcctgcgcgcaatcctgttctcgttagctgttggcacgcgttcggtttcgccatctgatttaccctgtatgttgtgttgttgttccgagtgttgtctcgttcttaaatacgtagtacggc

SEQ ID NO: 4403 - protein, 301 aa, Zea mays subsp. mays
  peptide (1)..(301): Ceres Seq. ID no. 12419653
  misc_feature (126)..(245): Pfam Name: Protein of unknown function (DUF568) Pfam Description: Protein of unknown function (DUF568)
  misc_feature (34)..(295): Homolog of NCBI NO: 29647484 NR Description: OJ1191_A10.2 [Oryza sativa (japonica
  misc_feature (40)..(291): Homolog of NCBI NO: 11357190 NR Description: auxin-induced protein AIR12 [imported] - thaliana (fragment) >gi|3695023|gb|AAC62613.1| unknown
  misc_feature (40)..(291): Homolog of NCBI NO: 30680258 NR Description: auxin-induced protein (AIR12) [Arabidopsis
  misc_feature (37)..(255): Homolog of NCBI NO: 15235545 NR Description: putative protein; protein id: At4g12980.1, by cDNA: 4642. [Arabidopsis thaliana] >gi|7486133|pir||T10200
  misc_feature (37)..(255): Homolog of NCBI NO: 21593814 NR Description: unknown [Arabidopsis thaliana]
  misc_feature (37)..(232): Homolog of NCBI NO: 18404500 NR Description: expressed protein; protein id: At3g25290.1, by cDNA: gi_16323199 [Arabidopsis thaliana] emb|CAB45497.1~gene_id:MJL12.25~strong similarity to unknown
  misc_feature (36)..(231): Homolog of NCBI NO: 38424013 NR Description: auxin-induced protein-like [Oryza sativa
  misc_feature (44)..(228): Homolog of NCBI NO: 18421491 NR Description: Expressed protein; protein id: At5g35735.1, by cDNA: 32450., supported by cDNA: gi_13937201 [Arabidopsis >gi|9758647|dbj|BAB09271.1| gene_id:MXH1.11~pir||T10200~similar
  misc_feature (44)..(228): Homolog of NCBI NO: 21592781 NR Description: putative membrane protein [Arabidopsis thaliana]
  misc_feature (47)..(224): Homolog of NCBI NO: 24414271 NR Description: Unknown protein [Oryza sativa (japonica
  misc_feature (159)..(159): Xaa is any aa, unknown or other
  misc_feature (162)..(162): Xaa is any aa, unknown or other
  misc_feature (176)..(176): Xaa is any aa, unknown or other
ARTHSSQAGFLHTTHTHKENTVVVRSEMAYATQHRRRAILTLAAIALLLASPMAAAAAAAAGCEGDKLPAGRIYAHCAALPSLGARLHWTYDAKTGSLSVAFVAKPAGAGGAGWVSWAINPAGEGMKGAQALLALKSPAAPSSSYVVNTYNVTGYTALXAAXTPIAYRAAELAADXSGGGEVRIYGKLQLAPGLEKVSHIWQVGSTVANGAPVKHAFDTANLQAKGTLVLSGAALPVEAAPAPAPVGSGGASPAKGGGDSGAAPSTGGSSNSAAAKATTYVSVSVLTLLAAALAGAGSFAM

SEQ ID NO: 4404 - protein, 274 aa, Zea mays subsp. mays
  peptide (1)..(274): Ceres Seq. ID no. 12419654
  misc_feature (99)..(218): Pfam Name: Protein of unknown function (DUF568) Pfam Description: Protein of unknown function (DUF568)
  misc_feature (7)..(268): Homolog of NCBI NO: 29647484 NR Description: OJ1191_A10.2 [Oryza sativa (japonica
  misc_feature (13)..(264): Homolog of NCBI NO: 11357190 NR Description: auxin-induced protein AIR12 [imported] - thaliana (fragment) >gi|3695023|gb|AAC62613.1| unknown
  misc_feature (13)..(264): Homolog of NCBI NO: 30680258 NR Description: auxin-induced protein (AIR12) [Arabidopsis
  misc_feature (10)..(228): Homolog of NCBI NO: 15235545 NR Description: putative protein; protein id: At4g12980.1, by cDNA: 4642. [Arabidopsis thaliana] >gi|7486133|pir||T10200
  misc_feature (10)..(228): Homolog of NCBI NO: 21593814 NR Description: unknown [Arabidopsis thaliana]
  misc_feature (10)..(205): Homolog of NCBI NO: 18404500 NR Description: expressed protein; protein id: At3g25290.1, by cDNA: gi_16323199 [Arabidopsis thaliana] emb|CAB45497.1~gene_id:MJL12.25~strong similarity to unknown
  misc_feature (9)..(204): Homolog of NCBI NO: 38424013 NR Description: auxin-induced protein-like [Oryza sativa
  misc_feature (17)..(201): Homolog of NCBI NO: 18421491 NR Description: Expressed protein; protein id: At5g35735.1, by cDNA: 32450., supported by cDNA: gi_13937201 [Arabidopsis >gi|9758647|dbj|BAB09271.1| gene_id:MXH1.11~pir||T10200~similar
  misc_feature (17)..(201): Homolog of NCBI NO: 21592781 NR Description: putative membrane protein [Arabidopsis thaliana]
  misc_feature (20)..(197): Homolog of NCBI NO: 24414271 NR Description: Unknown protein [Oryza sativa (japonica
  misc_feature (132)..(132): Xaa is any aa, unknown or other
  misc_feature (135)..(135): Xaa is any aa, unknown or other
  misc_feature (149)..(149): Xaa is any aa, unknown or other
MAYATQHRRRAILTLAAIALLLASPMAAAAAAAAGCEGDKLPAGRIYAHCAALPSLGARLHWTYDAKTGSLSVAFVAKPAGAGGAGWVSWAINPAGEGMKGAQALLALKSPAAPSSSYVVNTYNVTGYTALXAAXTPIAYRAAELAADXSGGGEVRIYGKLQLAPGLEKVSHIWQVGSTVANGAPVKHAFDTANLQAKGTLVLSGAALPVEAAPAPAPVGSGGASPAKGGGDSGAAPSTGGSSNSAAAKATTYVSVSVLTLLAAALAGAGSFAM

SEQ ID NO: 4405 - protein, 259 aa, Zea mays subsp. mays
  peptide (1)..(259): Ceres Seq. ID no. 12419655
  misc_feature (5)..(242): Homolog of NCBI NO: 17027049 NR Description: elongation factor-1 alpha [Chimarra rossi]
  misc_feature (9)..(242): Homolog of NCBI NO: 17027071 NR Description: elongation factor-1 alpha [Xiphocentron sp.
  misc_feature (160)..(160): Xaa is any aa, unknown or other
  misc_feature (162)..(162): Xaa is any aa, unknown or other
  misc_feature (177)..(177): Xaa is any aa, unknown or other
GTYSQLSGRLSSYHTHTQREHSRRPLRNGLRDAASAPSHSYPGRHRPPPGVSHGSRRRRRRRVRGRQAPRGPDLRALRGAPVPRRQAALDVRRQDGVAVRGVRGQAGGRGRRRVGVVGDQPGGRGHEGRAGAAGPQEPRRPLVVLRSQHLQRDRVHRARXRXHAHRVQGRGARRRRXRRRGGAHLREAAAGTRPGEGEPHLAGGIHGGQRRAGQARVRHGQPPGQGHARPLRRRAARGGGAGSRPGGLWWCLAREGRRR

SEQ ID NO: 4406 - DNA, 1564 bp, Zea mays subsp. mays
  misc_feature (1)..(1564): Ceres Seq. ID no. 12369436
  misc_feature: MA Experiment ID: 108556 Result: Down-regulated in Transcription
  misc_feature: MA Experiment 108556 PARAMETER Experiment Name: Zm_Drought_P Parameter: Age (day) Value: 9
  misc_feature: MA Experiment 108556 PARAMETER Experiment Name: Zm_Drought_P Parameter: Organism Value: Zea mays
  misc_feature: MA Experiment 108556 PARAMETER Experiment Name: Zm_Drought_P Parameter: Plant Line Value: 35A19
  misc_feature: MA Experiment 108556 PARAMETER Experiment Name: Zm_Drought_P Parameter: Timepoint (hr) Value: 24
  misc_feature: MA Experiment 108556 PARAMETER Experiment Name: Zm_Drought_P Parameter: Tissue Value: Aerial
  misc_feature: MA Experiment 108556 PARAMETER Experiment Name: Zm_Drought_P Parameter: Treatment Value: Drought vs. No Drought
  misc_feature: MA Experiment ID: 20000478 Result: Down-regulated in Transcription
  misc_feature: MA Experiment 20000478 PARAMETER Experiment Name: Zm_5mM_SA_P Parameter: Age (day) Value: 11
  misc_feature: MA Experiment 20000478 PARAMETER Experiment Name: Zm_5mM_SA_P Parameter: Organism Value: Zea mays
  misc_feature: MA Experiment 20000478 PARAMETER Experiment Name: Zm_5mM_SA_P Parameter: Plant Line Value: 35A19
  misc_feature: MA Experiment 20000478 PARAMETER Experiment Name: Zm_5mM_SA_P Parameter: Timepoint (hr) Value: 72
  misc_feature: MA Experiment 20000478 PARAMETER Experiment Name: Zm_5mM_SA_P Parameter: Tissue Value: Aerial
  misc_feature: MA Experiment 20000478 PARAMETER Experiment Name: Zm_5mM_SA_P Parameter: Treatment Value: 5mM SA vs. No Treatment
  misc_feature: MA Experiment ID: 20000479 Result: Down-regulated in Transcription
  misc_feature: MA Experiment 20000479 PARAMETER Experiment Name: Zm_Drought_P Parameter: Age (day) Value: 10
  misc_feature: MA Experiment 20000479 PARAMETER Experiment Name: Zm_Drought_P Parameter: Organism Value: Zea mays
  misc_feature: MA Experiment 20000479 PARAMETER Experiment Name: Zm_Drought_P Parameter: Plant Line Value: 35A19
  misc_feature: MA Experiment 20000479 PARAMETER Experiment Name: Zm_Drought_P Parameter: Timepoint (hr) Value: 48
  misc_feature: MA Experiment 20000479 PARAMETER Experiment Name: Zm_Drought_P Parameter: Tissue Value: Aerial
  misc_feature: MA Experiment 20000479 PARAMETER Experiment Name: Zm_Drought_P Parameter: Treatment Value: Drought vs. No Drought
  misc_feature: MA Experiment ID: 20000480 Result: Down-regulated in Transcription
  misc_feature: MA Experiment 20000480 PARAMETER Experiment Name: Zm_Drought_P Parameter: Age (day) Value: 11
  misc_feature: MA Experiment 20000480 PARAMETER Experiment Name: Zm_Drought_P Parameter: Organism Value: Zea mays
  misc_feature: MA Experiment 20000480 PARAMETER Experiment Name: Zm_Drought_P Parameter: Plant Line Value: 35A19
  misc_feature: MA Experiment 20000480 PARAMETER Experiment Name: Zm_Drought_P Parameter: Timepoint (hr) Value: 72
  misc_feature: MA Experiment 20000480 PARAMETER Experiment Name: Zm_Drought_P Parameter: Tissue Value: Aerial
  misc_feature: MA Experiment 20000480 PARAMETER Experiment Name: Zm_Drought_P Parameter: Treatment Value: Drought vs. No Drought
  misc_feature: MA Experiment ID: 20000534 Result: Up-regulated in Transcription
  misc_feature: MA Experiment 20000534 PARAMETER Experiment Name: Zm_Hybrid_Pollen_P Parameter: Age (day) Value: 8
  misc_feature: MA Experiment 20000534 PARAMETER Experiment Name: Zm_Hybrid_Pollen_P Parameter: Organism Value: Zea mays
  misc_feature: MA Experiment 20000534 PARAMETER Experiment Name: Zm_Hybrid_Pollen_P Parameter: Plant Line Value: 35A19
  misc_feature: MA Experiment 20000534 PARAMETER Experiment Name: Zm_Hybrid_Pollen_P Parameter: Tissue Value: Pollen vs. Aerial
aaccttttgtttgttcttttgttgccttccttttctccgcactcatcgcttgttgcggttcgctctctacaaggaggcggcttgcgcggggggcatcgtgcaatggcgcggcggtgcccgtgcaggctgctgctagccgtggcggcggnggccgtgctcgtggccgcggcagcgcaggcgcaggagacgtgctcggggaccgtccccgcgccgccgcgccgcggggcgcgggtgtccgtggccagcttcggcggcgcgggcgacggacggacgctcaacacggcggcgttcgcgcgcgccgtcgccagcatcgagcgccgcgccgcgccgggcggggcggagctctacgtgccgcccggggtgtggctcacggggcccttcaacctcacctcgcgcatgacgctcttcctcgcgcgcggcgccgtcatccgcgccacgcaggacacatcaagctggcctctgattgaaccgctgccctcatacgggagaggacgtgagctgcccggcggaagatacataggtttaatccatggcaatgggcttcaggatgttgtcatcacaggcgagaatggaactattgatggtcaaggcagcgcgtggtgggatatgtggaagaacaggacactgctctacacaaggcctcaccttcttgagctgatgagctcttctgatatcattgtctccaatgtcgtctttcaggattcgccattctggaacatccatcctgtttattgcagcaatgttgtgatcagaaacgtgactatcctagctccacatgactcccccaacacggatggaattgatccagattccagcagcaacatctgcatcgaggattgctacatttcgactggtgacgattccatcgccatcaagagtggctgggatgagtatggaatcgcctatggccgccccagttctggaatcaccgtgcggcggatcacaggctcctccccgtttgctggcttcgcggtcggaagcgagacatcaggtggcgtggagaacgtccttgcagaacacttgaacttcttcaactcagggtttgggatccatgtcaagaccaacacaggcaggggaggcttcatcaggaacatcactgtctcggatgtgacgctggataacgtccggtacggcctgcggatcgttggcgatgtcggcaatcaccccgacaacagctacaaccagagtgcgctcccgatcgtcgacacccttatggtaaagaatgtccagggccagaacgtcagggaggctgggctgatcaagggcatcgccaactcggccttctcccggatctgcctgtcgaacgtcaagttcactggtggtgcgcctgtccggccgtggaagtgcgaggctgtcagcggtggcgctctcgacgtgcagccgtccccgtgcacagaactgacttccacgtctgggacgagcttctgtacaaattcgctttgatgctttgccagctagctgagcctgagctgctgctatgcttctgtatctacgagtatgtatactggtgctttaaagcttgggcacccaagtatttatcttcccgaaaattaatttggtttcc

SEQ ID NO: 4407 - protein, 480 aa, Zea mays subsp. mays
  peptide (1)..(480): Ceres Seq. ID no. 12369437
  misc_feature (191)..(464): Pfam Name: Glycosyl hydrolases family 28 Pfam Description: Glycosyl hydrolases family 28
  misc_feature (38)..(480): Homolog of NCBI NO: 15228881 NR Description: polygalacturonase, putative
  misc_feature (38)..(467): Homolog of NCBI NO: 34897760 NR Description: ESTs AU029388(E30287),D49277(S16474) correspond a region of the predicted gene.~Similar to Arabidopsis thaliana
  misc_feature (102)..(472): Homolog of NCBI NO: 34393209 NR Description: putative polygalacturonase
  misc_feature (43)..(467): Homolog of NCBI NO: 11263971 NR Description: hypothetical protein T17J13.70 - Arabidopsis
  misc_feature (43)..(467): Homolog of NCBI NO: 18412253 NR Description: polygalacturonase, putative
  misc_feature (78)..(476): Homolog of NCBI NO: 40714685 NR Description: putative polygalacturonase
  misc_feature (63)..(473): Homolog of NCBI NO: 22329119 NR Description: polygalacturonase, putative; protein id:
  misc_feature (63)..(478): Homolog of NCBI NO: 15238207 NR Description: polygalacturonase, putative; protein id:
  misc_feature (55)..(479): Homolog of NCBI NO: 15236625 NR Description: polygalacturonase, putative
  misc_feature (43)..(480): Homolog of NCBI NO: 34912726 NR Description: putative polygalacturonase
  misc_feature (50)..(50): Xaa is any aa, unknown or other
NLLFVLLLPSFSPHSSLVAVRSLQGGGLRGGHRAMARRCPCRLLLAVAAXAVLVAAAAQAQETCSGTVPAPPRRGARVSVASFGGAGDGRTLNTAAFARAVASIERRAAPGGAELYVPPGVWLTGPFNLTSRMTLFLARGAVIRATQDTSSWPLIEPLPSYGRGRELPGGRYIGLIHGNGLQDVVITGENGTIDGQGSAWWDMWKNRTLLYTRPHLLELMSSSDIIVSNVVFQDSPFWNIHPVYCSNVVIRNVTILAPHDSPNTDGIDPDSSSNICIEDCYISTGDDSIAIKSGWDEYGIAYGRPSSGITVRRITGSSPFAGFAVGSETSGGVENVLAEHLNFFNSGFGIHVKTNTGRGGFIRNITVSDVTLDNVRYGLRIVGDVGNHPDNSYNQSALPIVDTLMVKNVQGQNVREAGLIKGIANSAFSRICLSNVKFTGGAPVRPWKCEAVSGGALDVQPSPCTELTSTSGTSFCTNSL

SEQ ID NO: 4408 - protein, 446 aa, Zea mays subsp. mays
  peptide (1)..(446): Ceres Seq. ID no. 12369438
  misc_feature (157)..(430): Pfam Name: Glycosyl hydrolases family 28 Pfam Description: Glycosyl hydrolases family 28
  misc_feature (4)..(446): Homolog of NCBI NO: 15228881 NR Description: polygalacturonase, putative
  misc_feature (4)..(433): Homolog of NCBI NO: 34897760 NR Description: ESTs AU029388(E30287),D49277(S16474) correspond a region of the predicted gene.~Similar to Arabidopsis thaliana
  misc_feature (68)..(438): Homolog of NCBI NO: 34393209 NR Description: putative polygalacturonase
  misc_feature (9)..(433): Homolog of NCBI NO: 11263971 NR Description: hypothetical protein T17J13.70 - Arabidopsis
  misc_feature (9)..(433): Homolog of NCBI NO: 18412253 NR Description: polygalacturonase, putative
  misc_feature (44)..(442): Homolog of NCBI NO: 40714685 NR Description: putative polygalacturonase
  misc_feature (29)..(439): Homolog of NCBI NO: 22329119 NR Description: polygalacturonase, putative; protein id:
  misc_feature (29)..(444): Homolog of NCBI NO: 15238207 NR Description: polygalacturonase, putative; protein id:
  misc_feature (21)..(445): Homolog of NCBI NO: 15236625 NR Description: polygalacturonase, putative
  misc_feature (9)..(446): Homolog of NCBI NO: 34912726 NR Description: putative polygalacturonase
  misc_feature (16)..(16): Xaa is any aa, unknown or other
MARRCPCRLLLAVAAXAVLVAAAAQAQETCSGTVPAPPRRGARVSVASFGGAGDGRTLNTAAFARAVASIERRAAPGGAELYVPPGVWLTGPFNLTSRMTLFLARGAVIRATQDTSSWPLIEPLPSYGRGRELPGGRYIGLIHGNGLQDVVITGENGTIDGQGSAWWDMWKNRTLLYTRPHLLELMSSSDIIVSNVVFQDSPFWNIHPVYCSNVVIRNVTILAPHDSPNTDGIDPDSSSNICIEDCYISTGDDSIAIKSGWDEYGIAYGRPSSGITVRRITGSSPFAGFAVGSETSGGVENVLAEHLNFFNSGFGIHVKTNTGRGGFIRNITVSDVTLDNVRYGLRIVGDVGNHPDNSYNQSALPIVDTLMVKNVQGQNVREAGLIKGIANSAFSRICLSNVKFTGGAPVRPWKCEAVSGGALDVQPSPCTELTSTSGTSFCTNSL

SEQ ID NO: 4409 - protein, 348 aa, Zea mays subsp. mays
  peptide (1)..(348): Ceres Seq. ID no. 12369439
  misc_feature (59)..(332): Pfam Name: Glycosyl hydrolases family 28 Pfam Description: Glycosyl hydrolases family 28
  misc_feature (1)..(344): Homolog of NCBI NO: 40714685 NR Description: putative polygalacturonase
  misc_feature (1)..(341): Homolog of NCBI NO: 22329119 NR Description: polygalacturonase, putative; protein id:
  misc_feature (1)..(346): Homolog of NCBI NO: 15238207 NR Description: polygalacturonase, putative; protein id:
  misc_feature (1)..(335): Homolog of NCBI NO: 34897760 NR Description: ESTs AU029388(E30287),D49277(S16474) correspond a region of the predicted gene.~Similar to Arabidopsis thaliana
  misc_feature (1)..(335): Homolog of NCBI NO: 11263971 NR Description: hypothetical protein T17J13.70 - Arabidopsis
  misc_feature (1)..(335): Homolog of NCBI NO: 18412253 NR Description: polygalacturonase, putative
  misc_feature (1)..(340): Homolog of NCBI NO: 34393209 NR Description: putative polygalacturonase
  misc_feature (1)..(348): Homolog of NCBI NO: 15228881 NR Description: polygalacturonase, putative
  misc_feature (1)..(347): Homolog of NCBI NO: 15236625 NR Description: polygalacturonase, putative
  misc_feature (1)..(348): Homolog of NCBI NO: 34912726 NR Description: putative polygalacturonase
MTLFLARGAVIRATQDTSSWPLIEPLPSYGRGRELPGGRYIGLIHGNGLQDVVITGENGTIDGQGSAWWDMWKNRTLLYTRPHLLELMSSSDIIVSNVVFQDSPFWNIHPVYCSNVVIRNVTILAPHDSPNTDGIDPDSSSNICIEDCYISTGDDSIAIKSGWDEYGIAYGRPSSGITVRRITGSSPFAGFAVGSETSGGVENVLAEHLNFFNSGFGIHVKTNTGRGGFIRNITVSDVTLDNVRYGLRIVGDVGNHPDNSYNQSALPIVDTLMVKNVQGQNVREAGLIKGIANSAFSRICLSNVKFTGGAPVRPWKCEAVSGGALDVQPSPCTELTSTSGTSFCTNSL

SEQ ID NO: 4410 - DNA, 1740 bp, Zea mays subsp. mays
  misc_feature (1)..(1740): Ceres Seq. ID no. 13498786
  misc_feature: MA Experiment ID: 108527 Result: Up-regulated in Transcription
  misc_feature: MA Experiment 108527 PARAMETER Experiment Name: Zm_5mM_NO_P Parameter: Age (day) Value: 8
  misc_feature: MA Experiment 108527 PARAMETER Experiment Name: Zm_5mM_NO_P Parameter: Organism Value: Zea mays
  misc_feature: MA Experiment 108527 PARAMETER Experiment Name: Zm_5mM_NO_P Parameter: Plant Line Value: 35A19
  misc_feature: MA Experiment 108527 PARAMETER Experiment Name: Zm_5mM_NO_P Parameter: Timepoint (hr) Value: 6
  misc_feature: MA Experiment 108527 PARAMETER Experiment Name: Zm_5mM_NO_P Parameter: Tissue Value: Aerial
  misc_feature: MA Experiment 108527 PARAMETER Experiment Name: Zm_5mM_NO_P Parameter: Treatment Value: 5mM NO vs. No Treatment
  misc_feature: MA Experiment ID: 108536 Result: Up-regulated in Transcription
  misc_feature: MA Experiment 108536 PARAMETER Experiment Name: Zm_Meristem_P Parameter: Age (day) Value: 8
  misc_feature: MA Experiment 108536 PARAMETER Experiment Name: Zm_Meristem_P Parameter: Organism Value: Zea mays
  misc_feature: MA Experiment 108536 PARAMETER Experiment Name: Zm_Meristem_P Parameter: Plant Line Value: 35A19
  misc_feature: MA Experiment 108536 PARAMETER Experiment Name: Zm_Meristem_P Parameter: Tissue Value: Shoot Meristem vs. Above Shoot Meristem
  misc_feature: MA Experiment ID: 108559 Result: Up-regulated in Transcription
  misc_feature: MA Experiment 108559 PARAMETER Experiment Name: Zm_5mM_NO_P Parameter: Age (day) Value: 8
  misc_feature: MA Experiment 108559 PARAMETER Experiment Name: Zm_5mM_NO_P Parameter: Organism Value: Zea mays
  misc_feature: MA Experiment 108559 PARAMETER Experiment Name: Zm_5mM_NO_P Parameter: Plant Line Value: 35A19
  misc_feature: MA Experiment 108559 PARAMETER Experiment Name: Zm_5mM_NO_P Parameter: Timepoint (hr) Value: 12
  misc_feature: MA Experiment 108559 PARAMETER Experiment Name: Zm_5mM_NO_P Parameter: Tissue Value: Aerial
  misc_feature: MA Experiment 108559 PARAMETER Experiment Name: Zm_5mM_NO_P Parameter: Treatment Value: 5mM NO vs. No Treatment
  misc_feature: MA Experiment ID: 20000626 Result: Up-regulated in Transcription
  misc_feature: MA Experiment 20000626 PARAMETER Experiment Name: Zm_Herbicide-Treatments_P Parameter: Timepoint (hr) Value: 12
  misc_feature: MA Experiment 20000626 PARAMETER Experiment Name: Zm_Herbicide-Treatments_P Parameter: Tissue Value: Aerial
  misc_feature: MA Experiment 20000626 PARAMETER Experiment Name: Zm_Herbicide-Treatments_P Parameter: Treatment Value: Roundup vs. No Treatment
  misc_feature: MA Experiment ID: 20000630 Result: Up-regulated in Transcription
  misc_feature: MA Experiment 20000630 PARAMETER Experiment Name: Zm_Herbicide-Treatments_P Parameter: Timepoint (hr) Value: 4
  misc_feature: MA Experiment 20000630 PARAMETER Experiment Name: Zm_Herbicide-Treatments_P Parameter: Tissue Value: Aerial
  misc_feature: MA Experiment 20000630 PARAMETER Experiment Name: Zm_Herbicide-Treatments_P Parameter: Treatment Value: Roundup vs. No Treatment
gggctgcctgctcacacttcgccactactgctgctgcgcgttggcgagcgcgcgtggttcacgagcgagctccaccacaagcccagtcgcgcacggcagccgttttgcttgttttgtttgctttccgcctcttccgtgcttcctcttttgggcggcctggctgggctagctagctgttctgttcattccgagttcccggcatagaacacgaggttggagttagaggcttaccgagggagcagacagcagaggtcactagcgatttcacagtcacgcacctgcatttcttcttttttttcttcttcttttctttagcaagctctctttcttttcttgctcttgttttgtttgtcctccctgtaataactcttgcctgccttcccctaccctggtctctttccttcttcctgcactgcaggacactataagagtagctagccctacccaatatcttcagccgtgcttgccaacttggagagagagagagagagagagagagagagagagagagagagagagagagagagagagagagagagagagagagagagagagagagagagagagagaagagaagagaagagragagaagggagtgagtgatcgcaggaaggaggatcggagtgatgggagacgcagcagagaccaacaagactcttcacaactggatgggcgagccgaggccgaggtcgagcgaccagcgcgacgaggaggagacgcttcagctcagcctcggcctccccggaggaggagcaagtgcgggtggtggggtagcacccgccgcctggagaatgctgccggccagagacgaggagatgcgctctgctgctgctgtcgtcgacacctccctgctctctctcggctactccgccccagctttctcgccccgctcaccaggcaaggcaaaggggtccccagcagcagctacagagaatgcccttgcatccaccaacaacgcctcccagagaagatctccaaataccccggttattgggtggcctccagttcgtgccttcagaagaaatctggccacctctagcagagcatcccttgaacatcagaatgggaagaaggaagacaaacctgaacagaccacaaaaagagctccatttgtaaagatcaacatggacggcatccctattggtagaaaaatcgatctgagtgccctcggtagttacgatgagctgtctctgtctgtcgacaagctattccgggggcttsttgcagcacaacaagaccctctggctgccggcgcaaaggagtgttcacaggaagaggtggcgatatcgggtttactagatggaactggggagtacactctggtttatgaggattatgaaggcgatagggtgctggttggcgatgtcccctgggggatgtttgtttcttcggtgaagagstgcgcgttctgaagacatctgacctctcttcatctctaacagcacctcctggccagaagaggacggtaactgagtgtccagtgtttacctcttagacacttccttgcagtgatgttggtgtgctgtgaagaagaaaacgtcttctgagcttgtatcatctttcttcgtggtttcttcctcttcttttccctactttctcttggaagggatcatcaaagaaccgaaccgaccttttgggttttcctgctcttgtttattttgtttctctttccgggaagcgatgtgaccttttgggttgtatgtaaatgttcagacgaaccagctctatgtttatgcagcc

SEQ ID NO: 4411 - protein, 261 aa, Zea mays subsp. mays
  peptide (1)..(261): Ceres Seq. ID no. 15223050
  misc_feature (58)..(257): Pfam Name: AUX/IAA family Pfam Description: AUX/IAA family
  misc_feature (229)..(257): Homolog of NCBI NO: 18420964 NR Description: auxin-responsive protein IAA28 (Indoleacetic
  misc_feature (76)..(195): Homolog of NCBI NO: 18420964 NR Description: auxin-responsive protein IAA28 (Indoleacetic
  misc_feature (106)..(257): Homolog of NCBI NO: 25296228 NR Description: auxin-induced protein IAA18
  misc_feature (106)..(257): Homolog of NCBI NO: 21594025 NR Description: auxin regulated protein IAA18, putative
  misc_feature (106)..(257): Homolog of NCBI NO: 15218080 NR Description: auxin-responsive protein IAA18 (Indoleacetic
  misc_feature (90)..(257): Homolog of NCBI NO: 34909384 NR Description: putative phytochrome-associated protein
  misc_feature (53)..(257): Homolog of NCBI NO: 34906394 NR Description: P0710E05.9 [Oryza sativa (japonica
  misc_feature (103)..(257): Homolog of NCBI NO: 4093155 NR Description: phytochrome-associated protein 1 [Arabidopsis
  misc_feature (58)..(257): Homolog of NCBI NO: 21593333 NR Description: phytochrome-associated protein 1 (PAP1)
  misc_feature (58)..(257): Homolog of NCBI NO: 15228226 NR Description: auxin-responsive protein (Indoleacetic
  misc_feature (199)..(199): Xaa is any aa, unknown or other
  misc_feature (258)..(258): Xaa is any aa, unknown or other
MGDAAETNKTLHNWMGEPRPRSSDQRDEEETLQLSLGLPGGGASAGGGVAPAAWRMLPARDEEMRSAAAVVDTSLLSLGYSAPAFSPRSPGKAKGSPAAATENALASTNNASQRRSPNTPVIGWPPVRAFRRNLATSSRASLEHQNGKKEDKPEQTTKRAPFVKINMDGIPIGRKIDLSALGSYDELSLSVDKLFRGLXAAQQDPLAAGAKECSQEEVAISGLLDGTGEYTLVYEDYEGDRVLVGDVPWGMFVSSVKXCAF

SEQ ID NO: 4412 - protein, 247 aa, Zea mays subsp. mays
  peptide (1)..(247): Ceres Seq. ID no. 15223051
  misc_feature (44)..(243): Pfam Name: AUX/IAA family Pfam Description: AUX/IAA family
  misc_feature (215)..(243): Homolog of NCBI NO: 18420964 NR Description: auxin-responsive protein IAA28 (Indoleacetic
  misc_feature (62)..(181): Homolog of NCBI NO: 18420964 NR Description: auxin-responsive protein IAA28 (Indoleacetic
  misc_feature (92)..(243): Homolog of NCBI NO: 25296228 NR Description: auxin-induced protein IAA18
  misc_feature (92)..(243): Homolog of NCBI NO: 21594025 NR Description: auxin regulated protein IAA18, putative
  misc_feature (92)..(243): Homolog of NCBI NO: 15218080 NR Description: auxin-responsive protein IAA18 (Indoleacetic
  misc_feature (76)..(243): Homolog of NCBI NO: 34909384 NR Description: putative phytochrome-associated protein
  misc_feature (39)..(243): Homolog of NCBI NO: 34906394 NR Description: P0710E05.9 [Oryza sativa (japonica
  misc_feature (89)..(243): Homolog of NCBI NO: 4093155 NR Description: phytochrome-associated protein 1 [Arabidopsis
  misc_feature (44)..(243): Homolog of NCBI NO: 21593333 NR Description: phytochrome-associated protein 1 (PAP1)
  misc_feature (44)..(243): Homolog of NCBI NO: 15228226 NR Description: auxin-responsive protein (Indoleacetic
  misc_feature (185)..(185): Xaa is any aa, unknown or other
  misc_feature (244)..(244): Xaa is any aa, unknown or other
MGEPRPRSSDQRDEEETLQLSLGLPGGGASAGGGVAPAAWRMLPARDEEMRSAAAVVDTSLLSLGYSAPAFSPRSPGKAKGSPAAATENALASTNNASQRRSPNTPVIGWPPVRAFRRNLATSSRASLEHQNGKKEDKPEQTTKRAPFVKINMDGIPIGRKIDLSALGSYDELSLSVDKLFRGLXAAQQDPLAAGAKECSQEEVAISGLLDGTGEYTLVYEDYEGDRVLVGDVPWGMFVSSVKXCAF

SEQ ID NO: 4413 - protein, 206 aa, Zea mays subsp. mays
  peptide (1)..(206): Ceres Seq. ID no. 15223052
  misc_feature (3)..(202): Pfam Name: AUX/IAA family Pfam Description: AUX/IAA family
  misc_feature (174)..(202): Homolog of NCBI NO: 18420964 NR Description: auxin-responsive protein IAA28 (Indoleacetic
  misc_feature (21)..(140): Homolog of NCBI NO: 18420964 NR Description: auxin-responsive protein IAA28 (Indoleacetic
  misc_feature (51)..(202): Homolog of NCBI NO: 25296228 NR Description: auxin-induced protein IAA18
  misc_feature (51)..(202): Homolog of NCBI NO: 21594025 NR Description: auxin regulated protein IAA18, putative
  misc_feature (51)..(202): Homolog of NCBI NO: 15218080 NR Description: auxin-responsive protein IAA18 (Indoleacetic
  misc_feature (35)..(202): Homolog of NCBI NO: 34909384 NR Description: putative phytochrome-associated protein
  misc_feature (1)..(202): Homolog of NCBI NO: 34906394 NR Description: P0710E05.9 [Oryza sativa (japonica
  misc_feature (48)..(202): Homolog of NCBI NO: 4093155 NR Description: phytochrome-associated protein 1 [Arabidopsis
  misc_feature (3)..(202): Homolog of NCBI NO: 21593333 NR Description: phytochrome-associated protein 1 (PAP1)
  misc_feature (3)..(202): Homolog of NCBI NO: 15228226 NR Description: auxin-responsive protein (Indoleacetic
  misc_feature (144)..(144): Xaa is any aa, unknown or other
  misc_feature (203)..(203): Xaa is any aa, unknown or other
MLPARDEEMRSAAAVVDTSLLSLGYSAPAFSPRSPGKAKGSPAAATENALASTNNASQRRSPNTPVIGWPPVRAFRRNLATSSRASLEHQNGKKEDKPEQTTKRAPFVKINMDGIPIGRKIDLSALGSYDELSLSVDKLFRGLXAAQQDPLAAGAKECSQEEVAISGLLDGTGEYTLVYEDYEGDRVLVGDVPWGMFVSSVKXCAF

SEQ ID NO: 4414 - DNA, 1715 bp, Zea mays subsp. mays
  misc_feature (1)..(1715): Ceres Seq. ID no. 12347925
  misc_feature: MA Experiment ID: 108515 Result: Up-regulated in Transcription
  misc_feature: MA Experiment 108515 PARAMETER Experiment Name: Zm_2mM_SA_P Parameter: Age (day) Value: 8
  misc_feature: MA Experiment 108515 PARAMETER Experiment Name: Zm_2mM_SA_P Parameter: Organism Value: Zea mays
  misc_feature: MA Experiment 108515 PARAMETER Experiment Name: Zm_2mM_SA_P Parameter: Plant Line Value: 35A19
  misc_feature: MA Experiment 108515 PARAMETER Experiment Name: Zm_2mM_SA_P Parameter: Timepoint (hr) Value: 12
  misc_feature: MA Experiment 108515 PARAMETER Experiment Name: Zm_2mM_SA_P Parameter: Tissue Value: Aerial
  misc_feature: MA Experiment 108515 PARAMETER Experiment Name: Zm_2mM_SA_P Parameter: Treatment Value: 2mM SA vs. No Treatment
  misc_feature: MA Experiment ID: 108527 Result: Up-regulated in Transcription
  misc_feature: MA Experiment 108527 PARAMETER Experiment Name: Zm_5mM_NO_P Parameter: Age (day) Value: 8
  misc_feature: MA Experiment 108527 PARAMETER Experiment Name: Zm_5mM_NO_P Parameter: Organism Value: Zea mays
  misc_feature: MA Experiment 108527 PARAMETER Experiment Name: Zm_5mM_NO_P Parameter: Plant Line Value: 35A19
  misc_feature: MA Experiment 108527 PARAMETER Experiment Name: Zm_5mM_NO_P Parameter: Timepoint (hr) Value: 6
  misc_feature: MA Experiment 108527 PARAMETER Experiment Name: Zm_5mM_NO_P Parameter: Tissue Value: Aerial
  misc_feature: MA Experiment 108527 PARAMETER Experiment Name: Zm_5mM_NO_P Parameter: Treatment Value: 5mM NO vs. No Treatment
  misc_feature: MA Experiment ID: 108534 Result: Up-regulated in Transcription
  misc_feature: MA Experiment 108534 PARAMETER Experiment Name: Zm_4deg_Cold_P Parameter: Age (hr) Value: 8
  misc_feature: MA Experiment 108534 PARAMETER Experiment Name: Zm_4deg_Cold_P Parameter: Organism Value: Zea mays
  misc_feature: MA Experiment 108534 PARAMETER Experiment Name: Zm_4deg_Cold_P Parameter: Plant Line Value: 35A19
  misc_feature: MA Experiment 108534 PARAMETER Experiment Name: Zm_4deg_Cold_P Parameter: Temperature (deg C) Value: 4 vs. 22
  misc_feature: MA Experiment 108534 PARAMETER Experiment Name: Zm_4deg_Cold_P Parameter: Timepoint (hr) Value: 6
  misc_feature: MA Experiment 108534 PARAMETER Experiment Name: Zm_4deg_Cold_P Parameter: Tissue Value: Aerial
  misc_feature: MA Experiment ID: 108543 Result: Down-regulated in Transcription
  misc_feature: MA Experiment ID: 108559 Result: Up-regulated in Transcription
  misc_feature: MA Experiment 108559 PARAMETER Experiment Name: Zm_5mM_NO_P Parameter: Age (day) Value: 8
  misc_feature: MA Experiment 108559 PARAMETER Experiment Name: Zm_5mM_NO_P Parameter: Organism Value: Zea mays
  misc_feature: MA Experiment 108559 PARAMETER Experiment Name: Zm_5mM_NO_P Parameter: Plant Line Value: 35A19
  misc_feature: MA Experiment 108559 PARAMETER Experiment Name: Zm_5mM_NO_P Parameter: Timepoint (hr) Value: 12
  misc_feature: MA Experiment 108559 PARAMETER Experiment Name: Zm_5mM_NO_P Parameter: Tissue Value: Aerial
  misc_feature: MA Experiment 108559 PARAMETER Experiment Name: Zm_5mM_NO_P Parameter: Treatment Value: 5mM NO vs. No Treatment
  misc_feature: MA Experiment ID: 20000477 Result: Up-regulated in Transcription
  misc_feature: MA Experiment 20000477 PARAMETER Experiment Name: Zm_5mM_SA_P Parameter: Age (day) Value: 10
  misc_feature: MA Experiment 20000477 PARAMETER Experiment Name: Zm_5mM_SA_P Parameter: Organism Value: Zea mays
  misc_feature: MA Experiment 20000477 PARAMETER Experiment Name: Zm_5mM_SA_P Parameter: Plant Line Value: 35A19
  misc_feature: MA Experiment 20000477 PARAMETER Experiment Name: Zm_5mM_SA_P Parameter: Timepoint (hr) Value: 48
  misc_feature: MA Experiment 20000477 PARAMETER Experiment Name: Zm_5mM_SA_P Parameter: Tissue Value: Aerial
  misc_feature: MA Experiment 20000477 PARAMETER Experiment Name: Zm_5mM_SA_P Parameter: Treatment Value: 5mM SA vs. No Treatment
  misc_feature: MA Experiment ID: 20000478 Result: Up-regulated in Transcription
  misc_feature: MA Experiment 20000478 PARAMETER Experiment Name: Zm_5mM_SA_P Parameter: Age (day) Value: 11
  misc_feature: MA Experiment 20000478 PARAMETER Experiment Name: Zm_5mM_SA_P Parameter: Organism Value: Zea mays
  misc_feature: MA Experiment 20000478 PARAMETER Experiment Name: Zm_5mM_SA_P Parameter: Plant Line Value: 35A19
  misc_feature: MA Experiment 20000478 PARAMETER Experiment Name: Zm_5mM_SA_P Parameter: Timepoint (hr) Value: 72
  misc_feature: MA Experiment 20000478 PARAMETER Experiment Name: Zm_5mM_SA_P Parameter: Tissue Value: Aerial
  misc_feature: MA Experiment 20000478 PARAMETER Experiment Name: Zm_5mM_SA_P Parameter: Treatment Value: 5mM SA vs. No Treatment
  misc_feature: MA Experiment ID: 20000479 Result: Up-regulated in Transcription
  misc_feature: MA Experiment 20000479 PARAMETER Experiment Name: Zm_Drought_P Parameter: Age (day) Value: 10
  misc_feature: MA Experiment 20000479 PARAMETER Experiment Name: Zm_Drought_P Parameter: Organism Value: Zea mays
  misc_feature: MA Experiment 20000479 PARAMETER Experiment Name: Zm_Drought_P Parameter: Plant Line Value: 35A19
  misc_feature: MA Experiment 20000479 PARAMETER Experiment Name: Zm_Drought_P Parameter: Timepoint (hr) Value: 48
  misc_feature: MA Experiment 20000479 PARAMETER Experiment Name: Zm_Drought_P Parameter: Tissue Value: Aerial
  misc_feature: MA Experiment 20000479 PARAMETER Experiment Name: Zm_Drought_P Parameter: Treatment Value: Drought vs. No Drought
  misc_feature: MA Experiment ID: 20000480 Result: Up-regulated in Transcription
  misc_feature: MA Experiment 20000480 PARAMETER Experiment Name: Zm_Drought_P Parameter: Age (day) Value: 11
  misc_feature: MA Experiment 20000480 PARAMETER Experiment Name: Zm_Drought_P Parameter: Organism Value: Zea mays
  misc_feature: MA Experiment 20000480 PARAMETER Experiment Name: Zm_Drought_P Parameter: Plant Line Value: 35A19
  misc_feature: MA Experiment 20000480 PARAMETER Experiment Name: Zm_Drought_P Parameter: Timepoint (hr) Value: 72
  misc_feature: MA Experiment 20000480 PARAMETER Experiment Name: Zm_Drought_P Parameter: Tissue Value: Aerial
  misc_feature: MA Experiment 20000480 PARAMETER Experiment Name: Zm_Drought_P Parameter: Treatment Value: Drought vs. No Drought
  misc_feature: MA Experiment ID: 20000532 Result: Up-regulated in Transcription
  misc_feature: MA Experiment 20000532 PARAMETER Experiment Name: Zm_0.001percent_MeJA_P Parameter: Age (day) Value: 10
  misc_feature: MA Experiment 20000532 PARAMETER Experiment Name: Zm_0.001percent_MeJA_P Parameter: Organism Value: Zea mays
  misc_feature: MA Experiment 20000532 PARAMETER Experiment Name: Zm_0.001percent_MeJA_P Parameter: Plant Line Value: 35A19
  misc_feature: MA Experiment 20000532 PARAMETER Experiment Name: Zm_0.001percent_MeJA_P Parameter: Timepoint (hr) Value: 48
  misc_feature: MA Experiment 20000532 PARAMETER Experiment Name: Zm_0.001percent_MeJA_P Parameter: Tissue Value: Aerial
  misc_feature: MA Experiment 20000532 PARAMETER Experiment Name: Zm_0.001percent_MeJA_P Parameter: Treatment Value: 0.001percent MeJA vs. No Treatment
  misc_feature: MA Experiment ID: 20000535 Result: Down-regulated in Transcription
  misc_feature: MA Experiment 20000535 PARAMETER Experiment Name: Zm_Hybrid_Seed_Dev_P Parameter: DAP Value: 30 vs. 12
  misc_feature: MA Experiment 20000535 PARAMETER Experiment Name: Zm_Hybrid_Seed_Dev_P Parameter: Organism Value: Zea mays
  misc_feature: MA Experiment 20000535 PARAMETER Experiment Name: Zm_Hybrid_Seed_Dev_P Parameter: Plant Line Value: 35A19
  misc_feature: MA Experiment 20000535 PARAMETER Experiment Name: Zm_Hybrid_Seed_Dev_P Parameter: Tissue Value: Embryo vs. Unfert Floret
  misc_feature: MA Experiment ID: 20000627 Result: Up-regulated in Transcription
  misc_feature: MA Experiment 20000627 PARAMETER Experiment Name: Zm_Herbicide-Treatments_P Parameter: Timepoint (hr) Value: 12
  misc_feature: MA Experiment 20000627 PARAMETER Experiment Name: Zm_Herbicide-Treatments_P Parameter: Tissue Value: Aerial
  misc_feature: MA Experiment 20000627 PARAMETER Experiment Name: Zm_Herbicide-Treatments_P Parameter: Treatment Value: Finale vs. No Treatment
  misc_feature: MA Experiment ID: 20000630 Result: Up-regulated in Transcription
  misc_feature: MA Experiment 20000630 PARAMETER Experiment Name: Zm_Herbicide-Treatments_P Parameter: Timepoint (hr) Value: 4
  misc_feature: MA Experiment 20000630 PARAMETER Experiment Name: Zm_Herbicide-Treatments_P Parameter: Tissue Value: Aerial
  misc_feature: MA Experiment 20000630 PARAMETER Experiment Name: Zm_Herbicide-Treatments_P Parameter: Treatment Value: Roundup vs. No Treatment
acacgcctctcttgctcaccattctcttctaaccagccaagccaaggcgcatctagcgagctgagcagcaatggcggctgctacttcttctaggcgccctgcagctgctctgctggtcctggcagcagccgtcgtggccctggcggccgagggggccaggtacccgccgctggcgccgggcctgtcgttcgacttctacaagaagagctgccccaaggcggagtccatcgtgcgggagttcctggcgtcggcggtccggcagaacgtggggctcgccgcggcgctgatccggctccacttccacgactgcttcgtgcagggctgcgacgcctccatcctgctggacgccacgcccacccagcccagcgagcagcagtcgccgcccaacctcacgctccgccccgccgcgttcaaggccgtcaacgacatccgcgcccgcctcgaccaggcctgcggccgcgtcgtctcctgcgccgacatcgtcgcgctcgccgcacgtgaatccgtcgccctgggtggcggcccggcgtacaagttgccactgggcaggcgcgacgggctggcgccggcatcgaacgccgccgtcctagcggcgctcccaccgccgacgtccaaggtgccgacgctgctgtccttcctggcgaagatcaacctggacgtgacggacctggtggcgctgtcgggcgggcacacggtgggcatcgcgcactgcggctccttcgacaaccggctgttcccgacgcaggacccgacgctgaacaagttcttcgcggggcagctgtaccggacctgcccgaccaacgcgacggtgaacacgacggccaacgacgtccgcacgcccaacgccttcgacaacaagtactacgtggacctgctcaaccgggagggcctcttcacgtcggaccaggacctgctgaccaacgccaccacgcgccccatcgtcacgcgcttcgccgtcgaccaggacgccttcttcgaccagttcgtctactcctacgtcaagatggggcaggtcaacgtgctcacgggctcccagggacaggtccgcgccaactgctccgcgcgcaacggcgccgctgctggtgacagtgacctgccgtggtcgtccgtcgtcatcgagacagtcgccgacgccgccggtagcctcgtgctctagataataagcaaataagtagtttgaagctttcttcgcatgcatgttgcaacaaataagcagctagtagcgttggaaataaagcagctagtagcgatcgttattacagaaacgacgacgacgtcgatggcaatggcagcatgctctgcagggagagcgctggcgcgggcaccagtagatgatccctgtccgcgcgggcccgggctcagccgaccaatcgatgtcaaccgcggcagcagtagcatagctaaggcatccgccgccgcacgccgactcggccacgtgatcgctgtcggactggaacacgatccagcctcgctcgctccatcgtctaataagagggtggcggtggcgaatattggaattggaccttccgggagaaaatatatcttggatgcccgtcaagacatctttcaatggtttccacagaaataatttaaaggaggctgactaatgtcagccacgtgtctcccgggtctgaacctagctaggttggaaccccttgacgcaaggaatcctctaaattgtatactctaaaaaaagaatatttatagttcttttt

SEQ ID NO: 4415 - protein, 361 aa, Zea mays subsp. mays
  peptide (1)..(361): Ceres Seq. ID no. 12347926
  misc_feature (54)..(297): Pfam Name: Peroxidase Pfam Description: Peroxidase
  misc_feature (25)..(333): Homolog of NCBI NO: 1402914 NR Description: peroxidase [Arabidopsis thaliana]
  misc_feature (14)..(348): Homolog of NCBI NO: 7433081 NR Description: probable peroxidase (EC 1.11.1.7) (clone PC42) -
  misc_feature (1)..(335): Homolog of NCBI NO: 14031049 NR Description: peroxidase [Nicotiana tabacum]
  misc_feature (1)..(353): Homolog of NCBI NO: 478409 NR Description: peroxidase (EC 1.11.1.7), cationic - adzuki bean
  misc_feature (32)..(333): Homolog of NCBI NO: 2624498 NR Description: Crystal Structure Of Barley Grain Peroxidase 1
  misc_feature (7)..(356): Homolog of NCBI NO: 22001285 NR Description: peroxidase 1 [Triticum aestivum]
  misc_feature (7)..(359): Homolog of NCBI NO: 82410 NR Description: peroxidase (EC 1.11.1.7) BP1 precursor - barley
  misc_feature (1)..(361): Homolog of NCBI NO: 34905834 NR Description: putative peroxidase [Oryza sativa (japonica
  misc_feature (1)..(355): Homolog of NCBI NO: 34905838 NR Description: putative peroxidase [Oryza sativa (japonica
  misc_feature (1)..(361): Homolog of NCBI NO: 34905826 NR Description: putative peroxidase [Oryza sativa (japonica
MAAATSSRRPAAALLVLAAAVVALAAEGARYPPLAPGLSFDFYKKSCPKAESIVREFLASAVRQNVGLAAALIRLHFHDCFVQGCDASILLDATPTQPSEQQSPPNLTLRPAAFKAVNDIRARLDQACGRVVSCADIVALAARESVALGGGPAYKLPLGRRDGLAPASNAAVLAALPPPTSKVPTLLSFLAKINLDVTDLVALSGGHTVGIAHCGSFDNRLFPTQDPTLNKFFAGQLYRTCPTNATVNTTANDVRTPNAFDNKYYVDLLNREGLFTSDQDLLTNATTRPIVTRFAVDQDAFFDQFVYSYVKMGQVNVLTGSQGQVRANCSARNGAAAGDSDLPWSSVVIETVADAAGSLVL

SEQ ID NO: 4416 - DNA, 1378 bp, Zea mays subsp. mays
  misc_feature (1)..(1378): Ceres Seq. ID no. 13494429
  misc_feature: MA Experiment ID: 108504 Result: Up-regulated in Transcription
  misc_feature: MA Experiment 108504 PARAMETER Experiment Name: Zm_Drought_P Parameter: Age (day) Value: 8
  misc_feature: MA Experiment 108504 PARAMETER Experiment Name: Zm_Drought_P Parameter: Organism Value: Zea mays
  misc_feature: MA Experiment 108504 PARAMETER Experiment Name: Zm_Drought_P Parameter: Plant Line Value: 35A19
  misc_feature: MA Experiment 108504 PARAMETER Experiment Name: Zm_Drought_P Parameter: Timepoint (hr) Value: 12
  misc_feature: MA Experiment 108504 PARAMETER Experiment Name: Zm_Drought_P Parameter: Tissue Value: Aerial
  misc_feature: MA Experiment 108504 PARAMETER Experiment Name: Zm_Drought_P Parameter: Treatment Value: Drought vs. No Drought
  misc_feature: MA Experiment ID: 108530 Result: Down-regulated in Transcription
  misc_feature: MA Experiment 108530 PARAMETER Experiment Name: Zm_Imbibed_Seeds_P Parameter: Age (day) Value: 6 vs. 2
  misc_feature: MA Experiment 108530 PARAMETER Experiment Name: Zm_Imbibed_Seeds_P Parameter: Organism Value: Zea mays
  misc_feature: MA Experiment 108530 PARAMETER Experiment Name: Zm_Imbibed_Seeds_P Parameter: Plant Line Value: 35A19
  misc_feature: MA Experiment 108530 PARAMETER Experiment Name: Zm_Imbibed_Seeds_P Parameter: Tissue Value: Aerial vs. Embryo
  misc_feature: MA Experiment ID: 108534 Result: Down-regulated in Transcription
  misc_feature: MA Experiment 108534 PARAMETER Experiment Name: Zm_4deg_Cold_P Parameter: Age (hr) Value: 8
  misc_feature: MA Experiment 108534 PARAMETER Experiment Name: Zm_4deg_Cold_P Parameter: Organism Value: Zea mays
  misc_feature: MA Experiment 108534 PARAMETER Experiment Name: Zm_4deg_Cold_P Parameter: Plant Line Value: 35A19
  misc_feature: MA Experiment 108534 PARAMETER Experiment Name: Zm_4deg_Cold_P Parameter: Temperature (deg C) Value: 4 vs. 22
  misc_feature: MA Experiment 108534 PARAMETER Experiment Name: Zm_4deg_Cold_P Parameter: Timepoint (hr) Value: 6
  misc_feature: MA Experiment 108534 PARAMETER Experiment Name: Zm_4deg_Cold_P Parameter: Tissue Value: Aerial
  misc_feature: MA Experiment ID: 108536 Result: Down-regulated in Transcription
  misc_feature: MA Experiment 108536 PARAMETER Experiment Name: Zm_Meristem_P Parameter: Age (day) Value: 8
  misc_feature: MA Experiment 108536 PARAMETER Experiment Name: Zm_Meristem_P Parameter: Organism Value: Zea mays
  misc_feature: MA Experiment 108536 PARAMETER Experiment Name: Zm_Meristem_P Parameter: Plant Line Value: 35A19
  misc_feature: MA Experiment 108536 PARAMETER Experiment Name: Zm_Meristem_P Parameter: Tissue Value: Shoot Meristem vs. Above Shoot Meristem
  misc_feature: MA Experiment ID: 108543 Result: Up-regulated in Transcription
  misc_feature: MA Experiment ID: 108547 Result: Down-regulated in Transcription
  misc_feature: MA Experiment 108547 PARAMETER Experiment Name: Zm_Imbibed_Seeds_P Parameter: Age (day) Value: 4 vs. 2
  misc_feature: MA Experiment 108547 PARAMETER Experiment Name: Zm_Imbibed_Seeds_P Parameter: Organism Value: Zea mays
  misc_feature: MA Experiment 108547 PARAMETER Experiment Name: Zm_Imbibed_Seeds_P Parameter: Plant Line Value: 35A19
  misc_feature: MA Experiment 108547 PARAMETER Experiment Name: Zm_Imbibed_Seeds_P Parameter: Tissue Value: Aerial vs. Embryo
  misc_feature: MA Experiment ID: 20000477 Result: Down-regulated in Transcription
  misc_feature: MA Experiment 20000477 PARAMETER Experiment Name: Zm_5mM_SA_P Parameter: Age (day) Value: 10
  misc_feature: MA Experiment 20000477 PARAMETER Experiment Name: Zm_5mM_SA_P Parameter: Organism Value: Zea mays
  misc_feature: MA Experiment 20000477 PARAMETER Experiment Name: Zm_5mM_SA_P Parameter: Plant Line Value: 35A19
  misc_feature: MA Experiment 20000477 PARAMETER Experiment Name: Zm_5mM_SA_P Parameter: Timepoint (hr) Value: 48
  misc_feature: MA Experiment 20000477 PARAMETER Experiment Name: Zm_5mM_SA_P Parameter: Tissue Value: Aerial
  misc_feature: MA Experiment 20000477 PARAMETER Experiment Name: Zm_5mM_SA_P Parameter: Treatment Value: 5mM SA vs. No Treatment
  misc_feature: MA Experiment ID: 20000478 Result: Down-regulated in Transcription
  misc_feature: MA Experiment 20000478 PARAMETER Experiment Name: Zm_5mM_SA_P Parameter: Age (day) Value: 11
  misc_feature: MA Experiment 20000478 PARAMETER Experiment Name: Zm_5mM_SA_P Parameter: Organism Value: Zea mays
  misc_feature: MA Experiment 20000478 PARAMETER Experiment Name: Zm_5mM_SA_P Parameter: Plant Line Value: 35A19
  misc_feature: MA Experiment 20000478 PARAMETER Experiment Name: Zm_5mM_SA_P Parameter: Timepoint (hr) Value: 72
  misc_feature: MA Experiment 20000478 PARAMETER Experiment Name: Zm_5mM_SA_P Parameter: Tissue Value: Aerial
  misc_feature: MA Experiment 20000478 PARAMETER Experiment Name: Zm_5mM_SA_P Parameter: Treatment Value: 5mM SA vs. No Treatment
aaaacacccacttcacctccgaccacttcacctccgatcccgccaccactacccaccctttcctttgacgtcccgatggcacctgtagatctaacccccaagcagcccaggaaggcctacggcggcgacggcggcgcctactacgagtggagccccgccgacctgcccatgctcggcgtcgcctccatcggcgcagccaagctctcgctcgccgccggcgggctcgcgctccccagctactccgactcagccaaggtcgcctacgtcctccaaggcacgggcacctgcggcatcgtcctcccagaggcgacgaaggagaaggtggtggccgtgaaggagggcgacgcgctggcgctgcccttcggcgtggtgacgtggtggcacaacggccccgccgcgccgaccccgctcacggtgctcttcctcggcgacacctccaagggccacaggccggggcaattcaccaacttccagctgacgggcgcgaccggcatcttcacgggcttctccaccgagttcgtgtcgcgcgcgtgggaccttccggaggcggacgcggcggcgctggtgtcgagccagccggcctcgggcatcgtccgggcgtcctcgtccccgctgccggcgccgtcgccgcgggaccgcgagggggtggcgctcaactgcctggaggcgccgctggacgtggacatcccgggcgggggccgcgtcgtggtgctcaacacggccaacctgccgctggtcaaggaggtcgggctgggcgccgacctggtccgcatcgacgcccactccatgtgctccccgggcttctcgtgcgactcggcgtaccaggtcacctacatcgtccgcggcagcggccgcgtccaggtggtcgggcccgacggggtgcgcgtcctggagacgcgcgtcgagggcggcttcctcttcatcgtgccccgcttccacgtcgtctccaagatcgccgacgcgtccggcatggagtggttctccatcatcaccacccccaacccgatcttcagccacctggccgggaagacgtcggtgtggaaggccatctcggcggaggtgctgcaggcgtcgttcaacaccacgccggagatggagaagctgttccggtccaagaggctcgactcggagatcttcttcgctcccccatccaactgagaaaataggccggaagccccacggtggagtcctctcgttaggtcgtcgtgcttagattaggttagctagcttgcctttaataaaaagagagtggtggtcgtcggcgtcggcttcggcggtctgcttcttcttcattcagtgcgtcggtcggtttagagtctgtcacgtgtcccgtcattgaactgcagtttttgttaataaagtattgttattattaggt

SEQ ID NO: 4417 - protein, 385 aa, Zea mays subsp. mays
  peptide (1)..(385): Ceres Seq. ID no. 13494430
  misc_feature (218)..(366): Pfam Name: Cupin Pfam Description: Cupin
  misc_feature (31)..(101): Homolog of NCBI NO: 29839254 NR Description: 13S globulin seed storage protein 1 precursor
  misc_feature (226)..(385): Homolog of NCBI NO: 29839254 NR Description: 13S globulin seed storage protein 1 precursor
  misc_feature (29)..(208): Homolog of NCBI NO: 7595348 NR Description: globulin-like protein [Cucumis melo]
  misc_feature (29)..(385): Homolog of NCBI NO: 15223000 NR Description: globulin (seed storage protein) - related
  misc_feature (29)..(385): Homolog of NCBI NO: 21593610 NR Description: globulin-like protein [Arabidopsis thaliana]
  misc_feature (29)..(385): Homolog of NCBI NO: 15226926 NR Description: globulin (seed storage protein) - related
  misc_feature (29)..(385): Homolog of NCBI NO: 34906084 NR Description: putative legumin-like protein
  misc_feature (23)..(385): Homolog of NCBI NO: 37730876 NR Description: legumin-like protein [Zea mays]
  misc_feature (26)..(385): Homolog of NCBI NO: 28950670 NR Description: legumin-like protein [Zea mays]
  misc_feature (26)..(385): Homolog of NCBI NO: 28950668 NR Description: legumin-like protein [Zea mays]
KTPTSPPTTSPPIPPPLPTLSFDVPMAPVDLTPKQPRKAYGGDGGAYYEWSPADLPMLGVASIGAAKLSLAAGGLALPSYSDSAKVAYVLQGTGTCGIVLPEATKEKVVAVKEGDALALPFGVVTWWHNGPAAPTPLTVLFLGDTSKGHRPGQFTNFQLTGATGIFTGFSTEFVSRAWDLPEADAAALVSSQPASGIVRASSSPLPAPSPRDREGVALNCLEAPLDVDIPGGGRVVVLNTANLPLVKEVGLGADLVRIDAHSMCSPGFSCDSAYQVTYIVRGSGRVQVVGPDGVRVLETRVEGGFLFIVPRFHVVSKIADASGMEWFSIITTPNPIFSHLAGKTSVWKAISAEVLQASFNTTPEMEKLFRSKRLDSEIFFAPPSN

SEQ ID NO: 4418 - protein, 360 aa, Zea mays subsp. mays
  peptide (1)..(360): Ceres Seq. ID no. 13494431
  misc_feature (193)..(341): Pfam Name: Cupin Pfam Description: Cupin
  misc_feature (6)..(76): Homolog of NCBI NO: 29839254 NR Description: 13S globulin seed storage protein 1 precursor
  misc_feature (201)..(360): Homolog of NCBI NO: 29839254 NR Description: 13S globulin seed storage protein 1 precursor
  misc_feature (4)..(183): Homolog of NCBI NO: 7595348 NR Description: globulin-like protein [Cucumis melo]
  misc_feature (4)..(360): Homolog of NCBI NO: 15223000 NR Description: globulin (seed storage protein) - related
  misc_feature (4)..(360): Homolog of NCBI NO: 21593610 NR Description: globulin-like protein [Arabidopsis thaliana]
  misc_feature (4)..(360): Homolog of NCBI NO: 15226926 NR Description: globulin (seed storage protein) - related
  misc_feature (4)..(360): Homolog of NCBI NO: 34906084 NR Description: putative legumin-like protein
  misc_feature (1)..(360): Homolog of NCBI NO: 37730876 NR Description: legumin-like protein [Zea mays]
  misc_feature (1)..(360): Homolog of NCBI NO: 28950670 NR Description: legumin-like protein [Zea mays]
  misc_feature (1)..(360): Homolog of NCBI NO: 28950668 NR Description: legumin-like protein [Zea mays]
MAPVDLTPKQPRKAYGGDGGAYYEWSPADLPMLGVASIGAAKLSLAAGGLALPSYSDSAKVAYVLQGTGTCGIVLPEATKEKVVAVKEGDALALPFGVVTWWHNGPAAPTPLTVLFLGDTSKGHRPGQFTNFQLTGATGIFTGFSTEFVSRAWDLPEADAAALVSSQPASGIVRASSSPLPAPSPRDREGVALNCLEAPLDVDIPGGGRVVVLNTANLPLVKEVGLGADLVRIDAHSMCSPGFSCDSAYQVTYIVRGSGRVQVVGPDGVRVLETRVEGGFLFIVPRFHVVSKIADASGMEWFSIITTPNPIFSHLAGKTSVWKAISAEVLQASFNTTPEMEKLFRSKRLDSEIFFAPPSN

SEQ ID NO: 4419 - protein, 329 aa, Zea mays subsp. mays
  peptide (1)..(329): Ceres Seq. ID no. 13494432
  misc_feature (162)..(310): Pfam Name: Cupin Pfam Description: Cupin
  misc_feature (1)..(45): Homolog of NCBI NO: 29839254 NR Description: 13S globulin seed storage protein 1 precursor
  misc_feature (170)..(329): Homolog of NCBI NO: 29839254 NR Description: 13S globulin seed storage protein 1 precursor
  misc_feature (1)..(152): Homolog of NCBI NO: 7595348 NR Description: globulin-like protein [Cucumis melo]
  misc_feature (1)..(329): Homolog of NCBI NO: 15223000 NR Description: globulin (seed storage protein) - related
  misc_feature (1)..(329): Homolog of NCBI NO: 21593610 NR Description: globulin-like protein [Arabidopsis thaliana]
  misc_feature (1)..(329): Homolog of NCBI NO: 15226926 NR Description: globulin (seed storage protein) - related
  misc_feature (1)..(329): Homolog of NCBI NO: 34906084 NR Description: putative legumin-like protein
  misc_feature (1)..(329): Homolog of NCBI NO: 37730876 NR Description: legumin-like protein [Zea mays]
  misc_feature (1)..(329): Homolog of NCBI NO: 28950670 NR Description: legumin-like protein [Zea mays]
  misc_feature (1)..(329): Homolog of NCBI NO: 28950668 NR Description: legumin-like protein [Zea mays]
MLGVASIGAAKLSLAAGGLALPSYSDSAKVAYVLQGTGTCGIVLPEATKEKVVAVKEGDALALPFGVVTWWHNGPAAPTPLTVLFLGDTSKGHRPGQFTNFQLTGATGIFTGFSTEFVSRAWDLPEADAAALVSSQPASGIVRASSSPLPAPSPRDREGVALNCLEAPLDVDIPGGGRVVVLNTANLPLVKEVGLGADLVRIDAHSMCSPGFSCDSAYQVTYIVRGSGRVQVVGPDGVRVLETRVEGGFLFIVPRFHVVSKIADASGMEWFSIITTPNPIFSHLAGKTSVWKAISAEVLQASFNTTPEMEKLFRSKRLDSEIFFAPPSN

SEQ ID NO: 4420 - DNA, 1597 bp, Zea mays subsp. mays
  misc_feature (1)..(1597): Ceres Seq. ID no. 12566728
  misc_feature: MA Experiment ID: 108535 Result: Up-regulated in Transcription
  misc_feature: MA Experiment 108535 PARAMETER Experiment Name: Zm_Meristem_P Parameter: Age (day) Value: 8
  misc_feature: MA Experiment 108535 PARAMETER Experiment Name: Zm_Meristem_P Parameter: Organism Value: Zea mays
  misc_feature: MA Experiment 108535 PARAMETER Experiment Name: Zm_Meristem_P Parameter: Plant Line Value: 35A19
  misc_feature: MA Experiment 108535 PARAMETER Experiment Name: Zm_Meristem_P Parameter: Tissue Value: Root Meristem vs. Above Root Meristem
  misc_feature: MA Experiment ID: 108544 Result: Down-regulated in Transcription
  misc_feature: MA Experiment ID: 108556 Result: Down-regulated in Transcription
  misc_feature: MA Experiment 108556 PARAMETER Experiment Name: Zm_Drought_P Parameter: Age (day) Value: 9
  misc_feature: MA Experiment 108556 PARAMETER Experiment Name: Zm_Drought_P Parameter: Organism Value: Zea mays
  misc_feature: MA Experiment 108556 PARAMETER Experiment Name: Zm_Drought_P Parameter: Plant Line Value: 35A19
  misc_feature: MA Experiment 108556 PARAMETER Experiment Name: Zm_Drought_P Parameter: Timepoint (hr) Value: 24
  misc_feature: MA Experiment 108556 PARAMETER Experiment Name: Zm_Drought_P Parameter: Tissue Value: Aerial
  misc_feature: MA Experiment 108556 PARAMETER Experiment Name: Zm_Drought_P Parameter: Treatment Value: Drought vs. No Drought
  misc_feature: MA Experiment ID: 20000487 Result: Up-regulated in Transcription
  misc_feature: MA Experiment 20000487 PARAMETER Experiment Name: Zm_50mM_NH4NO3_L_to_H_P Parameter: Organism Value: Zea mays
  misc_feature: MA Experiment 20000487 PARAMETER Experiment Name: Zm_50mM_NH4NO3_L_to_H_P Parameter: Timepoint (hr) Value: 4
  misc_feature: MA Experiment 20000487 PARAMETER Experiment Name: Zm_50mM_NH4NO3_L_to_H_P Parameter: Tissue Value: Leaves
  misc_feature: MA Experiment 20000487 PARAMETER Experiment Name: Zm_50mM_NH4NO3_L_to_H_P Parameter: Treatment Value: 50mM NH4NO3 vs. 100mM Mannitol
  misc_feature: MA Experiment ID: 20000488 Result: Up-regulated in Transcription
  misc_feature: MA Experiment 20000488 PARAMETER Experiment Name: Zm_50mM_NH4NO3_L_to_H_P Parameter: Organism Value: Zea mays
  misc_feature: MA Experiment 20000488 PARAMETER Experiment Name: Zm_50mM_NH4NO3_L_to_H_P Parameter: Timepoint (hr) Value: 8
  misc_feature: MA Experiment 20000488 PARAMETER Experiment Name: Zm_50mM_NH4NO3_L_to_H_P Parameter: Tissue Value: Leaves
  misc_feature: MA Experiment 20000488 PARAMETER Experiment Name: Zm_50mM_NH4NO3_L_to_H_P Parameter: Treatment Value: 50mM NH4NO3 vs. 100mM Mannitol
  misc_feature: MA Experiment ID: 20001606 Result: Up-regulated in Transcription
  misc_feature: MA Experiment 20001606 PARAMETER Experiment Name: Zm_50ppm_KNO3_L-to-H_P Parameter: Age (day) Value: 19
  misc_feature: MA Experiment 20001606 PARAMETER Experiment Name: Zm_50ppm_KNO3_L-to-H_P Parameter: Organism Value: Zea mays
  misc_feature: MA Experiment 20001606 PARAMETER Experiment Name: Zm_50ppm_KNO3_L-to-H_P Parameter: Plant Line Value: 35A19
  misc_feature: MA Experiment 20001606 PARAMETER Experiment Name: Zm_50ppm_KNO3_L-to-H_P Parameter: Timepoint (hr) Value: 8
  misc_feature: MA Experiment 20001606 PARAMETER Experiment Name: Zm_50ppm_KNO3_L-to-H_P Parameter: Tissue Value: Shoots
  misc_feature: MA Experiment 20001606 PARAMETER Experiment Name: Zm_50ppm_KNO3_L-to-H_P Parameter: Treatment Value: 50ppm KNO3 vs. 50ppm KCl
gcacgagaccattacctagaacatcctaatcgaaaaggctcgtcggcaacgctagggtttttggctactccgcctccgctctcccccctgctgcgcgctactcgcccgatctcgcggtgctggtagcggtgaaaatatctgagatcgagtgaagctagcttttcatcgatatggcgcttgtactgcatgctggcagtagtaacaaaaatgcattcaaaacactaattgccgcggattacagcggcatcaaggttgagttggtaaaagactttcaaatgggggtttccaacaaaacaccagagttcctcaagatgaaccctattgggaaggttcctgtcctggagacacctgatggtcctgtctttgagagcaatgcaatagcaagatatgttactcgcttgaaggctaacaacccactttacggatcttcactgattgattatgcccatattgagcagtggatggactttgctgcgacagaggttgatgccagcattggaaagtggttgtacccacgtatggggttttatccctatgctgctgtgacagaagaatcagccattgctgctttgaagagagcattcggttccctgaacacccatcttgcatcaaacacattccttgttgggcattcagtgacacttgcggatattgtgctgacatgcaatctttatatgggctttagccgtatcttgactaagagttttacctcagagttccctcatattgagaggtacttctggaccatggttaaccagccaaacttcaaaaaggtcattggtgacgtgaagcaggcagaagctgtgccacttcttccaaagaagattgctccggccaaagagcagaagcctaaggaagccaaaaaggaggccccgaagcctaaggaagctgagaaaccagcagaggaagaggaggctccaaagcctaagccaaagaatccccttgatttgcttcctccgagcaagttgattcttgacgattggaagaggctgtattctaacacgaaaaccaacttccgtgaggttgctattaaaggtttctgggacatgtatgacccagagggctactccctgtggttctgtgactacaagtacaatgacgagaacacagtgtcgtttgtgactatgaacaaggttggtggcttcctgcagcggatggatctgttccgcaaatacgcctttggcaagatgcttgtggttggctctgagccccctttcaaggtcaaggggctctggctcttccgtggccccgaaatccccaagtttgtcatggatgaggtctatgacatggagctctatgagtggaccaaggtcgacctctctgatgaggcccagaaggagcgggtcaatgccatgatcgaggaccaggagccttttgagggcgaggccttgctagatgcaaaatgcttcaagtgagcctcatctctttggagtgctgctcaggaaagagttgtttaggtttttgggtctaattctaaaacagctatgaatgttagttttgatctggggttattttctgtgctgtgttgagacttttggtcatggtaagggaatcggggaaggttttaggcgcgtgcaatattatggattatcgcatt

SEQ ID NO: 4421 - protein, 414 aa, Zea mays subsp. mays
  peptide (1)..(414): Ceres Seq. ID no. 12566729
  misc_feature (253)..(361): Pfam Name: Elongation factor 1 gamma, conserved domain Pfam Description: Elongation factor 1 gamma, conserved domain
  misc_feature (1)..(414): Homolog of NCBI NO: 15223649 NR Description: elongation factor 1B-gamma, putative (eEF-1B
  misc_feature (1)..(414): Homolog of NCBI NO: 14334818 NR Description: putative elongation factor 1B gamma [Arabidopsis
  misc_feature (1)..(414): Homolog of NCBI NO: 13626392 NR Description: Elongation factor 1-gamma (EF-1-gamma) (eEF-1B
  misc_feature (4)..(414): Homolog of NCBI NO: 29367381 NR Description: elongation factor 1 gamma-like protein
  misc_feature (11)..(414): Homolog of NCBI NO: 29367403 NR Description: elongation factor 1 gamma-like protein
  misc_feature (1)..(414): Homolog of NCBI NO: 13626515 NR Description: Elongation factor 1-gamma (EF-1-gamma) (eEF-1B
MALVLHAGSSNKNAFKTLIAADYSGIKVELVKDFQMGVSNKTPEFLKMNPIGKVPVLETPDGPVFESNAIARYVTRLKANNPLYGSSLIDYAHIEQWMDFAATEVDASIGKWLYPRMGFYPYAAVTEESAIAALKRAFGSLNTHLASNTFLVGHSVTLADIVLTCNLYMGFSRILTKSFTSEFPHIERYFWTMVNQPNFKKVIGDVKQAEAVPLLPKKIAPAKEQKPKEAKKEAPKPKEAEKPAEEEEAPKPKPKNPLDLLPPSKLILDDWKRLYSNTKTNFREVAIKGFWDMYDPEGYSLWFCDYKYNDENTVSFVTMNKVGGFLQRMDLFRKYAFGKMLVVGSEPPFKVKGLWLFRGPEIPKFVMDEVYDMELYEWTKVDLSDEAQKERVNAMIEDQEPFEGEALLDAKCFK

SEQ ID NO: 4422 - protein, 379 aa, Zea mays subsp. mays
  peptide (1)..(379): Ceres Seq. ID no. 12566730
  misc_feature (218)..(326): Pfam Name: Elongation factor 1 gamma, conserved domain Pfam Description: Elongation factor 1 gamma, conserved domain
  misc_feature (1)..(379): Homolog of NCBI NO: 15223649 NR Description: elongation factor 1B-gamma, putative (eEF-1B
  misc_feature (1)..(379): Homolog of NCBI NO: 14334818 NR Description: putative elongation factor 1B gamma [Arabidopsis
  misc_feature (1)..(379): Homolog of NCBI NO: 13626392 NR Description: Elongation factor 1-gamma (EF-1-gamma) (eEF-1B
  misc_feature (1)..(379): Homolog of NCBI NO: 29367381 NR Description: elongation factor 1 gamma-like protein
  misc_feature (1)..(379): Homolog of NCBI NO: 29367403 NR Description: elongation factor 1 gamma-like protein
  misc_feature (1)..(379): Homolog of NCBI NO: 13626515 NR Description: Elongation factor 1-gamma (EF-1-gamma) (eEF-1B
MGVSNKTPEFLKMNPIGKVPVLETPDGPVFESNAIARYVTRLKANNPLYGSSLIDYAHIEQWMDFAATEVDASIGKWLYPRMGFYPYAAVTEESAIAALKRAFGSLNTHLASNTFLVGHSVTLADIVLTCNLYMGFSRILTKSFTSEFPHIERYFWTMVNQPNFKKVIGDVKQAEAVPLLPKKIAPAKEQKPKEAKKEAPKPKEAEKPAEEEEAPKPKPKNPLDLLPPSKLILDDWKRLYSNTKTNFREVAIKGFWDMYDPEGYSLWFCDYKYNDENTVSFVTMNKVGGFLQRMDLFRKYAFGKMLVVGSEPPFKVKGLWLFRGPEIPKFVMDEVYDMELYEWTKVDLSDEAQKERVNAMIEDQEPFEGEALLDAKCFK

SEQ ID NO: 4423 - protein, 367 aa, Zea mays subsp. mays
  peptide (1)..(367): Ceres Seq. ID no. 12566731
  misc_feature (206)..(314): Pfam Name: Elongation factor 1 gamma, conserved domain Pfam Description: Elongation factor 1 gamma, conserved domain
  misc_feature (1)..(367): Homolog of NCBI NO: 15223649 NR Description: elongation factor 1B-gamma, putative (eEF-1B
  misc_feature (1)..(367): Homolog of NCBI NO: 14334818 NR Description: putative elongation factor 1B gamma [Arabidopsis
  misc_feature (1)..(367): Homolog of NCBI NO: 13626392 NR Description: Elongation factor 1-gamma (EF-1-gamma) (eEF-1B
  misc_feature (1)..(367): Homolog of NCBI NO: 29367381 NR Description: elongation factor 1 gamma-like protein
  misc_feature (1)..(367): Homolog of NCBI NO: 29367403 NR Description: elongation factor 1 gamma-like protein
  misc_feature (1)..(367): Homolog of NCBI NO: 13626515 NR Description: Elongation factor 1-gamma (EF-1-gamma) (eEF-1B
MNPIGKVPVLETPDGPVFESNAIARYVTRLKANNPLYGSSLIDYAHIEQWMDFAATEVDASIGKWLYPRMGFYPYAAVTEESAIAALKRAFGSLNTHLASNTFLVGHSVTLADIVLTCNLYMGFSRILTKSFTSEFPHIERYFWTMVNQPNFKKVIGDVKQAEAVPLLPKKIAPAKEQKPKEAKKEAPKPKEAEKPAEEEEAPKPKPKNPLDLLPPSKLILDDWKRLYSNTKTNFREVAIKGFWDMYDPEGYSLWFCDYKYNDENTVSFVTMNKVGGFLQRMDLFRKYAFGKMLVVGSEPPFKVKGLWLFRGPEIPKFVMDEVYDMELYEWTKVDLSDEAQKERVNAMIEDQEPFEGEALLDAKCFK

SEQ ID NO: 4424 - DNA, 982 bp, Zea mays subsp. mays
  misc_feature (1)..(982): Ceres Seq. ID no. 12566158
  misc_feature: MA Experiment ID: 108535 Result: Down-regulated in Transcription
  misc_feature: MA Experiment 108535 PARAMETER Experiment Name: Zm_Meristem_P Parameter: Age (day) Value: 8
  misc_feature: MA Experiment 108535 PARAMETER Experiment Name: Zm_Meristem_P Parameter: Organism Value: Zea mays
  misc_feature: MA Experiment 108535 PARAMETER Experiment Name: Zm_Meristem_P Parameter: Plant Line Value: 35A19
  misc_feature: MA Experiment 108535 PARAMETER Experiment Name: Zm_Meristem_P Parameter: Tissue Value: Root Meristem vs. Above Root Meristem
gcacgagaccattacctagaacatcctaatcgaaaaaaaaacgcgggacgcggattgatgatatcggtcgccgacgagcggggccggagcactctctgcttctccccctacttcccctacgtaccaggaagctaccactcccccagagtgaaggaagagagagctctccgcctctctcctccgccttagagcgacgtcgctgccggagctcgatacctatgggtggcttcgggacctcgcgccctgcctccgtcgccctctgcgccttcctcaccttcctcaacctcttcgccgtccttctcgccgtcggcgccgagcgccgccgcagcaccgggaaggtgatgccggacgagtacgacgagcggtcctactgcctctacgacactgacgcctccacggtgtacggcgtctccgctttcttcgtgctcctgctccagcaggccattgtcaacgtcgccacgtggtgcctctgcttcggacccgtgctctcctcccgcggctgtgccgtaacggcattcgtcctctcctggataacattcctcgtcgcagaagcttgtctcataggaggatcggtgaggaatgcaaagcacaccaagtatttaggctactacatgaagcatgatttggtgtcgtgcgccgcccttcgcaagggagtctttgcagcagctgctgcaatgatgatcatcaacctcctggcgtccctggtgtactactggagttactcaaaagctgcgacgggtgggttcatgaagcaccaaaatgaggttggtgtgggcatgacggattacggccttgacaagggtgtttctgggccctgagtgagatggaatcttattggcctctgtgcggtattaatactatcgtcgaaatgtatgtggatgaagttgagttgtttctctacggtgtgctgtgaatgatataccataactgtacaatggcatgggtggtgatattgtagggttcgtgctgtgaaaaatgcggt

SEQ ID NO: 4425 - protein, 199 aa, Zea mays subsp. mays
  peptide (1)..(199): Ceres Seq. ID no. 12566159
  misc_feature (10)..(170): Homolog of NCBI NO: 21554630 NR Description: unknown [Arabidopsis thaliana]
  misc_feature (10)..(171): Homolog of NCBI NO: 18407003 NR Description: Expressed protein
  misc_feature (10)..(188): Homolog of NCBI NO: 38344206 NR Description: OSJNBa0064G10.22 [Oryza sativa (japonica
  misc_feature (10)..(172): Homolog of NCBI NO: 18416991 NR Description: Expressed protein
  misc_feature (10)..(190): Homolog of NCBI NO: 18391509 NR Description: expressed protein
  misc_feature (10)..(171): Homolog of NCBI NO: 18400781 NR Description: expressed protein
  misc_feature (10)..(174): Homolog of NCBI NO: 18404242 NR Description: expressed protein
  misc_feature (10)..(190): Homolog of NCBI NO: 38016521 NR Description: fiber protein Fb34 [Gossypium barbadense]
  misc_feature (10)..(186): Homolog of NCBI NO: 34394069 NR Description: unknown protein [Oryza sativa (japonica
  misc_feature (11)..(188): Homolog of NCBI NO: 18408976 NR Description: expressed protein
MGGFGTSRPASVALCAFLTFLNLFAVLLAVGAERRRSTGKVMPDEYDERSYCLYDTDASTVYGVSAFFVLLLQQAIVNVATWCLCFGPVLSSRGCAVTAFVLSWITFLVAEACLIGGSVRNAKHTKYLGYYMKHDLVSCAALRKGVFAAAAAMMIINLLASLVYYWSYSKAATGGFMKHQNEVGVGMTDYGLDKGVSGP

SEQ ID NO: 4426 - protein, 158 aa, Zea mays subsp. mays
  peptide (1)..(158): Ceres Seq. ID no. 12566160
  misc_feature (1)..(129): Homolog of NCBI NO: 21554630 NR Description: unknown [Arabidopsis thaliana]
  misc_feature (1)..(130): Homolog of NCBI NO: 18407003 NR Description: Expressed protein
  misc_feature (1)..(147): Homolog of NCBI NO: 38344206 NR Description: OSJNBa0064G10.22 [Oryza sativa (japonica
  misc_feature (1)..(131): Homolog of NCBI NO: 18416991 NR Description: Expressed protein
  misc_feature (1)..(149): Homolog of NCBI NO: 18391509 NR Description: expressed protein
  misc_feature (1)..(130): Homolog of NCBI NO: 18400781 NR Description: expressed protein
  misc_feature (1)..(133): Homolog of NCBI NO: 18404242 NR Description: expressed protein
  misc_feature (1)..(149): Homolog of NCBI NO: 38016521 NR Description: fiber protein Fb34 [Gossypium barbadense]
  misc_feature (1)..(145): Homolog of NCBI NO: 34394069 NR Description: unknown protein [Oryza sativa (japonica
  misc_feature (1)..(147): Homolog of NCBI NO: 18408976 NR Description: expressed protein
MPDEYDERSYCLYDTDASTVYGVSAFFVLLLQQAIVNVATWCLCFGPVLSSRGCAVTAFVLSWITFLVAEACLIGGSVRNAKHTKYLGYYMKHDLVSCAALRKGVFAAAAAMMIINLLASLVYYWSYSKAATGGFMKHQNEVGVGMTDYGLDKGVSGP

SEQ ID NO: 4427 - DNA, 1412 bp, Zea mays subsp. mays
  misc_feature (1)..(1412): Ceres Seq. ID no. 12566951
  misc_feature: MA Experiment ID: 108529 Result: Down-regulated in Transcription
  misc_feature: MA Experiment 108529 PARAMETER Experiment Name: Zm_Imbibed_Seeds_P Parameter: Age (day) Value: 5 vs. 2
  misc_feature: MA Experiment 108529 PARAMETER Experiment Name: Zm_Imbibed_Seeds_P Parameter: Organism Value: Zea mays
  misc_feature: MA Experiment 108529 PARAMETER Experiment Name: Zm_Imbibed_Seeds_P Parameter: Plant Line Value: 35A19
  misc_feature: MA Experiment 108529 PARAMETER Experiment Name: Zm_Imbibed_Seeds_P Parameter: Tissue Value: Roots vs. Embryo
  misc_feature: MA Experiment ID: 108535 Result: Up-regulated in Transcription
  misc_feature: MA Experiment 108535 PARAMETER Experiment Name: Zm_Meristem_P Parameter: Age (day) Value: 8
  misc_feature: MA Experiment 108535 PARAMETER Experiment Name: Zm_Meristem_P Parameter: Organism Value: Zea mays
  misc_feature: MA Experiment 108535 PARAMETER Experiment Name: Zm_Meristem_P Parameter: Plant Line Value: 35A19
  misc_feature: MA Experiment 108535 PARAMETER Experiment Name: Zm_Meristem_P Parameter: Tissue Value: Root Meristem vs. Above Root Meristem
  misc_feature: MA Experiment ID: 108536 Result: Up-regulated in Transcription
  misc_feature: MA Experiment 108536 PARAMETER Experiment Name: Zm_Meristem_P Parameter: Age (day) Value: 8
  misc_feature: MA Experiment 108536 PARAMETER Experiment Name: Zm_Meristem_P Parameter: Organism Value: Zea mays
  misc_feature: MA Experiment 108536 PARAMETER Experiment Name: Zm_Meristem_P Parameter: Plant Line Value: 35A19
  misc_feature: MA Experiment 108536 PARAMETER Experiment Name: Zm_Meristem_P Parameter: Tissue Value: Shoot Meristem vs. Above Shoot Meristem
  misc_feature: MA Experiment ID: 108544 Result: Down-regulated in Transcription
atctctcatttcccttgcaactggaagcgagctctctgcctcgtacgtcgtcggcgctgcgggagcgtgcattgttgagcgagtgcggccaagcaacgcgggctcgaggagatgatgctgagcgggcacggcggcgagaggcgcctgttcacggcgtcgcagtggcaggagctcgagcaccaggcgctcatcttcaagtacatggcctcgggcgcgcccgtgccgcacgacctcgtcctaccgctccgcctcgccaccggcgtcgacaccgcgccctccctcgccttcccgccgcagccttcgccgtcgctggcgtactggggctgctacggcgcgggggcgccgttcggccgcaaggcggcggaggacacggagccggggcggtgccggcggacggacggcaagaagtggcggtgctccagggaggcccacggcgactccaagtactgcgagaagcacattcaccgcgggaagagccgttcaagaaagcctgtggaagtgacctcctcccccgccgccggcgccgctgcggcgtaccgaccgtccgcgatctccaccatctcgccgccccgcgcggccgacgcgccgccgccgagcctcgcctacccgcagcagcatctcctccacggcgcctcctcctccgcagcagcccgcgcccccgctggcgctctccagctccacctcgacgcgagcctgcacgcggcggcggcggcggcgtcgccatcgccgccgccgtcctaccacaggtacgcccactacacaccgccagcgtcgtcgctcttcccgggcggcggctacggctacgactacgactacgggcagtccaaggagctccgggacgcggcggagctcaggcgacggcacttccacgcgctcggggccgacctgagcctcgacaagccgctgcccgagcccgacaccggctccgacgagaagcagcccctgcggcgtttcctcgacgagtggccgcgggagagcggcgacatggcggcggacgacgccacgcagctttccatctccatccccgcggcctcgccctccgacctcgctgctgcctccgccgccgccgcgcgattccacaacggggagtgatcggtccatctcctagctgcagccctgcaacatcgtggattgaccgctggctgcaactgcaagcctgcaacagcgagcagtaagccagtgacgtggatgcatctcgtagcggcaaaccctgcttctgcctctgcgctgcgcgggacggctcaggctgaggctcaaaaaagtctgaaccgagtcattgagtcaagcagtactagggactctatgacttggtcttttgttcttttgtagcagtacgttactcgtaccaaatgttgtttattttttgtgtgacatttttcatttcttccggttccagtctgtgatgcaagccc

SEQ ID NO: 4428 - protein, 390 aa, Zea mays subsp. mays
  peptide (1)..(390): Ceres Seq. ID no. 12566952
LSFPLQLEASSLPRTSSALRERALLSECGQATRARGDDAERARRREAPVHGVAVAGARAPGAHLQVHGLGRARAARPRPTAPPRHRRRHRALPRLPAAAFAVAGVLGLLRRGGAVRPQGGGGHGAGAVPADGRQEVAVLQGGPRRLQVLREAHSPREEPFKKACGSDLLPRRRRRCGVPTVRDLHHLAAPRGRRAAAEPRLPAAASPPRRLLLRSSPRPRWRSPAPPRREPARGGGGGVAIAAAVLPQVRPLHTASVVALPGRRLRLRLRLRAVQGAPGRGGAQATALPRARGRPEPRQAAARARHRLRREAAPAAFPRRVAAGERRHGGGRRHAAFHLHPRGLALRPRCCLRRRRAIPQRGVIGPSPSCSPATSWIDRWLQLQACNSEQ

SEQ ID NO: 4429 - protein, 326 aa, Zea mays subsp. mays
  peptide (1)..(326): Ceres Seq. ID no. 12566953
  misc_feature (13)..(134): Homolog of NCBI NO: 18396273 NR Description: expressed protein
  misc_feature (5)..(133): Homolog of NCBI NO: 32470646 NR Description: putative growth-regulating factor [Solanum
  misc_feature (5)..(133): Homolog of NCBI NO: 32470630 NR Description: putative growth-regulating factor [Solanum
  misc_feature (13)..(213): Homolog of NCBI NO: 38345778 NR Description: OSJNBa0083N12.16 [Oryza sativa (japonica
  misc_feature (1)..(318): Homolog of NCBI NO: 28273382 NR Description: putative transcription activator
  misc_feature (1)..(142): Homolog of NCBI NO: 30682907 NR Description: transcription activator (GRL5) [Arabidopsis
  misc_feature (1)..(142): Homolog of NCBI NO: 11994367 NR Description: gb|AAF17567.1~gene_id:MDC16.8~similar to unknown
  misc_feature (3)..(193): Homolog of NCBI NO: 34897962 NR Description: putative growth-regulating factor 1
  misc_feature (1)..(215): Homolog of NCBI NO: 6573149 NR Description: growth-regulating factor 1 [Oryza sativa]
  misc_feature (1)..(326): Homolog of NCBI NO: 18390099 NR Description: putative growth-regulating factor 1 [Sorghum
MMLSGHGGERRLFTASQWQELEHQALIFKYMASGAPVPHDLVLPLRLATGVDTAPSLAFPPQPSPSLAYWGCYGAGAPFGRKAAEDTEPGRCRRTDGKKWRCSREAHGDSKYCEKHIHRGKSRSRKPVEVTSSPAAGAAAAYRPSAISTISPPRAADAPPPSLAYPQQHLLHGASSSAAARAPAGALQLHLDASLHAAAAAASPSPPPSYHRYAHYTPPASSLFPGGGYGYDYDYGQSKELRDAAELRRRHFHALGADLSLDKPLPEPDTGSDEKQPLRRFLDEWPRESGDMAADDATQLSISIPAASPSDLAAASAAAARFHNGE

SEQ ID NO: 4430 - protein, 325 aa, Zea mays subsp. mays
  peptide (1)..(325): Ceres Seq. ID no. 12566954
  misc_feature (12)..(133): Homolog of NCBI NO: 18396273 NR Description: expressed protein
  misc_feature (4)..(132): Homolog of NCBI NO: 32470646 NR Description: putative growth-regulating factor [Solanum
  misc_feature (4)..(132): Homolog of NCBI NO: 32470630 NR Description: putative growth-regulating factor [Solanum
  misc_feature (12)..(212): Homolog of NCBI NO: 38345778 NR Description: OSJNBa0083N12.16 [Oryza sativa (japonica
  misc_feature (1)..(317): Homolog of NCBI NO: 28273382 NR Description: putative transcription activator
  misc_feature (1)..(141): Homolog of NCBI NO: 30682907 NR Description: transcription activator (GRL5) [Arabidopsis
  misc_feature (1)..(141): Homolog of NCBI NO: 11994367 NR Description: gb|AAF17567.1~gene_id:MDC16.8~similar to unknown
  misc_feature (2)..(192): Homolog of NCBI NO: 34897962 NR Description: putative growth-regulating factor 1
  misc_feature (1)..(214): Homolog of NCBI NO: 6573149 NR Description: growth-regulating factor 1 [Oryza sativa]
  misc_feature (1)..(325): Homolog of NCBI NO: 18390099 NR Description: putative growth-regulating factor 1 [Sorghum
MLSGHGGERRLFTASQWQELEHQALIFKYMASGAPVPHDLVLPLRLATGVDTAPSLAFPPQPSPSLAYWGCYGAGAPFGRKAAEDTEPGRCRRTDGKKWRCSREAHGDSKYCEKHIHRGKSRSRKPVEVTSSPAAGAAAAYRPSAISTISPPRAADAPPPSLAYPQQHLLHGASSSAAARAPAGALQLHLDASLHAAAAAASPSPPPSYHRYAHYTPPASSLFPGGGYGYDYDYGQSKELRDAAELRRRHFHALGADLSLDKPLPEPDTGSDEKQPLRRFLDEWPRESGDMAADDATQLSISIPAASPSDLAAASAAAARFHNGE

SEQ ID NO: 4431 - DNA, 1398 bp, Zea mays subsp. mays; identical to SEQ ID NO: 2844
  misc_feature (1)..(1398): Ceres Seq. ID no. 13498659
  misc_feature: MA Experiment ID: 20000480 Result: Up-regulated in Transcription
  misc_feature: MA Experiment 20000480 PARAMETER Experiment Name: Zm_Drought_P Parameter: Age (day) Value: 11
  misc_feature: MA Experiment 20000480 PARAMETER Experiment Name: Zm_Drought_P Parameter: Organism Value: Zea mays
  misc_feature: MA Experiment 20000480 PARAMETER Experiment Name: Zm_Drought_P Parameter: Plant Line Value: 35A19
  misc_feature: MA Experiment 20000480 PARAMETER Experiment Name: Zm_Drought_P Parameter: Timepoint (hr) Value: 72
  misc_feature: MA Experiment 20000480 PARAMETER Experiment Name: Zm_Drought_P Parameter: Tissue Value: Aerial
  misc_feature: MA Experiment 20000480 PARAMETER Experiment Name: Zm_Drought_P Parameter: Treatment Value: Drought vs. No Drought
  misc_feature: MA Experiment ID: 20000534 Result: Down-regulated in Transcription
  misc_feature: MA Experiment 20000534 PARAMETER Experiment Name: Zm_Hybrid_Pollen_P Parameter: Age (day) Value: 8
  misc_feature: MA Experiment 20000534 PARAMETER Experiment Name: Zm_Hybrid_Pollen_P Parameter: Organism Value: Zea mays
  misc_feature: MA Experiment 20000534 PARAMETER Experiment Name: Zm_Hybrid_Pollen_P Parameter: Plant Line Value: 35A19
  misc_feature: MA Experiment 20000534 PARAMETER Experiment Name: Zm_Hybrid_Pollen_P Parameter: Tissue Value: Pollen vs. Aerial

SEQ ID NO: 4432 - protein, 71 aa, Zea mays subsp. mays; identical to SEQ ID NO: 2845
  peptide (1)..(71): Ceres Seq. ID no. 13498660
  misc_feature (1)..(54): Pfam Name: Universal stress protein family Pfam Description: Universal stress protein family
  misc_feature (1)..(54): Pfam Name: Universal stress protein family Pfam Description: Universal stress protein family
  misc_feature (1)..(58): Homolog of NCBI NO: 18416966 NR Description: expressed protein [Arabidopsis thaliana]
  misc_feature (1)..(58): Homolog of NCBI NO: 7486798 NR Description: hypothetical protein M4I22.130 - Arabidopsis
  misc_feature (1)..(58): Homolog of NCBI NO: 25402657 NR Description: protein T23J18.3 [imported] - Arabidopsis
  misc_feature (1)..(58): Homolog of NCBI NO: 30682187 NR Description: expressed protein [Arabidopsis thaliana]
  misc_feature (1)..(58): Homolog of NCBI NO: 8885586 NR Description: gene_id:F24B18.5~pir||T05756~similar to unknown
  misc_feature (1)..(57): Homolog of NCBI NO: 15232490 NR Description: CHP-rich zinc finger protein, putative
  misc_feature (1)..(58): Homolog of NCBI NO: 8885586 NR Description: gene_id:F24B18.5~pir||T05756~similar to unknown
  misc_feature (1)..(58): Homolog of NCBI NO: 7486798 NR Description: hypothetical protein M4I22.130 - Arabidopsis
  misc_feature (1)..(62): Homolog of NCBI NO: 34910112 NR Description: B1100D10.31 [Oryza sativa (japonica
  misc_feature (1)..(58): Homolog of NCBI NO: 28971968 NR Description: OSJNBb0041B22.10 [Oryza sativa (japonica
  misc_feature (1)..(58): Homolog of NCBI NO: 33146953 NR Description: CHP-rich zinc finger protein-like
  misc_feature (1)..(58): Homolog of NCBI NO: 30682187 NR Description: expressed protein [Arabidopsis thaliana]
  misc_feature (1)..(58): Homolog of NCBI NO: 25402657 NR Description: protein T23J18.3 [imported] - Arabidopsis
  misc_feature (1)..(58): Homolog of NCBI NO: 18416966 NR Description: expressed protein [Arabidopsis thaliana]
  misc_feature (1)..(58): Homolog of NCBI NO: 18423628 NR Description: expressed protein [Arabidopsis thaliana]
  misc_feature (1)..(57): Homolog of NCBI NO: 15232490 NR Description: CHP-rich zinc finger protein, putative
  misc_feature (1)..(58): Homolog of NCBI NO: 18423628 NR Description: expressed protein [Arabidopsis thaliana]
  misc_feature (1)..(58): Homolog of NCBI NO: 33146953 NR Description: CHP-rich zinc finger protein-like
  misc_feature (1)..(58): Homolog of NCBI NO: 28971968 NR Description: OSJNBb0041B22.10 [Oryza sativa (japonica
  misc_feature (1)..(62): Homolog of NCBI NO: 34910112 NR Description: B1100D10.31 [Oryza sativa (japonica

SEQ ID NO: 4433 - protein, 59 aa, Zea mays subsp. mays; identical to SEQ ID NO: 2846
  peptide (1)..(59): Ceres Seq. ID no. 13498661

SEQ ID NO: 4434 - protein, 55 aa, Zea mays subsp. mays; identical to SEQ ID NO: 2847
  peptide (1)..(55): Ceres Seq. ID no. 13498662
  misc_feature (1)..(41): Homolog of NCBI NO: 15232490 NR Description: CHP-rich zinc finger protein, putative
  misc_feature (1)..(42): Homolog of NCBI NO: 18423628 NR Description: expressed protein [Arabidopsis thaliana]
  misc_feature (1)..(42): Homolog of NCBI NO: 8885586 NR Description: gene_id:F24B18.5~pir||T05756~similar to unknown
  misc_feature (1)..(42): Homolog of NCBI NO: 18416966 NR Description: expressed protein [Arabidopsis thaliana]
  misc_feature (1)..(42): Homolog of NCBI NO: 7486798 NR Description: hypothetical protein M4I22.130 - Arabidopsis
  misc_feature (1)..(42): Homolog of NCBI NO: 25402657 NR Description: protein T23J18.3 [imported] - Arabidopsis
  misc_feature (1)..(42): Homolog of NCBI NO: 30682187 NR Description: expressed protein [Arabidopsis thaliana]
  misc_feature (1)..(42): Homolog of NCBI NO: 33146953 NR Description: CHP-rich zinc finger protein-like
  misc_feature (1)..(42): Homolog of NCBI NO: 28971968 NR Description: OSJNBb0041B22.10 [Oryza sativa (japonica
  misc_feature (1)..(46): Homolog of NCBI NO: 34910112 NR Description: B1100D10.31 [Oryza sativa (japonica
  misc_feature (1)..(41): Homolog of NCBI NO: 15232490 NR Description: CHP-rich zinc finger protein, putative
  misc_feature (1)..(42): Homolog of NCBI NO: 18423628 NR Description: expressed protein [Arabidopsis thaliana]
  misc_feature (1)..(42): Homolog of NCBI NO: 8885586 NR Description: gene_id:F24B18.5~pir||T05756~similar to unknown
  misc_feature (1)..(42): Homolog of NCBI NO: 18416966 NR Description: expressed protein [Arabidopsis thaliana]
  misc_feature (1)..(42): Homolog of NCBI NO: 7486798 NR Description: hypothetical protein M4I22.130 - Arabidopsis
  misc_feature (1)..(42): Homolog of NCBI NO: 25402657 NR Description: protein T23J18.3 [imported] - Arabidopsis
  misc_feature (1)..(42): Homolog of NCBI NO: 30682187 NR Description: expressed protein [Arabidopsis thaliana]
  misc_feature (1)..(42): Homolog of NCBI NO: 33146953 NR Description: CHP-rich zinc finger protein-like
  misc_feature (1)..(42): Homolog of NCBI NO: 28971968 NR Description: OSJNBb0041B22.10 [Oryza sativa (japonica
  misc_feature (1)..(46): Homolog of NCBI NO: 34910112 NR Description: B1100D10.31 [Oryza sativa (japonica

SEQ ID NO: 4435 - DNA, 1060 bp, Zea mays subsp. mays
  misc_feature (1)..(1060): Ceres Seq. ID no. 12566522
  misc_feature: MA Experiment ID: 108528 Result: Up-regulated in Transcription
  misc_feature: MA Experiment 108528 PARAMETER Experiment Name: Zm_Imbibed_Seeds_P Parameter: Age (day) Value: 5 vs. 2
  misc_feature: MA Experiment 108528 PARAMETER Experiment Name: Zm_Imbibed_Seeds_P Parameter: Organism Value: Zea mays
  misc_feature: MA Experiment 108528 PARAMETER Experiment Name: Zm_Imbibed_Seeds_P Parameter: Plant Line Value: 35A19
  misc_feature: MA Experiment 108528 PARAMETER Experiment Name: Zm_Imbibed_Seeds_P Parameter: Tissue Value: Aerial vs. Embryo
  misc_feature: MA Experiment ID: 108529 Result: Up-regulated in Transcription
  misc_feature: MA Experiment 108529 PARAMETER Experiment Name: Zm_Imbibed_Seeds_P Parameter: Age (day) Value: 5 vs. 2
  misc_feature: MA Experiment 108529 PARAMETER Experiment Name: Zm_Imbibed_Seeds_P Parameter: Organism Value: Zea mays
  misc_feature: MA Experiment 108529 PARAMETER Experiment Name: Zm_Imbibed_Seeds_P Parameter: Plant Line Value: 35A19
  misc_feature: MA Experiment 108529 PARAMETER Experiment Name: Zm_Imbibed_Seeds_P Parameter: Tissue Value: Roots vs. Embryo
  misc_feature: MA Experiment ID: 108535 Result: Down-regulated in Transcription
  misc_feature: MA Experiment 108535 PARAMETER Experiment Name: Zm_Meristem_P Parameter: Age (day) Value: 8
  misc_feature: MA Experiment 108535 PARAMETER Experiment Name: Zm_Meristem_P Parameter: Organism Value: Zea mays
  misc_feature: MA Experiment 108535 PARAMETER Experiment Name: Zm_Meristem_P Parameter: Plant Line Value: 35A19
  misc_feature: MA Experiment 108535 PARAMETER Experiment Name: Zm_Meristem_P Parameter: Tissue Value: Root Meristem vs. Above Root Meristem
  misc_feature: MA Experiment ID: 108543 Result: Up-regulated in Transcription
  misc_feature: MA Experiment ID: 108546 Result: Up-regulated in Transcription
  misc_feature: MA Experiment 108546 PARAMETER Experiment Name: Zm_Imbibed_Seeds_P Parameter: Age (day) Value: 3 vs. 2
  misc_feature: MA Experiment 108546 PARAMETER Experiment Name: Zm_Imbibed_Seeds_P Parameter: Organism Value: Zea mays
  misc_feature: MA Experiment 108546 PARAMETER Experiment Name: Zm_Imbibed_Seeds_P Parameter: Plant Line Value: 35A19
  misc_feature: MA Experiment 108546 PARAMETER Experiment Name: Zm_Imbibed_Seeds_P Parameter: Tissue Value: Roots vs. Embryo
  misc_feature: MA Experiment ID: 108547 Result: Up-regulated in Transcription
  misc_feature: MA Experiment 108547 PARAMETER Experiment Name: Zm_Imbibed_Seeds_P Parameter: Age (day) Value: 4 vs. 2
  misc_feature: MA Experiment 108547 PARAMETER Experiment Name: Zm_Imbibed_Seeds_P Parameter: Organism Value: Zea mays
  misc_feature: MA Experiment 108547 PARAMETER Experiment Name: Zm_Imbibed_Seeds_P Parameter: Plant Line Value: 35A19
  misc_feature: MA Experiment 108547 PARAMETER Experiment Name: Zm_Imbibed_Seeds_P Parameter: Tissue Value: Aerial vs. Embryo
  misc_feature: MA Experiment ID: 20000108 Result: Down-regulated in Transcription
  misc_feature: MA Experiment 20000108 PARAMETER Experiment Name: Zm_Root-Tips_P Parameter: Age (day) Value: 12
  misc_feature: MA Experiment 20000108 PARAMETER Experiment Name: Zm_Root-Tips_P Parameter: Organism Value: Zea mays
  misc_feature: MA Experiment 20000108 PARAMETER Experiment Name: Zm_Root-Tips_P Parameter: Tissue Value: Root tips vs. Root mid region    35
  misc_feature: MA Experiment 20000108 PARAMETER Experiment Name: Zm_Root-Tips_P Parameter: Tissue Value: Root tips vs. Root mid region   Sequence Listing-Misc Features (4)
  misc_feature: MA Experiment ID: 20000535 Result: Down-regulated in Transcription
  misc_feature: MA Experiment 20000535 PARAMETER Experiment Name: Zm_Hybrid_Seed_Dev_P Parameter: DAP Value: 30 vs. 12
  misc_feature: MA Experiment 20000535 PARAMETER Experiment Name: Zm_Hybrid_Seed_Dev_P Parameter: Organism Value: Zea mays
  misc_feature: MA Experiment 20000535 PARAMETER Experiment Name: Zm_Hybrid_Seed_Dev_P Parameter: Plant Line Value: 35A19
  misc_feature: MA Experiment 20000535 PARAMETER Experiment Name: Zm_Hybrid_Seed_Dev_P Parameter: Tissue Value: Embryo vs. Unfert Floret
ataacaaccccggcctgccatgtgccacaaccgtagcctgtagcttcatccgttgcgctgcgcccggttccctcgcgcggtgcggaatttaacatggccgtgccggaggtggtggtcgacggcgtcgtcttcccgccggtggcccgcccgccgggctccgccggctcgcacttcctcggcggcgcaggcgtgcgaggcgtcgagatcggaggcaacttcatcaagttcacggccatcggcgtgtacctggaggacgcggccgtgcccgcgctggccaagaagtggggcggcaagacggccgacgagctcgcctccgacgccgccttcttccgcgacgtcgtcacgggcgacttcgagaagttcacgagggtgacgatgatcctcccgctgacgggcgagcagtacgcggagaaagtgacggagaactgcgtggcgttctggaaggccgccggcctgtacacggacgccgagggcgtcgccgtggagaagttcagggaggtgttcaagccagagactttcgcgccgggcgcctccatcctcttcacgcactcgcccgccggagtcctcaccgtcgccttctccaaggactcgtcggtgccagcggccggcggcgtggcgatcgagaacaagcgcctctgcgaggccgtgctggagtccatcatcggggagcgcggcgtgtcgccggccgcgaagctgagcctcgccgcgagggtgtcggagctcctcgccaaggagaccgccgcggccgccgacgcgccgcaggcggagcccgtctccatcaccgcctgaggcgaggagcgggcgggcgggcgagcgaacgaaccgcgaggagaaagaaagcaaccagacggttgggcggcacggcgtctcacacctgccgcctgcgcttgcgtgctccggagtccggactggagagacgccgcgcgggtgcagtgcatccgtcgcgtcttgtctgtccgcgctatggcgtcgtgttcctgcctttctggtcgcgtagttgtcttgtgttcgctgttggtcgttctgggtaacatttgaataaaacaagcggatttgttgc

SEQ ID NO: 4436 - protein, 231 aa, Zea mays subsp. mays
  peptide (1)..(231): Ceres Seq. ID no. 12566523
  misc_feature (11)..(212): Pfam Name: Chalcone-flavanone isomerase Pfam Description: Chalcone-flavanone isomerase
  misc_feature (2)..(211): Homolog of NCBI NO: 4126399 NR Description: chalcone isomerase [Citrus sinensis]
  misc_feature (1)..(231): Homolog of NCBI NO: 228617 NR Description: chalcone flavanone isomerase
  misc_feature (1)..(231): Homolog of NCBI NO: 116136 NR Description: CHALCONE--FLAVONONE ISOMERASE A (CHALCONE
  misc_feature (1)..(231): Homolog of NCBI NO: 68481 NR Description: chalcone isomerase (EC 5.5.1.6) A - garden
  misc_feature (1)..(228): Homolog of NCBI NO: 5921722 NR Description: Chalcone--flavonone isomerase (Chalcone
  misc_feature (2)..(228): Homolog of NCBI NO: 1705761 NR Description: CHALCONE--FLAVONONE ISOMERASE (CHALCONE
  misc_feature (2)..(231): Homolog of NCBI NO: 20152984 NR Description: chalcone isomerase [Oryza sativa (japonica
  misc_feature (2)..(231): Homolog of NCBI NO: 29124145 NR Description: chalcone isomerase [Oryza sativa (japonica
  misc_feature (1)..(230): Homolog of NCBI NO: 20152986 NR Description: chalcone isomerase [Hordeum vulgare subsp.
  misc_feature (11)..(231): Homolog of NCBI NO: 729103 NR Description: CHALCONE--FLAVONONE ISOMERASE (CHALCONE
MAVPEVVVDGVVFPPVARPPGSAGSHFLGGAGVRGVEIGGNFIKFTAIGVYLEDAAVPALAKKWGGKTADELASDAAFFRDVVTGDFEKFTRVTMILPLTGEQYAEKVTENCVAFWKAAGLYTDAEGVAVEKFREVFKPETFAPGASILFTHSPAGVLTVAFSKDSSVPAAGGVAIENKRLCEAVLESIIGERGVSPAAKLSLAARVSELLAKETAAAADAPQAEPVSITA

SEQ ID NO: 4437 - protein, 137 aa, Zea mays subsp. mays
  peptide (1)..(137): Ceres Seq. ID no. 12566524
  misc_feature (1)..(118): Pfam Name: Chalcone-flavanone isomerase Pfam Description: Chalcone-flavanone isomerase
  misc_feature (1)..(137): Homolog of NCBI NO: 116136 NR Description: CHALCONE--FLAVONONE ISOMERASE A (CHALCONE
  misc_feature (1)..(137): Homolog of NCBI NO: 68481 NR Description: chalcone isomerase (EC 5.5.1.6) A - garden
  misc_feature (1)..(134): Homolog of NCBI NO: 5921722 NR Description: Chalcone--flavonone isomerase (Chalcone
  misc_feature (1)..(134): Homolog of NCBI NO: 1705761 NR Description: CHALCONE--FLAVONONE ISOMERASE (CHALCONE
  misc_feature (1)..(117): Homolog of NCBI NO: 4126399 NR Description: chalcone isomerase [Citrus sinensis]
  misc_feature (1)..(137): Homolog of NCBI NO: 228617 NR Description: chalcone flavanone isomerase
  misc_feature (1)..(137): Homolog of NCBI NO: 20152984 NR Description: chalcone isomerase [Oryza sativa (japonica
  misc_feature (1)..(137): Homolog of NCBI NO: 29124145 NR Description: chalcone isomerase [Oryza sativa (japonica
  misc_feature (1)..(136): Homolog of NCBI NO: 20152986 NR Description: chalcone isomerase [Hordeum vulgare subsp.
  misc_feature (1)..(137): Homolog of NCBI NO: 729103 NR Description: CHALCONE--FLAVONONE ISOMERASE (CHALCONE
MILPLTGEQYAEKVTENCVAFWKAAGLYTDAEGVAVEKFREVFKPETFAPGASILFTHSPAGVLTVAFSKDSSVPAAGGVAIENKRLCEAVLESIIGERGVSPAAKLSLAARVSELLAKETAAAADAPQAEPVSITA

SEQ ID NO: 4438 - DNA, 1076 bp, Zea mays subsp. mays
  misc_feature (1)..(1076): Ceres Seq. ID no. 12337188
  misc_feature: MA Experiment ID: 108535 Result: Up-regulated in Transcription
  misc_feature: MA Experiment 108535 PARAMETER Experiment Name: Zm_Meristem_P Parameter: Age (day) Value: 8
  misc_feature: MA Experiment 108535 PARAMETER Experiment Name: Zm_Meristem_P Parameter: Organism Value: Zea mays
  misc_feature: MA Experiment 108535 PARAMETER Experiment Name: Zm_Meristem_P Parameter: Plant Line Value: 35A19
  misc_feature: MA Experiment 108535 PARAMETER Experiment Name: Zm_Meristem_P Parameter: Tissue Value: Root Meristem vs. Above Root Meristem
  misc_feature: MA Experiment ID: 108544 Result: Down-regulated in Transcription
  misc_feature: MA Experiment ID: 108556 Result: Down-regulated in Transcription
  misc_feature: MA Experiment 108556 PARAMETER Experiment Name: Zm_Drought_P Parameter: Age (day) Value: 9
  misc_feature: MA Experiment 108556 PARAMETER Experiment Name: Zm_Drought_P Parameter: Organism Value: Zea mays
  misc_feature: MA Experiment 108556 PARAMETER Experiment Name: Zm_Drought_P Parameter: Plant Line Value: 35A19
  misc_feature: MA Experiment 108556 PARAMETER Experiment Name: Zm_Drought_P Parameter: Timepoint (hr) Value: 24
  misc_feature: MA Experiment 108556 PARAMETER Experiment Name: Zm_Drought_P Parameter: Tissue Value: Aerial
  misc_feature: MA Experiment 108556 PARAMETER Experiment Name: Zm_Drought_P Parameter: Treatment Value: Drought vs. No Drought
  misc_feature: MA Experiment ID: 20000488 Result: Up-regulated in Transcription
  misc_feature: MA Experiment 20000488 PARAMETER Experiment Name: Zm_50mM_NH4NO3_L_to_H_P Parameter: Organism Value: Zea mays
  misc_feature: MA Experiment 20000488 PARAMETER Experiment Name: Zm_50mM_NH4NO3_L_to_H_P Parameter: Timepoint (hr) Value: 8
  misc_feature: MA Experiment 20000488 PARAMETER Experiment Name: Zm_50mM_NH4NO3_L_to_H_P Parameter: Tissue Value: Leaves
  misc_feature: MA Experiment 20000488 PARAMETER Experiment Name: Zm_50mM_NH4NO3_L_to_H_P Parameter: Treatment Value: 50mM NH4NO3 vs. 100mM Mannitol
  misc_feature: MA Experiment ID: 20000492 Result: Up-regulated in Transcription
  misc_feature: MA Experiment 20000492 PARAMETER Experiment Name: Zm_Hybrid_Seed_Dev_P Parameter: DAP Value: 12
  misc_feature: MA Experiment 20000492 PARAMETER Experiment Name: Zm_Hybrid_Seed_Dev_P Parameter: Organism Value: Zea mays
  misc_feature: MA Experiment 20000492 PARAMETER Experiment Name: Zm_Hybrid_Seed_Dev_P Parameter: Plant Line Value: 35A19
  misc_feature: MA Experiment 20000492 PARAMETER Experiment Name: Zm_Hybrid_Seed_Dev_P Parameter: Tissue Value: Fert Kernel vs. Unfert Floret
  misc_feature: MA Experiment ID: 20000535 Result: Up-regulated in Transcription
  misc_feature: MA Experiment 20000535 PARAMETER Experiment Name: Zm_Hybrid_Seed_Dev_P Parameter: DAP Value: 30 vs. 12
  misc_feature: MA Experiment 20000535 PARAMETER Experiment Name: Zm_Hybrid_Seed_Dev_P Parameter: Organism Value: Zea mays
  misc_feature: MA Experiment 20000535 PARAMETER Experiment Name: Zm_Hybrid_Seed_Dev_P Parameter: Plant Line Value: 35A19
  misc_feature: MA Experiment 20000535 PARAMETER Experiment Name: Zm_Hybrid_Seed_Dev_P Parameter: Tissue Value: Embryo vs. Unfert Floret
caaaaccccattccgcaatgagacccgcagccgcagcagccaccgctaccaccgccgcgctccgtctccgcgccgcctccctctcgccttctctcgctgcctccctctcgccttctctcgccgccctcctttctcatcgtagatcctccctcattcttcctccgctgcgccgcatctgctcccttgcgcctccccactcctccgccgcccccaattcgcagcccccgccgcagttgctctctcccatcatggacgcgcagttcgagctcttccgcgcgcagctcgacgagtcttccaccctccgcgaccgcatccgtgccgtcgtcgccgagattgagtccgcctcccgcgtcgccaccgccgcgctcctcctagtccaccagcccgtccccctggcagatgtgcttgtgaaagccaaggcgcaggtagaggtgatcaaggggttgtacgcgcgcctggcggaagtcctcaaggaatgccctgggcagtactacaggtaccatgctgattggaggactgagacacatatggtagtgtcgatgcttgcattcatgcactggctggagacaggtggcctactcatgcatgctgaagcccaggagaagctagggttgtgctctggggagtttggccttgatgttgaggactacctgacaggactgtgcttcatgtccaatgaatttcctagatttgtagtaaatcgcgtcactgctggcgactatgactgtcctaaaagggttttgggcttcttgaccgatcttcatgcttcgtttaggatgctgaatctgcgcaatgacttcttgcgtaagaaatttgatgggatgaagtatgatttgaggagggtggaagaggtctactatgatgtgaagatccgtggacttgtacctgcgtagttgaaacaagagacttagaatccttggtaatgttagattgttaacatactgtggtttggcttttgtcatccataacgtgttcatctagctaaaatgtgaaatatattctgttggagcgtatgtgttatggactgaacttgagggcactcgaatgaccttgctcatttcttttactgtggcgcc

SEQ ID NO: 4439 - protein, 296 aa, Zea mays subsp. mays
  peptide (1)..(296): Ceres Seq. ID no. 12337189
  misc_feature (98)..(293): Pfam Name: Translin family Pfam Description: Translin family
  misc_feature (6)..(296): Homolog of NCBI NO: 37534782 NR Description: translin-like protein [Oryza sativa (japonica
  misc_feature (79)..(227): Homolog of NCBI NO: 25408524 NR Description: translin-like protein [imported] - Arabidopsis
  misc_feature (211)..(294): Homolog of NCBI NO: 25408524 NR Description: translin-like protein [imported] - Arabidopsis
  misc_feature (79)..(294): Homolog of NCBI NO: 18404301 NR Description: translin-like protein; protein id: At2g37020.1, by cDNA: gi_14596008, supported by cDNA: gi_17978800 [Arabidopsis
  misc_feature (75)..(293): Homolog of NCBI NO: 31213187 NR Description: ENSANGP00000021806 [Anopheles gambiae]
  misc_feature (87)..(293): Homolog of NCBI NO: 20129859 NR Description: CG11761-PA [Drosophila melanogaster]
  misc_feature (82)..(293): Homolog of NCBI NO: 7648677 NR Description: translin [Xenopus laevis]
  misc_feature (83)..(293): Homolog of NCBI NO: 6136058 NR Description: Translin >gi|1770301|emb|CAA64470.1| Translin
  misc_feature (76)..(292): Homolog of NCBI NO: 21730459 NR Description: Chain A, Crystal Structure Of Mouse TestisBRAIN
  misc_feature (100)..(292): Homolog of NCBI NO: 6755899 NR Description: translin; testis/brain-RNA-binding protein [Mus >gi|6136061|sp|Q62348|TSN_MOUSE Translin translin [Mus musculus] >gi|7331148|gb|AAF60295.1|AF234179_1
KPHSAMRPAAAAATATTAALRLRAASLSPSLAASLSPSLAALLSHRRSSLILPPLRRICSLAPPHSSAAPNSQPPPQLLSPIMDAQFELFRAQLDESSTLRDRIRAVVAEIESASRVATAALLLVHQPVPLADVLVKAKAQVEVIKGLYARLAEVLKECPGQYYRYHADWRTETHMVVSMLAFMHWLETGGLLMHAEAQEKLGLCSGEFGLDVEDYLTGLCFMSNEFPRFVVNRVTAGDYDCPKRVLGFLTDLHASFRMLNLRNDFLRKKFDGMKYDLRRVEEVYYDVKIRGLVPA

SEQ ID NO: 4440 - protein, 291 aa, Zea mays subsp. mays
  peptide (1)..(291): Ceres Seq. ID no. 12337190
  misc_feature (93)..(288): Pfam Name: Translin family Pfam Description: Translin family
  misc_feature (1)..(291): Homolog of NCBI NO: 37534782 NR Description: translin-like protein [Oryza sativa (japonica
  misc_feature (74)..(222): Homolog of NCBI NO: 25408524 NR Description: translin-like protein [imported] - Arabidopsis
  misc_feature (206)..(289): Homolog of NCBI NO: 25408524 NR Description: translin-like protein [imported] - Arabidopsis
  misc_feature (74)..(289): Homolog of NCBI NO: 18404301 NR Description: translin-like protein; protein id: At2g37020.1, by cDNA: gi_14596008, supported by cDNA: gi_17978800 [Arabidopsis
  misc_feature (70)..(288): Homolog of NCBI NO: 31213187 NR Description: ENSANGP00000021806 [Anopheles gambiae]
  misc_feature (82)..(288): Homolog of NCBI NO: 20129859 NR Description: CG11761-PA [Drosophila melanogaster]
  misc_feature (77)..(288): Homolog of NCBI NO: 7648677 NR Description: translin [Xenopus laevis]
  misc_feature (78)..(288): Homolog of NCBI NO: 6136058 NR Description: Translin >gi|1770301|emb|CAA64470.1| Translin
  misc_feature (71)..(287): Homolog of NCBI NO: 21730459 NR Description: Chain A, Crystal Structure Of Mouse TestisBRAIN
  misc_feature (95)..(287): Homolog of NCBI NO: 6755899 NR Description: translin; testis/brain-RNA-binding protein [Mus >gi|6136061|sp|Q62348|TSN_MOUSE Translin translin [Mus musculus] >gi|7331148|gb|AAF60295.1|AF234179_1
MRPAAAAATATTAALRLRAASLSPSLAASLSPSLAALLSHRRSSLILPPLRRICSLAPPHSSAAPNSQPPPQLLSPIMDAQFELFRAQLDESSTLRDRIRAVVAEIESASRVATAALLLVHQPVPLADVLVKAKAQVEVIKGLYARLAEVLKECPGQYYRYHADWRTETHMVVSMLAFMHWLETGGLLMHAEAQEKLGLCSGEFGLDVEDYLTGLCFMSNEFPRFVVNRVTAGDYDCPKRVLGFLTDLHASFRMLNLRNDFLRKKFDGMKYDLRRVEEVYYDVKIRGLVPA

SEQ ID NO: 4441 - protein, 214 aa, Zea mays subsp. mays
  peptide (1)..(214): Ceres Seq. ID no. 12337191
  misc_feature (16)..(211): Pfam Name: Translin family Pfam Description: Translin family
  misc_feature (1)..(214): Homolog of NCBI NO: 37534782 NR Description: translin-like protein [Oryza sativa (japonica
  misc_feature (1)..(145): Homolog of NCBI NO: 25408524 NR Description: translin-like protein [imported] - Arabidopsis
  misc_feature (129)..(212): Homolog of NCBI NO: 25408524 NR Description: translin-like protein [imported] - Arabidopsis
  misc_feature (1)..(212): Homolog of NCBI NO: 18404301 NR Description: translin-like protein; protein id: At2g37020.1, by cDNA: gi_14596008, supported by cDNA: gi_17978800 [Arabidopsis
  misc_feature (1)..(211): Homolog of NCBI NO: 31213187 NR Description: ENSANGP00000021806 [Anopheles gambiae]
  misc_feature (5)..(211): Homolog of NCBI NO: 20129859 NR Description: CG11761-PA [Drosophila melanogaster]
  misc_feature (1)..(211): Homolog of NCBI NO: 7648677 NR Description: translin [Xenopus laevis]
  misc_feature (1)..(211): Homolog of NCBI NO: 6136058 NR Description: Translin >gi|1770301|emb|CAA64470.1| Translin
  misc_feature (1)..(210): Homolog of NCBI NO: 21730459 NR Description: Chain A, Crystal Structure Of Mouse TestisBRAIN
  misc_feature (18)..(210): Homolog of NCBI NO: 6755899 NR Description: translin; testis/brain-RNA-binding protein [Mus >gi|6136061|sp|Q62348|TSN_MOUSE Translin translin [Mus musculus] >gi|7331148|gb|AAF60295.1|AF234179_1
MDAQFELFRAQLDESSTLRDRIRAVVAEIESASRVATAALLLVHQPVPLADVLVKAKAQVEVIKGLYARLAEVLKECPGQYYRYHADWRTETHMVVSMLAFMHWLETGGLLMHAEAQEKLGLCSGEFGLDVEDYLTGLCFMSNEFPRFVVNRVTAGDYDCPKRVLGFLTDLHASFRMLNLRNDFLRKKFDGMKYDLRRVEEVYYDVKIRGLVPA

SEQ ID NO: 4442 - DNA, 1943 bp, Zea mays subsp. mays
  misc_feature (1)..(1943): Ceres Seq. ID no. 12387936
  misc_feature: MA Experiment ID: 20000535 Result: Up-regulated in Transcription
  misc_feature: MA Experiment 20000535 PARAMETER Experiment Name: Zm_Hybrid_Seed_Dev_P Parameter: DAP Value: 30 vs. 12
  misc_feature: MA Experiment 20000535 PARAMETER Experiment Name: Zm_Hybrid_Seed_Dev_P Parameter: Organism Value: Zea mays
  misc_feature: MA Experiment 20000535 PARAMETER Experiment Name: Zm_Hybrid_Seed_Dev_P Parameter: Plant Line Value: 35A19
  misc_feature: MA Experiment 20000535 PARAMETER Experiment Name: Zm_Hybrid_Seed_Dev_P Parameter: Tissue Value: Embryo vs. Unfert Floret
ggaaaaggaaaaaaaaaaaagaaccgcgcacgcttcttcttccctcccccacaaagggaagaaaaaaaatttccgtgtacggtttcgcccggcgccgcctttggcagttgctttgcttgctcttgccctgttgagctccaaaggatctccatttcaccactcccatcgatcccactaccggtccgcatcaagcagccggcgatggggtccgcgtccgcccgcatcgccaccgccgccgtgcacctcgtcaccgcggccgccatcctcctcatgctcgcgcgaggcggcgaggccgtcagtctctggctcccgccgccgaccgccggaggagggggcttcctcggcggcgcggaccgttacctgactcgggaggagcactggatgaaccaaaccctggatcacttcaacccgacggaccatcggcaattcaaacagcggtactacgaatttctcgactactaccgagctccaaatggcccgatcttcctatacatctgtggagaatctacgtgcaatgggattggcaataactacttagctgtggtggcaaagaaatttggtgctgcattggtttctcctgagcatcgatactatggaaagagttctccttttaacagtttgacaacagaaaatctacagttcttgtcatcaaagcaggctttatttgatcttgctgttttccgccaatattatcaggaaaccttaaatgccaagtataatcgctctggggcaaacagttcttggtttgtttttggagggtcatatgctggagcactcagtgcttggttcaggttgaagtttcctcacttgacatgtggaagccttgcaagttcaggggttgttcttgctgtatacaactttaccgattttgacaaacagattgggatctctgctggtcctgaatgcaaggcagcacttcaagaaataacaggacttgttgatggacagcttcagtctggccgtaactcggttaaggagttgtttggagcgacaaagttagaaaatgatggtgacttcctctacttactggcagatgctgctgctattgcgttccaatatggtaatcctgatgtcttgtgctccccactagctgaagcaaagaagaatgggacagatttggtggaaacatttgctagttacgtgaaagattattacattggaaaatttggggcgtcagtagcatcatatgatcagcaatatttgaagaacacaactcctgctgaatcctcatatagactatggtggtaccaagtttgcagtgaggttgcatatttccaggtggcaccaaaaaacgatagtgttcgttccccaaagatcgacacgaggtaccatttggacttgtgcagaaatgttttcggcgaaggagtctaccctgatgtctttatgacaaacttatactatggaggcacaggaattgcaggttctaaaattgtttttgcaaatggatctcaagacccatggcgccacgcttctaagcagaaatcatcagacgaattgccatcatacctaattgagtgcaagaactgcggacactgcagtgatctctctggatgccctcaagctccttcaaacattgaaggtgattcatccaagtgctcacctcccgaagctctgaacaaagtaaggaaggagattgtcgatcacattgacctgtggctatcagaatgccaagagcaaggacatgacaaggagccatggctgggaagcatatggagcatagctgctatttgatcaatctgtgaagctataagcatgtgctgctagagtaaccaaggcaaatatgctttctttttcttgcagcactgtggtttatcgtttcggcaaacaatgtgggctgctgagtaagaggacatatctggtgcaccaatcttccatgtgcattagatatgttctcgctgagtaatccacctgtggcgaataaataaagcagtcagttctcagtc

SEQ ID NO: 4443 - protein, 576 aa, Zea mays subsp. mays
  peptide (1)..(576): Ceres Seq. ID no. 12387937
  misc_feature (139)..(545): Pfam Name: Serine carboxypeptidase S28 Pfam Description: Serine carboxypeptidase S28
  misc_feature (139)..(574): Homolog of NCBI NO: 37535976 NR Description: putative serine peptidase [Oryza sativa (japonica group)] >gi|10140733|gb|AAG13566.1| putative serine peptidase sativa] >gi|31433013|gb|AAP54577.1| putative serine peptidase
  misc_feature (81)..(558): Homolog of NCBI NO: 37535980 NR Description: putative serine peptidase [Oryza sativa (japonica group)] >gi|10140734|gb|AAG13567.1| putative serine peptidase sativa] >gi|31433015|gb|AAP54579.1| putative serine peptidase
  misc_feature (82)..(557): Homolog of NCBI NO: 18419800 NR Description: Expressed protein; protein id: At4g36195.1, by cDNA: gi_14334573 [Arabidopsis thaliana] unknown protein [Arabidopsis thaliana]
  misc_feature (189)..(557): Homolog of NCBI NO: 18419798 NR Description: putative protein; protein id: At4g36190.1
  misc_feature (114)..(232): Homolog of NCBI NO: 18419798 NR Description: putative protein; protein id: At4g36190.1
  misc_feature (226)..(558): Homolog of NCBI NO: 15227960 NR Description: unknown protein; protein id: At2g18080.1
  misc_feature (151)..(179): Homolog of NCBI NO: 15227960 NR Description: unknown protein; protein id: At2g18080.1
  misc_feature (139)..(374): Homolog of NCBI NO: 15144318 NR Description: putative serine peptidase [Oryza sativa (japonica
  misc_feature (139)..(374): Homolog of NCBI NO: 7486037 NR Description: hypothetical protein F23E13.80 - Arabidopsis >gi|2961378|emb|CAA18125.1| putative protein [Arabidopsis >gi|7270572|emb|CAB80290.1| putative protein [Arabidopsis
  misc_feature (497)..(557): Homolog of NCBI NO: 7486037 NR Description: hypothetical protein F23E13.80 - Arabidopsis >gi|2961378|emb|CAA18125.1| putative protein [Arabidopsis >gi|7270572|emb|CAB80290.1| putative protein [Arabidopsis
GKGKKKKNRARFFFPPPQREEKKFPCTVSPGAAFGSCFACSCPVELQRISISPLPSIPLPVRIKQPAMGSASARIATAAVHLVTAAAILLMLARGGEAVSLWLPPPTAGGGGFLGGADRYLTREEHWMNQTLDHFNPTDHRQFKQRYYEFLDYYRAPNGPIFLYICGESTCNGIGNNYLAVVAKKFGAALVSPEHRYYGKSSPFNSLTTENLQFLSSKQALFDLAVFRQYYQETLNAKYNRSGANSSWFVFGGSYAGALSAWFRLKFPHLTCGSLASSGVVLAVYNFTDFDKQIGISAGPECKAALQEITGLVDGQLQSGRNSVKELFGATKLENDGDFLYLLADAAAIAFQYGNPDVLCSPLAEAKKNGTDLVETFASYVKDYYIGKFGASVASYDQQYLKNTTPAESSYRLWWYQVCSEVAYFQVAPKNDSVRSPKIDTRYHLDLCRNVFGEGVYPDVFMTNLYYGGTGIAGSKIVFANGSQDPWRHASKQKSSDELPSYLIECKNCGHCSDLSGCPQAPSNIEGDSSKCSPPEALNKVRKEIVDHIDLWLSECQEQGHDKEPWLGSIWSIAAI

SEQ ID NO: 4444 - protein, 509 aa, Zea mays subsp. mays
  peptide (1)..(509): Ceres Seq. ID no. 12387938
  misc_feature (72)..(478): Pfam Name: Serine carboxypeptidase S28 Pfam Description: Serine carboxypeptidase S28
  misc_feature (72)..(507): Homolog of NCBI NO: 37535976 NR Description: putative serine peptidase [Oryza sativa (japonica group)] >gi|10140733|gb|AAG13566.1| putative serine peptidase sativa] >gi|31433013|gb|AAP54577.1| putative serine peptidase
  misc_feature (14)..(491): Homolog of NCBI NO: 37535980 NR Description: putative serine peptidase [Oryza sativa (japonica group)] >gi|10140734|gb|AAG13567.1| putative serine peptidase sativa] >gi|31433015|gb|AAP54579.1| putative serine peptidase
  misc_feature (15)..(490): Homolog of NCBI NO: 18419800 NR Description: Expressed protein; protein id: At4g36195.1, by cDNA: gi_14334573 [Arabidopsis thaliana] unknown protein [Arabidopsis thaliana]
  misc_feature (122)..(490): Homolog of NCBI NO: 18419798 NR Description: putative protein; protein id: At4g36190.1
  misc_feature (47)..(165): Homolog of NCBI NO: 18419798 NR Description: putative protein; protein id: At4g36190.1
  misc_feature (159)..(491): Homolog of NCBI NO: 15227960 NR Description: unknown protein; protein id: At2g18080.1
  misc_feature (84)..(112): Homolog of NCBI NO: 15227960 NR Description: unknown protein; protein id: At2g18080.1
  misc_feature (72)..(307): Homolog of NCBI NO: 15144318 NR Description: putative serine peptidase [Oryza sativa (japonica
  misc_feature (72)..(307): Homolog of NCBI NO: 7486037 NR Description: hypothetical protein F23E13.80 - Arabidopsis >gi|2961378|emb|CAA18125.1| putative protein [Arabidopsis >gi|7270572|emb|CAB80290.1| putative protein [Arabidopsis
  misc_feature (430)..(490): Homolog of NCBI NO: 7486037 NR Description: hypothetical protein F23E13.80 - Arabidopsis >gi|2961378|emb|CAA18125.1| putative protein [Arabidopsis >gi|7270572|emb|CAB80290.1| putative protein [Arabidopsis
MGSASARIATAAVHLVTAAAILLMLARGGEAVSLWLPPPTAGGGGFLGGADRYLTREEHWMNQTLDHFNPTDHRQFKQRYYEFLDYYRAPNGPIFLYICGESTCNGIGNNYLAVVAKKFGAALVSPEHRYYGKSSPFNSLTTENLQFLSSKQALFDLAVFRQYYQETLNAKYNRSGANSSWFVFGGSYAGALSAWFRLKFPHLTCGSLASSGVVLAVYNFTDFDKQIGISAGPECKAALQEITGLVDGQLQSGRNSVKELFGATKLENDGDFLYLLADAAAIAFQYGNPDVLCSPLAEAKKNGTDLVETFASYVKDYYIGKFGASVASYDQQYLKNTTPAESSYRLWWYQVCSEVAYFQVAPKNDSVRSPKIDTRYHLDLCRNVFGEGVYPDVFMTNLYYGGTGIAGSKIVFANGSQDPWRHASKQKSSDELPSYLIECKNCGHCSDLSGCPQAPSNIEGDSSKCSPPEALNKVRKEIVDHIDLWLSECQEQGHDKEPWLGSIWSIAAI

SEQ ID NO: 4445 - protein, 486 aa, Zea mays subsp. mays
  peptide (1)..(486): Ceres Seq. ID no. 12387939
  misc_feature (49)..(455): Pfam Name: Serine carboxypeptidase S28 Pfam Description: Serine carboxypeptidase S28
  misc_feature (49)..(484): Homolog of NCBI NO: 37535976 NR Description: putative serine peptidase [Oryza sativa (japonica group)] >gi|10140733|gb|AAG13566.1| putative serine peptidase sativa] >gi|31433013|gb|AAP54577.1| putative serine peptidase
  misc_feature (1)..(468): Homolog of NCBI NO: 37535980 NR Description: putative serine peptidase [Oryza sativa (japonica group)] >gi|10140734|gb|AAG13567.1| putative serine peptidase sativa] >gi|31433015|gb|AAP54579.1| putative serine peptidase
  misc_feature (1)..(467): Homolog of NCBI NO: 18419800 NR Description: Expressed protein; protein id: At4g36195.1, by cDNA: gi_14334573 [Arabidopsis thaliana] unknown protein [Arabidopsis thaliana]
  misc_feature (99)..(467): Homolog of NCBI NO: 18419798 NR Description: putative protein; protein id: At4g36190.1
  misc_feature (24)..(142): Homolog of NCBI NO: 18419798 NR Description: putative protein; protein id: At4g36190.1
  misc_feature (136)..(468): Homolog of NCBI NO: 15227960 NR Description: unknown protein; protein id: At2g18080.1
  misc_feature (61)..(89): Homolog of NCBI NO: 15227960 NR Description: unknown protein; protein id: At2g18080.1
  misc_feature (49)..(284): Homolog of NCBI NO: 15144318 NR Description: putative serine peptidase [Oryza sativa (japonica
  misc_feature (49)..(284): Homolog of NCBI NO: 7486037 NR Description: hypothetical protein F23E13.80 - Arabidopsis >gi|2961378|emb|CAA18125.1| putative protein [Arabidopsis >gi|7270572|emb|CAB80290.1| putative protein [Arabidopsis
  misc_feature (407)..(467): Homolog of NCBI NO: 7486037 NR Description: hypothetical protein F23E13.80 - Arabidopsis >gi|2961378|emb|CAA18125.1| putative protein [Arabidopsis >gi|7270572|emb|CAB80290.1| putative protein [Arabidopsis
MLARGGEAVSLWLPPPTAGGGGFLGGADRYLTREEHWMNQTLDHFNPTDHRQFKQRYYEFLDYYRAPNGPIFLYICGESTCNGIGNNYLAVVAKKFGAALVSPEHRYYGKSSPFNSLTTENLQFLSSKQALFDLAVFRQYYQETLNAKYNRSGANSSWFVFGGSYAGALSAWFRLKFPHLTCGSLASSGVVLAVYNFTDFDKQIGISAGPECKAALQEITGLVDGQLQSGRNSVKELFGATKLENDGDFLYLLADAAAIAFQYGNPDVLCSPLAEAKKNGTDLVETFASYVKDYYIGKFGASVASYDQQYLKNTTPAESSYRLWWYQVCSEVAYFQVAPKNDSVRSPKIDTRYHLDLCRNVFGEGVYPDVFMTNLYYGGTGIAGSKIVFANGSQDPWRHASKQKSSDELPSYLIECKNCGHCSDLSGCPQAPSNIEGDSSKCSPPEALNKVRKEIVDHIDLWLSECQEQGHDKEPWLGSIWSIAAI

SEQ ID NO: 4446 - DNA, 1823 bp, Zea mays subsp. mays
  misc_feature (1)..(1823): Ceres Seq. ID no. 12566533
  misc_feature: MA Experiment ID: 108504 Result: Down-regulated in Transcription
  misc_feature: MA Experiment 108504 PARAMETER Experiment Name: Zm_Drought_P Parameter: Age (day) Value: 8
  misc_feature: MA Experiment 108504 PARAMETER Experiment Name: Zm_Drought_P Parameter: Organism Value: Zea mays
  misc_feature: MA Experiment 108504 PARAMETER Experiment Name: Zm_Drought_P Parameter: Plant Line Value: 35A19
  misc_feature: MA Experiment 108504 PARAMETER Experiment Name: Zm_Drought_P Parameter: Timepoint (hr) Value: 12
  misc_feature: MA Experiment 108504 PARAMETER Experiment Name: Zm_Drought_P Parameter: Tissue Value: Aerial
  misc_feature: MA Experiment 108504 PARAMETER Experiment Name: Zm_Drought_P Parameter: Treatment Value: Drought vs. No Drought
  misc_feature: MA Experiment ID: 108528 Result: Up-regulated in Transcription
  misc_feature: MA Experiment 108528 PARAMETER Experiment Name: Zm_Imbibed_Seeds_P Parameter: Age (day) Value: 5 vs. 2
  misc_feature: MA Experiment 108528 PARAMETER Experiment Name: Zm_Imbibed_Seeds_P Parameter: Organism Value: Zea mays
  misc_feature: MA Experiment 108528 PARAMETER Experiment Name: Zm_Imbibed_Seeds_P Parameter: Plant Line Value: 35A19
  misc_feature: MA Experiment 108528 PARAMETER Experiment Name: Zm_Imbibed_Seeds_P Parameter: Tissue Value: Aerial vs. Embryo
  misc_feature: MA Experiment ID: 20000535 Result: Down-regulated in Transcription
  misc_feature: MA Experiment 20000535 PARAMETER Experiment Name: Zm_Hybrid_Seed_Dev_P Parameter: DAP Value: 30 vs. 12
  misc_feature: MA Experiment 20000535 PARAMETER Experiment Name: Zm_Hybrid_Seed_Dev_P Parameter: Organism Value: Zea mays
  misc_feature: MA Experiment 20000535 PARAMETER Experiment Name: Zm_Hybrid_Seed_Dev_P Parameter: Plant Line Value: 35A19
  misc_feature: MA Experiment 20000535 PARAMETER Experiment Name: Zm_Hybrid_Seed_Dev_P Parameter: Tissue Value: Embryo vs. Unfert Floret
acatgccacattgccaccaagccacagttccacctttcgattcatgcacgctcagtcatgggcgccctccggagtttagccatctcctacccggagttcctcgtggccgggctgtgcttcgtctccctctcggccctgcgccacgcgatgcgtgagcggcggcaacgcgcccccctgagctggcctgtggtgggcatgctcccgttcgtgctcgcgaacctcgggcgcctctacgacgccatcaccgacgccctccacgggtccgggtgcacgctcatgttccgcgggccgtggctcgcccgcgcggacttcctgctgacgtgcgacccggcggccgtccagcactgcctggcgtccaaccacgggggctacgacaggggccgagactttgcggagatgttcgacctcctgggcgacgggctgctggttgcggacgccgcgtcgtgggcgcgccagcggcacgtcgccgccaccgtcttcggcaccccggcgttccggtccttcgtcctgtgcaccatggcgcgccagacggcgcggctgctcgtgccgttcctggactgcgccgccgcggatcaggaaggggacggtggcgtcgttgatctcgaggacgtgttcatgcggtactcgctcgatgtgacctacgcctccgtgttcgatgccgacctggacatgctgtgcgtcgccgccgcctcggcgccggtgccgccgttcggcctggcgaccagggtggccagcgaatctgtgctcttcaggcacatcgtgccggcctggtggtggaggctgctgaggtggctcaatgtcggctccgagaggaggctggccgaggccaaggcggtcctcaacgaattcgtctaccgcgagatcgccaaacgcaagtcacggctcgccaccacaagccaagcaggagaaggctacgacctcctgtcactgtacatggcgtggccgagggaacccggtatgagcgagcggcagagggatcagttcctccgggattccgccgtcagttacttgtttgcggccaaggacctcatcgtcgccgcgctcacctggttcttctacatgctctgcacgcacccgcacgtcgaggccaagatcctcgacgagctgaggtccctgcatcccacagccacggtcgcggccaccggcggcggcgagcatgccgtgttcgactctgacgcgctccagcccgcgtcctacctccacgcggcggtcctcgagacgctgcggctgttcccgccggcgcctttcgaggagaaagaggcagttcgcagcgatgtgctgcctgacggcaccacggtggccaagggcaccagggtcatcttctgcatctacgccatgggcaggatggaagggctatggggtagcgactgccacgagttccgaccggagcggtggctgtccgatattggccgagtccggcacgagcccagccacaagttcgccgtgttcaactgcggacccagaagctgcctcgggaagaacctggggctcagcaacatcaagattgccgccgccgcaatcttatacaactttcgggtggagctcatcgacggccatatcgttgagccacagaactcagtggtgcttctcaccaagaacgggatgagggttaggatcaagaggaggcacgcagcatgatgcactgtgctacttctacctttacatcagttaaactccaaaaaatggtggggaaacgaacaaaaggtgatagggcatatagaataaaaacgcagcacaaattttattccagattaatctgctcatgtgatttcagccatattggatacaagttctgaactttgatgcttctgattcggaaaatt

SEQ ID NO: 4447 - protein, 545 aa, Zea mays subsp. mays
  peptide (1)..(545): Ceres Seq. ID no. 12566534
  misc_feature (58)..(538): Pfam Name: Cytochrome P450 Pfam Description: Cytochrome P450
  misc_feature (70)..(542): Homolog of NCBI NO: 30692374 NR Description: cytochrome P450 family [Arabidopsis thaliana]
  misc_feature (25)..(541): Homolog of NCBI NO: 15218645 NR Description: cytochrome P450, putative; protein id:
  misc_feature (60)..(542): Homolog of NCBI NO: 15227788 NR Description: cytochrome P450, putative
  misc_feature (32)..(542): Homolog of NCBI NO: 15237250 NR Description: cytochrome P450-like protein; protein id:
  misc_feature (50)..(542): Homolog of NCBI NO: 15220272 NR Description: cytochrome P450, putative; protein id:
  misc_feature (28)..(542): Homolog of NCBI NO: 7430717 NR Description: cytochrome P450 homolog F23K16.110 - Arabidopsis
  misc_feature (28)..(545): Homolog of NCBI NO: 30692374 NR Description: cytochrome P450 family [Arabidopsis thaliana]
  misc_feature (19)..(542): Homolog of NCBI NO: 37535524 NR Description: putative cytochrome P450 protein
  misc_feature (32)..(542): Homolog of NCBI NO: 15227116 NR Description: cytochrome P450, putative; protein id:
  misc_feature (20)..(545): Homolog of NCBI NO: 34906256 NR Description: putative cytochrome P450 [Oryza sativa (japonica
TCHIATKPQFHLSIHARSVMGALRSLAISYPEFLVAGLCFVSLSALRHAMRERRQRAPLSWPVVGMLPFVLANLGRLYDAITDALHGSGCTLMFRGPWLARADFLLTCDPAAVQHCLASNHGGYDRGRDFAEMFDLLGDGLLVADAASWARQRHVAATVFGTPAFRSFVLCTMARQTARLLVPFLDCAAADQEGDGGVVDLEDVFMRYSLDVTYASVFDADLDMLCVAAASAPVPPFGLATRVASESVLFRHIVPAWWWRLLRWLNVGSERRLAEAKAVLNEFVYREIAKRKSRLATTSQAGEGYDLLSLYMAWPREPGMSERQRDQFLRDSAVSYLFAAKDLIVAALTWFFYMLCTHPHVEAKILDELRSLHPTATVAATGGGEHAVFDSDALQPASYLHAAVLETLRLFPPAPFEEKEAVRSDVLPDGTTVAKGTRVIFCIYAMGRMEGLWGSDCHEFRPERWLSDIGRVRHEPSHKFAVFNCGPRSCLGKNLGLSNIKIAAAAILYNFRVELIDGHIVEPQNSVVLLTKNGMRVRIKRRHAA

SEQ ID NO: 4448 - protein, 526 aa, Zea mays subsp. mays
  peptide (1)..(526): Ceres Seq. ID no. 12566535
  misc_feature (39)..(519): Pfam Name: Cytochrome P450 Pfam Description: Cytochrome P450
  misc_feature (1)..(526): Homolog of NCBI NO: 34906256 NR Description: putative cytochrome P450 [Oryza sativa (japonica
  misc_feature (51)..(523): Homolog of NCBI NO: 30692374 NR Description: cytochrome P450 family [Arabidopsis thaliana]
  misc_feature (6)..(522): Homolog of NCBI NO: 15218645 NR Description: cytochrome P450, putative; protein id:
  misc_feature (41)..(523): Homolog of NCBI NO: 15227788 NR Description: cytochrome P450, putative
  misc_feature (13)..(523): Homolog of NCBI NO: 15237250 NR Description: cytochrome P450-like protein; protein id:
  misc_feature (31)..(523): Homolog of NCBI NO: 15220272 NR Description: cytochrome P450, putative; protein id:
  misc_feature (9)..(523): Homolog of NCBI NO: 7430717 NR Description: cytochrome P450 homolog F23K16.110 - Arabidopsis
  misc_feature (9)..(526): Homolog of NCBI NO: 30692374 NR Description: cytochrome P450 family [Arabidopsis thaliana]
  misc_feature (1)..(523): Homolog of NCBI NO: 37535524 NR Description: putative cytochrome P450 protein
  misc_feature (13)..(523): Homolog of NCBI NO: 15227116 NR Description: cytochrome P450, putative; protein id:
MGALRSLAISYPEFLVAGLCFVSLSALRHAMRERRQRAPLSWPVVGMLPFVLANLGRLYDAITDALHGSGCTLMFRGPWLARADFLLTCDPAAVQHCLASNHGGYDRGRDFAEMFDLLGDGLLVADAASWARQRHVAATVFGTPAFRSFVLCTMARQTARLLVPFLDCAAADQEGDGGVVDLEDVFMRYSLDVTYASVFDADLDMLCVAAASAPVPPFGLATRVASESVLFRHIVPAWWWRLLRWLNVGSERRLAEAKAVLNEFVYREIAKRKSRLATTSQAGEGYDLLSLYMAWPREPGMSERQRDQFLRDSAVSYLFAAKDLIVAALTWFFYMLCTHPHVEAKILDELRSLHPTATVAATGGGEHAVFDSDALQPASYLHAAVLETLRLFPPAPFEEKEAVRSDVLPDGTTVAKGTRVIFCIYAMGRMEGLWGSDCHEFRPERWLSDIGRVRHEPSHKFAVFNCGPRSCLGKNLGLSNIKIAAAAILYNFRVELIDGHIVEPQNSVVLLTKNGMRVRIKRRHAA

SEQ ID NO: 4449 - protein, 496 aa, Zea mays subsp. mays
  peptide (1)..(496): Ceres Seq. ID no. 12566536
  misc_feature (9)..(489): Pfam Name: Cytochrome P450 Pfam Description: Cytochrome P450
  misc_feature (21)..(493): Homolog of NCBI NO: 30692374 NR Description: cytochrome P450 family [Arabidopsis thaliana]
  misc_feature (1)..(492): Homolog of NCBI NO: 15218645 NR Description: cytochrome P450, putative; protein id:
  misc_feature (11)..(493): Homolog of NCBI NO: 15227788 NR Description: cytochrome P450, putative
  misc_feature (1)..(493): Homolog of NCBI NO: 15237250 NR Description: cytochrome P450-like protein; protein id:
  misc_feature (1)..(493): Homolog of NCBI NO: 15220272 NR Description: cytochrome P450, putative; protein id:
  misc_feature (1)..(493): Homolog of NCBI NO: 7430717 NR Description: cytochrome P450 homolog F23K16.110 - Arabidopsis
  misc_feature (1)..(496): Homolog of NCBI NO: 30692374 NR Description: cytochrome P450 family [Arabidopsis thaliana]
  misc_feature (1)..(493): Homolog of NCBI NO: 37535524 NR Description: putative cytochrome P450 protein
  misc_feature (1)..(493): Homolog of NCBI NO: 15227116 NR Description: cytochrome P450, putative; protein id:
  misc_feature (1)..(496): Homolog of NCBI NO: 34906256 NR Description: putative cytochrome P450 [Oryza sativa (japonica
MRERRQRAPLSWPVVGMLPFVLANLGRLYDAITDALHGSGCTLMFRGPWLARADFLLTCDPAAVQHCLASNHGGYDRGRDFAEMFDLLGDGLLVADAASWARQRHVAATVFGTPAFRSFVLCTMARQTARLLVPFLDCAAADQEGDGGVVDLEDVFMRYSLDVTYASVFDADLDMLCVAAASAPVPPFGLATRVASESVLFRHIVPAWWWRLLRWLNVGSERRLAEAKAVLNEFVYREIAKRKSRLATTSQAGEGYDLLSLYMAWPREPGMSERQRDQFLRDSAVSYLFAAKDLIVAALTWFFYMLCTHPHVEAKILDELRSLHPTATVAATGGGEHAVFDSDALQPASYLHAAVLETLRLFPPAPFEEKEAVRSDVLPDGTTVAKGTRVIFCIYAMGRMEGLWGSDCHEFRPERWLSDIGRVRHEPSHKFAVFNCGPRSCLGKNLGLSNIKIAAAAILYNFRVELIDGHIVEPQNSVVLLTKNGMRVRIKRRHAA

SEQ ID NO: 4450 - DNA, 1027 bp, Zea mays subsp. mays
  misc_feature (1)..(1027): Ceres Seq. ID no. 12358294
  misc_feature: MA Experiment ID: 108522 Result: Up-regulated in Transcription
  misc_feature: MA Experiment 108522 PARAMETER Experiment Name: Zm_42deg_Heat_P Parameter: Age (day) Value: 8
  misc_feature: MA Experiment 108522 PARAMETER Experiment Name: Zm_42deg_Heat_P Parameter: Organism Value: Zea mays
  misc_feature: MA Experiment 108522 PARAMETER Experiment Name: Zm_42deg_Heat_P Parameter: Plant Line Value: 35A19
  misc_feature: MA Experiment 108522 PARAMETER Experiment Name: Zm_42deg_Heat_P Parameter: Temperature (deg C) Value: 42 vs. 22
  misc_feature: MA Experiment 108522 PARAMETER Experiment Name: Zm_42deg_Heat_P Parameter: Timepoint (hr) Value: 1
  misc_feature: MA Experiment 108522 PARAMETER Experiment Name: Zm_42deg_Heat_P Parameter: Tissue Value: Aerial
  misc_feature: MA Experiment ID: 108526 Result: Up-regulated in Transcription
  misc_feature: MA Experiment 108526 PARAMETER Experiment Name: Zm_5mM_NO_P Parameter: Age (day) Value: 8
  misc_feature: MA Experiment 108526 PARAMETER Experiment Name: Zm_5mM_NO_P Parameter: Organism Value: Zea mays
  misc_feature: MA Experiment 108526 PARAMETER Experiment Name: Zm_5mM_NO_P Parameter: Plant Line Value: 35A19
  misc_feature: MA Experiment 108526 PARAMETER Experiment Name: Zm_5mM_NO_P Parameter: Timepoint (hr) Value: 1
  misc_feature: MA Experiment 108526 PARAMETER Experiment Name: Zm_5mM_NO_P Parameter: Tissue Value: Aerial
  misc_feature: MA Experiment 108526 PARAMETER Experiment Name: Zm_5mM_NO_P Parameter: Treatment Value: 5mM NO vs. No Treatment
  misc_feature: MA Experiment ID: 108527 Result: Up-regulated in Transcription
  misc_feature: MA Experiment 108527 PARAMETER Experiment Name: Zm_5mM_NO_P Parameter: Age (day) Value: 8
  misc_feature: MA Experiment 108527 PARAMETER Experiment Name: Zm_5mM_NO_P Parameter: Organism Value: Zea mays
  misc_feature: MA Experiment 108527 PARAMETER Experiment Name: Zm_5mM_NO_P Parameter: Plant Line Value: 35A19
  misc_feature: MA Experiment 108527 PARAMETER Experiment Name: Zm_5mM_NO_P Parameter: Timepoint (hr) Value: 6
  misc_feature: MA Experiment 108527 PARAMETER Experiment Name: Zm_5mM_NO_P Parameter: Tissue Value: Aerial
  misc_feature: MA Experiment 108527 PARAMETER Experiment Name: Zm_5mM_NO_P Parameter: Treatment Value: 5mM NO vs. No Treatment
  misc_feature: MA Experiment ID: 108530 Result: Up-regulated in Transcription
  misc_feature: MA Experiment 108530 PARAMETER Experiment Name: Zm_Imbibed_Seeds_P Parameter: Age (day) Value: 6 vs. 2
  misc_feature: MA Experiment 108530 PARAMETER Experiment Name: Zm_Imbibed_Seeds_P Parameter: Organism Value: Zea mays
  misc_feature: MA Experiment 108530 PARAMETER Experiment Name: Zm_Imbibed_Seeds_P Parameter: Plant Line Value: 35A19
  misc_feature: MA Experiment 108530 PARAMETER Experiment Name: Zm_Imbibed_Seeds_P Parameter: Tissue Value: Aerial vs. Embryo
  misc_feature: MA Experiment ID: 108532 Result: Down-regulated in Transcription
  misc_feature: MA Experiment 108532 PARAMETER Experiment Name: Zm_20uM_KNO3_H-to-L_P Parameter: Age (day) Value: 11
  misc_feature: MA Experiment 108532 PARAMETER Experiment Name: Zm_20uM_KNO3_H-to-L_P Parameter: Organism Value: Zea mays
  misc_feature: MA Experiment 108532 PARAMETER Experiment Name: Zm_20uM_KNO3_H-to-L_P Parameter: Plant Line Value: 35A19
  misc_feature: MA Experiment 108532 PARAMETER Experiment Name: Zm_20uM_KNO3_H-to-L_P Parameter: Timepoint (hr) Value: 16
  misc_feature: MA Experiment 108532 PARAMETER Experiment Name: Zm_20uM_KNO3_H-to-L_P Parameter: Tissue Value: Roots
  misc_feature: MA Experiment 108532 PARAMETER Experiment Name: Zm_20uM_KNO3_H-to-L_P Parameter: Treatment Value: 20uM KNO3 vs. 60mM KNO3
  misc_feature: MA Experiment ID: 108533 Result: Up-regulated in Transcription
  misc_feature: MA Experiment 108533 PARAMETER Experiment Name: Zm_4deg_Cold_P Parameter: Age (hr) Value: 8
  misc_feature: MA Experiment 108533 PARAMETER Experiment Name: Zm_4deg_Cold_P Parameter: Organism Value: Zea mays
  misc_feature: MA Experiment 108533 PARAMETER Experiment Name: Zm_4deg_Cold_P Parameter: Plant Line Value: 35A19
  misc_feature: MA Experiment 108533 PARAMETER Experiment Name: Zm_4deg_Cold_P Parameter: Temperature (deg C) Value: 4 vs. 22
  misc_feature: MA Experiment 108533 PARAMETER Experiment Name: Zm_4deg_Cold_P Parameter: Timepoint (hr) Value: 1
  misc_feature: MA Experiment 108533 PARAMETER Experiment Name: Zm_4deg_Cold_P Parameter: Tissue Value: Aerial
  misc_feature: MA Experiment ID: 108534 Result: Up-regulated in Transcription
  misc_feature: MA Experiment 108534 PARAMETER Experiment Name: Zm_4deg_Cold_P Parameter: Age (hr) Value: 8
  misc_feature: MA Experiment 108534 PARAMETER Experiment Name: Zm_4deg_Cold_P Parameter: Organism Value: Zea mays
  misc_feature: MA Experiment 108534 PARAMETER Experiment Name: Zm_4deg_Cold_P Parameter: Plant Line Value: 35A19
  misc_feature: MA Experiment 108534 PARAMETER Experiment Name: Zm_4deg_Cold_P Parameter: Temperature (deg C) Value: 4 vs. 22
  misc_feature: MA Experiment 108534 PARAMETER Experiment Name: Zm_4deg_Cold_P Parameter: Timepoint (hr) Value: 6
  misc_feature: MA Experiment 108534 PARAMETER Experiment Name: Zm_4deg_Cold_P Parameter: Tissue Value: Aerial
  misc_feature: MA Experiment ID: 108536 Result: Up-regulated in Transcription
  misc_feature: MA Experiment 108536 PARAMETER Experiment Name: Zm_Meristem_P Parameter: Age (day) Value: 8
  misc_feature: MA Experiment 108536 PARAMETER Experiment Name: Zm_Meristem_P Parameter: Organism Value: Zea mays
  misc_feature: MA Experiment 108536 PARAMETER Experiment Name: Zm_Meristem_P Parameter: Plant Line Value: 35A19
  misc_feature: MA Experiment 108536 PARAMETER Experiment Name: Zm_Meristem_P Parameter: Tissue Value: Shoot Meristem vs. Above Shoot Meristem
  misc_feature: MA Experiment ID: 108542 Result: Up-regulated in Transcription
  misc_feature: MA Experiment 108542 PARAMETER Experiment Name: Zm_150mM_NaCl_P Parameter: Age (day) Value: 8
  misc_feature: MA Experiment 108542 PARAMETER Experiment Name: Zm_150mM_NaCl_P Parameter: Organism Value: Zea mays
  misc_feature: MA Experiment 108542 PARAMETER Experiment Name: Zm_150mM_NaCl_P Parameter: Plant Line Value: 35A19
  misc_feature: MA Experiment 108542 PARAMETER Experiment Name: Zm_150mM_NaCl_P Parameter: Timepoint (hr) Value: 6
  misc_feature: MA Experiment 108542 PARAMETER Experiment Name: Zm_150mM_NaCl_P Parameter: Tissue Value: Aerial
  misc_feature: MA Experiment 108542 PARAMETER Experiment Name: Zm_150mM_NaCl_P Parameter: Treatment Value: 150mM NaCl vs. No Treatment
  misc_feature: MA Experiment ID: 108545 Result: Down-regulated in Transcription
  misc_feature: MA Experiment 108545 PARAMETER Experiment Name: Zm_Imbibed_Seeds_P Parameter: Age (day) Value: 3 vs. 2
  misc_feature: MA Experiment 108545 PARAMETER Experiment Name: Zm_Imbibed_Seeds_P Parameter: Organism Value: Zea mays
  misc_feature: MA Experiment 108545 PARAMETER Experiment Name: Zm_Imbibed_Seeds_P Parameter: Plant Line Value: 35A19
  misc_feature: MA Experiment 108545 PARAMETER Experiment Name: Zm_Imbibed_Seeds_P Parameter: Tissue Value: Aerial vs. Embryo
  misc_feature: MA Experiment ID: 108547 Result: Up-regulated in Transcription
  misc_feature: MA Experiment 108547 PARAMETER Experiment Name: Zm_Imbibed_Seeds_P Parameter: Age (day) Value: 4 vs. 2
  misc_feature: MA Experiment 108547 PARAMETER Experiment Name: Zm_Imbibed_Seeds_P Parameter: Organism Value: Zea mays
  misc_feature: MA Experiment 108547 PARAMETER Experiment Name: Zm_Imbibed_Seeds_P Parameter: Plant Line Value: 35A19
  misc_feature: MA Experiment 108547 PARAMETER Experiment Name: Zm_Imbibed_Seeds_P Parameter: Tissue Value: Aerial vs. Embryo
  misc_feature: MA Experiment ID: 108548 Result: Down-regulated in Transcription
  misc_feature: MA Experiment 108548 PARAMETER Experiment Name: Zm_20uM_KNO3_H-to-L_P Parameter: Age (day) Value: 11
  misc_feature: MA Experiment 108548 PARAMETER Experiment Name: Zm_20uM_KNO3_H-to-L_P Parameter: Organism Value: Zea mays
  misc_feature: MA Experiment 108548 PARAMETER Experiment Name: Zm_20uM_KNO3_H-to-L_P Parameter: Plant Line Value: 35A19
  misc_feature: MA Experiment 108548 PARAMETER Experiment Name: Zm_20uM_KNO3_H-to-L_P Parameter: Timepoint (hr) Value: 4
  misc_feature: MA Experiment 108548 PARAMETER Experiment Name: Zm_20uM_KNO3_H-to-L_P Parameter: Tissue Value: Roots
  misc_feature: MA Experiment 108548 PARAMETER Experiment Name: Zm_20uM_KNO3_H-to-L_P Parameter: Treatment Value: 20uM KNO3 vs. 60mM KNO3
  misc_feature: MA Experiment ID: 108689 Result: Down-regulated in Transcription
  misc_feature: MA Experiment 108689 PARAMETER Experiment Name: Zm_Drought_Roots_P Parameter: Age (day) Value: 9
  misc_feature: MA Experiment 108689 PARAMETER Experiment Name: Zm_Drought_Roots_P Parameter: Organism Value: Zea mays
  misc_feature: MA Experiment 108689 PARAMETER Experiment Name: Zm_Drought_Roots_P Parameter: Plant Line Value: 35A19
  misc_feature: MA Experiment 108689 PARAMETER Experiment Name: Zm_Drought_Roots_P Parameter: Timepoint (hr) Value: 24
  misc_feature: MA Experiment 108689 PARAMETER Experiment Name: Zm_Drought_Roots_P Parameter: Tissue Value: Roots
  misc_feature: MA Experiment 108689 PARAMETER Experiment Name: Zm_Drought_Roots_P Parameter: Treatment Value: Drought vs. No Drought
  misc_feature: MA Experiment ID: 20000477 Result: Up-regulated in Transcription
  misc_feature: MA Experiment 20000477 PARAMETER Experiment Name: Zm_5mM_SA_P Parameter: Age (day) Value: 10
  misc_feature: MA Experiment 20000477 PARAMETER Experiment Name: Zm_5mM_SA_P Parameter: Organism Value: Zea mays
  misc_feature: MA Experiment 20000477 PARAMETER Experiment Name: Zm_5mM_SA_P Parameter: Plant Line Value: 35A19
  misc_feature: MA Experiment 20000477 PARAMETER Experiment Name: Zm_5mM_SA_P Parameter: Timepoint (hr) Value: 48
  misc_feature: MA Experiment 20000477 PARAMETER Experiment Name: Zm_5mM_SA_P Parameter: Tissue Value: Aerial
  misc_feature: MA Experiment 20000477 PARAMETER Experiment Name: Zm_5mM_SA_P Parameter: Treatment Value: 5mM SA vs. No Treatment
  misc_feature: MA Experiment ID: 20000478 Result: Up-regulated in Transcription
  misc_feature: MA Experiment 20000478 PARAMETER Experiment Name: Zm_5mM_SA_P Parameter: Age (day) Value: 11
  misc_feature: MA Experiment 20000478 PARAMETER Experiment Name: Zm_5mM_SA_P Parameter: Organism Value: Zea mays
  misc_feature: MA Experiment 20000478 PARAMETER Experiment Name: Zm_5mM_SA_P Parameter: Plant Line Value: 35A19
  misc_feature: MA Experiment 20000478 PARAMETER Experiment Name: Zm_5mM_SA_P Parameter: Timepoint (hr) Value: 72
  misc_feature: MA Experiment 20000478 PARAMETER Experiment Name: Zm_5mM_SA_P Parameter: Tissue Value: Aerial
  misc_feature: MA Experiment 20000478 PARAMETER Experiment Name: Zm_5mM_SA_P Parameter: Treatment Value: 5mM SA vs. No Treatment
  misc_feature: MA Experiment ID: 20000479 Result: Up-regulated in Transcription
  misc_feature: MA Experiment 20000479 PARAMETER Experiment Name: Zm_Drought_P Parameter: Age (day) Value: 10
  misc_feature: MA Experiment 20000479 PARAMETER Experiment Name: Zm_Drought_P Parameter: Organism Value: Zea mays
  misc_feature: MA Experiment 20000479 PARAMETER Experiment Name: Zm_Drought_P Parameter: Plant Line Value: 35A19
  misc_feature: MA Experiment 20000479 PARAMETER Experiment Name: Zm_Drought_P Parameter: Timepoint (hr) Value: 48
  misc_feature: MA Experiment 20000479 PARAMETER Experiment Name: Zm_Drought_P Parameter: Tissue Value: Aerial
  misc_feature: MA Experiment 20000479 PARAMETER Experiment Name: Zm_Drought_P Parameter: Treatment Value: Drought vs. No Drought
  misc_feature: MA Experiment ID: 20000480 Result: Up-regulated in Transcription
  misc_feature: MA Experiment 20000480 PARAMETER Experiment Name: Zm_Drought_P Parameter: Age (day) Value: 11
  misc_feature: MA Experiment 20000480 PARAMETER Experiment Name: Zm_Drought_P Parameter: Organism Value: Zea mays
  misc_feature: MA Experiment 20000480 PARAMETER Experiment Name: Zm_Drought_P Parameter: Plant Line Value: 35A19
  misc_feature: MA Experiment 20000480 PARAMETER Experiment Name: Zm_Drought_P Parameter: Timepoint (hr) Value: 72
  misc_feature: MA Experiment 20000480 PARAMETER Experiment Name: Zm_Drought_P Parameter: Tissue Value: Aerial
  misc_feature: MA Experiment 20000480 PARAMETER Experiment Name: Zm_Drought_P Parameter: Treatment Value: Drought vs. No Drought
  misc_feature: MA Experiment ID: 20000532 Result: Up-regulated in Transcription
  misc_feature: MA Experiment 20000532 PARAMETER Experiment Name: Zm_0.001percent_MeJA_P Parameter: Age (day) Value: 10
  misc_feature: MA Experiment 20000532 PARAMETER Experiment Name: Zm_0.001percent_MeJA_P Parameter: Organism Value: Zea mays
  misc_feature: MA Experiment 20000532 PARAMETER Experiment Name: Zm_0.001percent_MeJA_P Parameter: Plant Line Value: 35A19
  misc_feature: MA Experiment 20000532 PARAMETER Experiment Name: Zm_0.001percent_MeJA_P Parameter: Timepoint (hr) Value: 48
  misc_feature: MA Experiment 20000532 PARAMETER Experiment Name: Zm_0.001percent_MeJA_P Parameter: Tissue Value: Aerial
  misc_feature: MA Experiment 20000532 PARAMETER Experiment Name: Zm_0.001percent_MeJA_P Parameter: Treatment Value: 0.001percent MeJA vs. No Treatment
  misc_feature: MA Experiment ID: 20000535 Result: Down-regulated in Transcription
  misc_feature: MA Experiment 20000535 PARAMETER Experiment Name: Zm_Hybrid_Seed_Dev_P Parameter: DAP Value: 30 vs. 12
  misc_feature: MA Experiment 20000535 PARAMETER Experiment Name: Zm_Hybrid_Seed_Dev_P Parameter: Organism Value: Zea mays
  misc_feature: MA Experiment 20000535 PARAMETER Experiment Name: Zm_Hybrid_Seed_Dev_P Parameter: Plant Line Value: 35A19
  misc_feature: MA Experiment 20000535 PARAMETER Experiment Name: Zm_Hybrid_Seed_Dev_P Parameter: Tissue Value: Embryo vs. Unfert Floret
  misc_feature: MA Experiment ID: 20000630 Result: Up-regulated in Transcription
  misc_feature: MA Experiment 20000630 PARAMETER Experiment Name: Zm_Herbicide-Treatments_P Parameter: Timepoint (hr) Value: 4
  misc_feature: MA Experiment 20000630 PARAMETER Experiment Name: Zm_Herbicide-Treatments_P Parameter: Tissue Value: Aerial
  misc_feature: MA Experiment 20000630 PARAMETER Experiment Name: Zm_Herbicide-Treatments_P Parameter: Treatment Value: Roundup vs. No Treatment
  misc_feature: MA Experiment ID: 20001614 Result: Up-regulated in Transcription
  misc_feature: MA Experiment 20001614 PARAMETER Experiment Name: Zm_50ppm_KNO3_L-to-H_P Parameter: Age (day) Value: 21
  misc_feature: MA Experiment 20001614 PARAMETER Experiment Name: Zm_50ppm_KNO3_L-to-H_P Parameter: Organism Value: Zea mays
  misc_feature: MA Experiment 20001614 PARAMETER Experiment Name: Zm_50ppm_KNO3_L-to-H_P Parameter: Plant Line Value: 35A19
  misc_feature: MA Experiment 20001614 PARAMETER Experiment Name: Zm_50ppm_KNO3_L-to-H_P Parameter: Timepoint (hr) Value: 48
  misc_feature: MA Experiment 20001614 PARAMETER Experiment Name: Zm_50ppm_KNO3_L-to-H_P Parameter: Tissue Value: Roots
  misc_feature: MA Experiment 20001614 PARAMETER Experiment Name: Zm_50ppm_KNO3_L-to-H_P Parameter: Treatment Value: 50ppm KNO3 vs. 50ppm KCl
cagttcaaagcagcgcctcgccaccggacgaacacacagatcgctacagcccgcatgaccaacctctccgccatggcagcgagccaatcctacgtgatccgattcgacggccacttcgacgagccgtcgccgagctccgcgggcgccgagccgccgggcccgcagccgccgttcgcagggaggatgatctcgctcgagcgggagcaccaagtcattgtcgccgccctgctgcacgtcgtctccgggtacgccacgccgccgccgcaggtcttcacgccgccgccggcagcggcgcgctgccaggtgtgcgggatggagcggtgcctcggctgcgagttcttcgccgccggggagggcgcattgggcggcggcgcggagaaggcagccgcgacaggaggcgcggcggcgctggcggcggggcaaaggaggcggaggaagaagaagaacaagtaccgcggcgtgcggcagcggccgtgggggaagtgggcggcggagatccgcgacccgcgccgcgcggtgcgcaagtggctgggcacgttcgacaccgccgaggaggccgccagggcctacgaccaggccgccatcgagttccgcggcccgcgcgccaagctcaacttcccgttccccgagcagccgccgacggggcacgacgagcccatcagcagcaacggcgacgcgagcgcggccgccaggtcgtcggacaccacgccgtcgccgtcgctctgcagcgcggacgccgaggagcgcgggcagccggagtggccgagcgccgggcaggaggcaggggaccaactgctctgggaaggcctgcaggacctgatgaggctggacgaaggcgagccctggctccatccagcctcaagcgcttggaattgaaatttgaaacgcccgcgatcagatcccagccgttcaactagtttgaaataggagcatcctagcctttcgctatgcttctttttttttcttccctccttaactcttctttttctaacctctgttgtacttatttggacaaagcagagttttg

SEQ ID NO: 4451 - protein, 304 aa, Zea mays subsp. mays
  peptide (1)..(304): Ceres Seq. ID no. 12358295
  misc_feature (46)..(281): Pfam Name: HlyD family secretion protein Pfam Description: HlyD family secretion protein
VQSSASPPDEHTDRYSPHDQPLRHGSEPILRDPIRRPLRRAVAELRGRRAAGPAAAVRREDDLARAGAPSHCRRPAARRLRVRHAAAAGLHAAAGSGALPGVRDGAVPRLRVLRRRGGRIGRRRGEGSRDRRRGGAGGGAKEAEEEEEQVPRRAAAAVGEVGGGDPRPAPRGAQVAGHVRHRRGGRQGLRPGRHRVPRPARQAQLPVPRAAADGARRAHQQQRRRERGRQVVGHHAVAVALQRGRRGARAAGVAERRAGGRGPTALGRPAGPDEAGRRRALAPSSLKRLELKFETPAIRSQPFN

SEQ ID NO: 4452 - protein, 291 aa, Zea mays subsp. mays
  peptide (1)..(291): Ceres Seq. ID no. 12358296
  misc_feature (148)..(208): Pfam Name: AP2 domain Pfam Description: AP2 domain
  misc_feature (90)..(246): Homolog of NCBI NO: 19880313 NR Description: putative EREBP-type transcription factor [Oryza
  misc_feature (115)..(241): Homolog of NCBI NO: 21593779 NR Description: AP2 domain containing protein, putative
  misc_feature (115)..(241): Homolog of NCBI NO: 15220971 NR Description: AP2 domain protein RAP2.12
  misc_feature (115)..(241): Homolog of NCBI NO: 2281649 NR Description: AP2 domain containing protein RAP2.12
  misc_feature (145)..(213): Homolog of NCBI NO: 10798644 NR Description: AP2 domain-containing transcription factor
  misc_feature (38)..(207): Homolog of NCBI NO: 33519168 NR Description: AP2 domain-containing protein AP29
  misc_feature (143)..(255): Homolog of NCBI NO: 629508 NR Description: cadmium-induced protein - Arabidopsis thaliana
  misc_feature (143)..(255): Homolog of NCBI NO: 2467088 NR Description: putative Ckc2 [Arabidopsis thaliana]
  misc_feature (143)..(255): Homolog of NCBI NO: 15228312 NR Description: AP2 domain protein RAP2.3
  misc_feature (100)..(279): Homolog of NCBI NO: 15235365 NR Description: putative protein
QFKAAPRHRTNTQIATARMTNLSAMAASQSYVIRFDGHFDEPSPSSAGAEPPGPQPPFAGRMISLEREHQVIVAALLHVVSGYATPPPQVFTPPPAAARCQVCGMERCLGCEFFAAGEGALGGGAEKAAATGGAAALAAGQRRRRKKKNKYRGVRQRPWGKWAAEIRDPRRAVRKWLGTFDTAEEAARAYDQAAIEFRGPRAKLNFPFPEQPPTGHDEPISSNGDASAAARSSDTTPSPSLCSADAEERGQPEWPSAGQEAGDQLLWEGLQDLMRLDEGEPWLHPASSAWN

SEQ ID NO: 4453 - protein, 273 aa, Zea mays subsp. mays
  peptide (1)..(273): Ceres Seq. ID no. 12358297
  misc_feature (130)..(190): Pfam Name: AP2 domain Pfam Description: AP2 domain
  misc_feature (72)..(228): Homolog of NCBI NO: 19880313 NR Description: putative EREBP-type transcription factor [Oryza
  misc_feature (97)..(223): Homolog of NCBI NO: 15220971 NR Description: AP2 domain protein RAP2.12
  misc_feature (97)..(223): Homolog of NCBI NO: 21593779 NR Description: AP2 domain containing protein, putative
  misc_feature (97)..(223): Homolog of NCBI NO: 2281649 NR Description: AP2 domain containing protein RAP2.12
  misc_feature (127)..(195): Homolog of NCBI NO: 10798644 NR Description: AP2 domain-containing transcription factor
  misc_feature (20)..(189): Homolog of NCBI NO: 33519168 NR Description: AP2 domain-containing protein AP29
  misc_feature (125)..(237): Homolog of NCBI NO: 629508 NR Description: cadmium-induced protein - Arabidopsis thaliana
  misc_feature (125)..(237): Homolog of NCBI NO: 2467088 NR Description: putative Ckc2 [Arabidopsis thaliana]
  misc_feature (125)..(237): Homolog of NCBI NO: 15228312 NR Description: AP2 domain protein RAP2.3
  misc_feature (82)..(261): Homolog of NCBI NO: 15235365 NR Description: putative protein
MTNLSAMAASQSYVIRFDGHFDEPSPSSAGAEPPGPQPPFAGRMISLEREHQVIVAALLHVVSGYATPPPQVFTPPPAAARCQVCGMERCLGCEFFAAGEGALGGGAEKAAATGGAAALAAGQRRRRKKKNKYRGVRQRPWGKWAAEIRDPRRAVRKWLGTFDTAEEAARAYDQAAIEFRGPRAKLNFPFPEQPPTGHDEPISSNGDASAAARSSDTTPSPSLCSADAEERGQPEWPSAGQEAGDQLLWEGLQDLMRLDEGEPWLHPASSAWN

SEQ ID NO: 4454 - DNA, 1389 bp, Zea mays subsp. mays
  misc_feature (1)..(1389): Ceres Seq. ID no. 13499065
  misc_feature: MA Experiment ID: 108504 Result: Down-regulated in Transcription
  misc_feature: MA Experiment 108504 PARAMETER Experiment Name: Zm_Drought_P Parameter: Age (day) Value: 8
  misc_feature: MA Experiment 108504 PARAMETER Experiment Name: Zm_Drought_P Parameter: Organism Value: Zea mays
  misc_feature: MA Experiment 108504 PARAMETER Experiment Name: Zm_Drought_P Parameter: Plant Line Value: 35A19
  misc_feature: MA Experiment 108504 PARAMETER Experiment Name: Zm_Drought_P Parameter: Timepoint (hr) Value: 12
  misc_feature: MA Experiment 108504 PARAMETER Experiment Name: Zm_Drought_P Parameter: Tissue Value: Aerial
  misc_feature: MA Experiment 108504 PARAMETER Experiment Name: Zm_Drought_P Parameter: Treatment Value: Drought vs. No Drought
  misc_feature: MA Experiment ID: 108523 Result: Down-regulated in Transcription
  misc_feature: MA Experiment 108523 PARAMETER Experiment Name: Zm_42deg_Heat_P Parameter: Age (day) Value: 8
  misc_feature: MA Experiment 108523 PARAMETER Experiment Name: Zm_42deg_Heat_P Parameter: Organism Value: Zea mays
  misc_feature: MA Experiment 108523 PARAMETER Experiment Name: Zm_42deg_Heat_P Parameter: Plant Line Value: 35A19
  misc_feature: MA Experiment 108523 PARAMETER Experiment Name: Zm_42deg_Heat_P Parameter: Temperature (deg C) Value: 42 vs. 22
  misc_feature: MA Experiment 108523 PARAMETER Experiment Name: Zm_42deg_Heat_P Parameter: Timepoint (hr) Value: 6
  misc_feature: MA Experiment 108523 PARAMETER Experiment Name: Zm_42deg_Heat_P Parameter: Tissue Value: Aerial
  misc_feature: MA Experiment ID: 108527 Result: Down-regulated in Transcription
  misc_feature: MA Experiment 108527 PARAMETER Experiment Name: Zm_5mM_NO_P Parameter: Age (day) Value: 8
  misc_feature: MA Experiment 108527 PARAMETER Experiment Name: Zm_5mM_NO_P Parameter: Organism Value: Zea mays
  misc_feature: MA Experiment 108527 PARAMETER Experiment Name: Zm_5mM_NO_P Parameter: Plant Line Value: 35A19
  misc_feature: MA Experiment 108527 PARAMETER Experiment Name: Zm_5mM_NO_P Parameter: Timepoint (hr) Value: 6
  misc_feature: MA Experiment 108527 PARAMETER Experiment Name: Zm_5mM_NO_P Parameter: Tissue Value: Aerial
  misc_feature: MA Experiment 108527 PARAMETER Experiment Name: Zm_5mM_NO_P Parameter: Treatment Value: 5mM NO vs. No Treatment
  misc_feature: MA Experiment ID: 108529 Result: Down-regulated in Transcription
  misc_feature: MA Experiment 108529 PARAMETER Experiment Name: Zm_Imbibed_Seeds_P Parameter: Age (day) Value: 5 vs. 2
  misc_feature: MA Experiment 108529 PARAMETER Experiment Name: Zm_Imbibed_Seeds_P Parameter: Organism Value: Zea mays
  misc_feature: MA Experiment 108529 PARAMETER Experiment Name: Zm_Imbibed_Seeds_P Parameter: Plant Line Value: 35A19
  misc_feature: MA Experiment 108529 PARAMETER Experiment Name: Zm_Imbibed_Seeds_P Parameter: Tissue Value: Roots vs. Embryo
  misc_feature: MA Experiment ID: 108530 Result: Down-regulated in Transcription
  misc_feature: MA Experiment 108530 PARAMETER Experiment Name: Zm_Imbibed_Seeds_P Parameter: Age (day) Value: 6 vs. 2
  misc_feature: MA Experiment 108530 PARAMETER Experiment Name: Zm_Imbibed_Seeds_P Parameter: Organism Value: Zea mays
  misc_feature: MA Experiment 108530 PARAMETER Experiment Name: Zm_Imbibed_Seeds_P Parameter: Plant Line Value: 35A19
  misc_feature: MA Experiment 108530 PARAMETER Experiment Name: Zm_Imbibed_Seeds_P Parameter: Tissue Value: Aerial vs. Embryo
  misc_feature: MA Experiment ID: 108535 Result: Up-regulated in Transcription
  misc_feature: MA Experiment 108535 PARAMETER Experiment Name: Zm_Meristem_P Parameter: Age (day) Value: 8
  misc_feature: MA Experiment 108535 PARAMETER Experiment Name: Zm_Meristem_P Parameter: Organism Value: Zea mays
  misc_feature: MA Experiment 108535 PARAMETER Experiment Name: Zm_Meristem_P Parameter: Plant Line Value: 35A19
  misc_feature: MA Experiment 108535 PARAMETER Experiment Name: Zm_Meristem_P Parameter: Tissue Value: Root Meristem vs. Above Root Meristem
  misc_feature: MA Experiment ID: 108540 Result: Down-regulated in Transcription
  misc_feature: MA Experiment 108540 PARAMETER Experiment Name: Zm_20percent_PEG_P Parameter: Age (day) Value: 8
  misc_feature: MA Experiment 108540 PARAMETER Experiment Name: Zm_20percent_PEG_P Parameter: Organism Value: Zea mays
  misc_feature: MA Experiment 108540 PARAMETER Experiment Name: Zm_20percent_PEG_P Parameter: Plant Line Value: 35A19
  misc_feature: MA Experiment 108540 PARAMETER Experiment Name: Zm_20percent_PEG_P Parameter: Timepoint (hr) Value: 6
  misc_feature: MA Experiment 108540 PARAMETER Experiment Name: Zm_20percent_PEG_P Parameter: Tissue Value: Aerial
  misc_feature: MA Experiment 108540 PARAMETER Experiment Name: Zm_20percent_PEG_P Parameter: Treatment Value: 20percent PEG vs. No Treatment
  misc_feature: MA Experiment ID: 108543 Result: Down-regulated in Transcription
  misc_feature: MA Experiment ID: 108546 Result: Down-regulated in Transcription
  misc_feature: MA Experiment 108546 PARAMETER Experiment Name: Zm_Imbibed_Seeds_P Parameter: Age (day) Value: 3 vs. 2
  misc_feature: MA Experiment 108546 PARAMETER Experiment Name: Zm_Imbibed_Seeds_P Parameter: Organism Value: Zea mays
  misc_feature: MA Experiment 108546 PARAMETER Experiment Name: Zm_Imbibed_Seeds_P Parameter: Plant Line Value: 35A19
  misc_feature: MA Experiment 108546 PARAMETER Experiment Name: Zm_Imbibed_Seeds_P Parameter: Tissue Value: Roots vs. Embryo
  misc_feature: MA Experiment ID: 20000478 Result: Down-regulated in Transcription
  misc_feature: MA Experiment 20000478 PARAMETER Experiment Name: Zm_5mM_SA_P Parameter: Age (day) Value: 11
  misc_feature: MA Experiment 20000478 PARAMETER Experiment Name: Zm_5mM_SA_P Parameter: Organism Value: Zea mays
  misc_feature: MA Experiment 20000478 PARAMETER Experiment Name: Zm_5mM_SA_P Parameter: Plant Line Value: 35A19
  misc_feature: MA Experiment 20000478 PARAMETER Experiment Name: Zm_5mM_SA_P Parameter: Timepoint (hr) Value: 72
  misc_feature: MA Experiment 20000478 PARAMETER Experiment Name: Zm_5mM_SA_P Parameter: Tissue Value: Aerial
  misc_feature: MA Experiment 20000478 PARAMETER Experiment Name: Zm_5mM_SA_P Parameter: Treatment Value: 5mM SA vs. No Treatment
  misc_feature: MA Experiment ID: 20000487 Result: Down-regulated in Transcription
  misc_feature: MA Experiment 20000487 PARAMETER Experiment Name: Zm_50mM_NH4NO3_L_to_H_P Parameter: Organism Value: Zea mays
  misc_feature: MA Experiment 20000487 PARAMETER Experiment Name: Zm_50mM_NH4NO3_L_to_H_P Parameter: Timepoint (hr) Value: 4
  misc_feature: MA Experiment 20000487 PARAMETER Experiment Name: Zm_50mM_NH4NO3_L_to_H_P Parameter: Tissue Value: Leaves
  misc_feature: MA Experiment 20000487 PARAMETER Experiment Name: Zm_50mM_NH4NO3_L_to_H_P Parameter: Treatment Value: 50mM NH4NO3 vs. 100mM Mannitol
  misc_feature: MA Experiment ID: 20000488 Result: Down-regulated in Transcription
  misc_feature: MA Experiment 20000488 PARAMETER Experiment Name: Zm_50mM_NH4NO3_L_to_H_P Parameter: Organism Value: Zea mays
  misc_feature: MA Experiment 20000488 PARAMETER Experiment Name: Zm_50mM_NH4NO3_L_to_H_P Parameter: Timepoint (hr) Value: 8
  misc_feature: MA Experiment 20000488 PARAMETER Experiment Name: Zm_50mM_NH4NO3_L_to_H_P Parameter: Tissue Value: Leaves
  misc_feature: MA Experiment 20000488 PARAMETER Experiment Name: Zm_50mM_NH4NO3_L_to_H_P Parameter: Treatment Value: 50mM NH4NO3 vs. 100mM Mannitol
  misc_feature: MA Experiment ID: 20000535 Result: Up-regulated in Transcription
  misc_feature: MA Experiment 20000535 PARAMETER Experiment Name: Zm_Hybrid_Seed_Dev_P Parameter: DAP Value: 30 vs. 12
  misc_feature: MA Experiment 20000535 PARAMETER Experiment Name: Zm_Hybrid_Seed_Dev_P Parameter: Organism Value: Zea mays
  misc_feature: MA Experiment 20000535 PARAMETER Experiment Name: Zm_Hybrid_Seed_Dev_P Parameter: Plant Line Value: 35A19
  misc_feature: MA Experiment 20000535 PARAMETER Experiment Name: Zm_Hybrid_Seed_Dev_P Parameter: Tissue Value: Embryo vs. Unfert Floret
  misc_feature: MA Experiment ID: 20000626 Result: Down-regulated in Transcription
  misc_feature: MA Experiment 20000626 PARAMETER Experiment Name: Zm_Herbicide-Treatments_P Parameter: Timepoint (hr) Value: 12
  misc_feature: MA Experiment 20000626 PARAMETER Experiment Name: Zm_Herbicide-Treatments_P Parameter: Tissue Value: Aerial
  misc_feature: MA Experiment 20000626 PARAMETER Experiment Name: Zm_Herbicide-Treatments_P Parameter: Treatment Value: Roundup vs. No Treatment
atatatccacgccaaggtccggcaccttttctcctcgcgccagagccacgcacgctagtgtcagtggcacgcaggcagccgcgcgcaccgaggggagaccagagctagcggcgaggccaagggcaagggcaagggcgcggacggcaatggcgagagctggaggcggcggtccgttcttcccggtccgcggcgcggcgctggtggtcgtgctgctaggcatcgtcgcgggcgcggcgagggcgcagctgcggctgaactactacggcagctcgtgccccagcgcggagtccacggtgcgctccgtcatctcgcagcgcctccagcagagcttcgccgtggggcccggcacgctccgcctcttcttccacgactgcttcgtcaggggatgcgacgcgtcggtgatgctgatggcgccgaacggggacgacgagagccacagcggcgcggacgccacgctgtcgtccggacgccgtggacgccatcaacaaggcgaaggcggccgtggaggcgctccccgggtgcgccggcaaggtctcgtgcgcggacatcctcgccatggccgcacgtgacgtcgtctccctgctgggcgggccgagctacggcgtggagctggggcggctggacggcaagacgttcaacagggccatcgtgaagcacgtcctcccgggccccggcttcaacctggaccagctcaacgccctcttcgcgcagaacggcctcacgcagacggacatgatcgcgctctcaggcgcgcacacgatcggggtgacgcactgcgacaagttcgtgcggcggatctacacgttcaagcagcggctggcgtggaacccgccgatgaacctggacttcctgcgctcgctgcggcgggtgtgccccctcagctacagccccacggcgttcgccatgctggacgtcaccacgcccagggtcttcgacaacgcctacttcaacaacctccgctacaacaagggcctgctcgcctccgaccaggtgctcttcaccgaccgccgctcccgacccaccgtcaacctcttcgccgccaacgccaccgccttccacgaggcattcgtcgccgccatggccaagctcggcaggatcggcctcaagaccggcgccgacggcgagatacgccgcgtctgcaccgccgtcaactaagcctgcattggctgcttgctgcttgcgtgcgtgggtttcacttcttctttctcttgtttatatacgtacgtttgtcggatggattttgttggtagccatgagatgacatccttgctctgagctagcggacctgccccgactggatgatagagattgatccagatgttcttctagtagattctaattctttatggatgtttcccattgacacgcggttacgcgctcttcaaccgc

SEQ ID NO: 4455 - protein, 199 aa, Zea mays subsp. mays
  peptide (1)..(199): Ceres Seq. ID no. 13499066
  misc_feature (1)..(98): Pfam Name: Peroxidase Pfam Description: Peroxidase
  misc_feature (1)..(199): Homolog of NCBI NO: 21554605 NR Description: peroxidase, prxr2 [Arabidopsis thaliana]
  misc_feature (1)..(199): Homolog of NCBI NO: 15235600 NR Description: peroxidase, putative [Arabidopsis thaliana]
  misc_feature (1)..(199): Homolog of NCBI NO: 15235597 NR Description: peroxidase, putative [Arabidopsis thaliana]
  misc_feature (1)..(199): Homolog of NCBI NO: 28629828 NR Description: peroxidase 1 [Artemisia annua]
  misc_feature (1)..(198): Homolog of NCBI NO: 4138647 NR Description: peroxidase [Trifolium repens]
  misc_feature (1)..(199): Homolog of NCBI NO: 15234648 NR Description: peroxidase, putative [Arabidopsis thaliana]
  misc_feature (1)..(199): Homolog of NCBI NO: 15224266 NR Description: peroxidase, putative [Arabidopsis thaliana]
  misc_feature (1)..(199): Homolog of NCBI NO: 1620369 NR Description: peroxidase ATP22a [Arabidopsis thaliana]
  misc_feature (1)..(98): Homolog of NCBI NO: 23343905 NR Description: seed peroxidase 2 [Setaria faberi]
  misc_feature (1)..(199): Homolog of NCBI NO: 39545735 NR Description: OSJNBa0071I13.13 [Oryza sativa (japonica
MAARDVVSLLGGPSYGVELGRLDGKTFNRAIVKHVLPGPGFNLDQLNALFAQNGLTQTDMIALSGAHTIGVTHCDKFVRRIYTFKQRLAWNPPMNLDFLRSLRRVCPLSYSPTAFAMLDVTTPRVFDNAYFNNLRYNKGLLASDQVLFTDRRSRPTVNLFAANATAFHEAFVAAMAKLGRIGLKTGADGEIRRVCTAVN

SEQ ID NO: 4456 - protein, 188 aa, Zea mays subsp. mays
  peptide (1)..(188): Ceres Seq. ID no. 13499067
  misc_feature (98)..(149): Pfam Name: Peroxidase Pfam Description: Peroxidase
  misc_feature (66)..(141): Homolog of NCBI NO: 21554605 NR Description: peroxidase, prxr2 [Arabidopsis thaliana]
  misc_feature (66)..(139): Homolog of NCBI NO: 15235600 NR Description: peroxidase, putative [Arabidopsis thaliana]
  misc_feature (66)..(141): Homolog of NCBI NO: 15235597 NR Description: peroxidase, putative [Arabidopsis thaliana]
  misc_feature (66)..(145): Homolog of NCBI NO: 28629828 NR Description: peroxidase 1 [Artemisia annua]
  misc_feature (67)..(149): Homolog of NCBI NO: 4138647 NR Description: peroxidase [Trifolium repens]
  misc_feature (70)..(142): Homolog of NCBI NO: 15234648 NR Description: peroxidase, putative [Arabidopsis thaliana]
  misc_feature (65)..(147): Homolog of NCBI NO: 15224266 NR Description: peroxidase, putative [Arabidopsis thaliana]
  misc_feature (65)..(147): Homolog of NCBI NO: 1620369 NR Description: peroxidase ATP22a [Arabidopsis thaliana]
  misc_feature (67)..(149): Homolog of NCBI NO: 23343905 NR Description: seed peroxidase 2 [Setaria faberi]
  misc_feature (49)..(153): Homolog of NCBI NO: 39545735 NR Description: OSJNBa0071I13.13 [Oryza sativa (japonica
ISTPRSGTFSPRARATHASVSGTQAAARTEGRPELAARPRARARARTAMARAGGGGPFFPVRGAALVVVLLGIVAGAARAQLRLNYYGSSCPSAESTVRSVISQRLQQSFAVGPGTLRLFFHDCFVRGCDASVMLMAPNGDDESHSGADATLSSGRRGRHQQGEGGRGGAPRVRRQGLVRGHPRHGRT

SEQ ID NO: 4457 - protein, 140 aa, Zea mays subsp. mays
  peptide (1)..(140): Ceres Seq. ID no. 13499068
  misc_feature (1)..(140): Homolog of NCBI NO: 21554605 NR Description: peroxidase, prxr2 [Arabidopsis thaliana]
  misc_feature (1)..(140): Homolog of NCBI NO: 15235600 NR Description: peroxidase, putative [Arabidopsis thaliana]
  misc_feature (1)..(140): Homolog of NCBI NO: 15235597 NR Description: peroxidase, putative [Arabidopsis thaliana]
  misc_feature (1)..(140): Homolog of NCBI NO: 28629828 NR Description: peroxidase 1 [Artemisia annua]
  misc_feature (1)..(139): Homolog of NCBI NO: 4138647 NR Description: peroxidase [Trifolium repens]
  misc_feature (1)..(140): Homolog of NCBI NO: 15234648 NR Description: peroxidase, putative [Arabidopsis thaliana]
  misc_feature (1)..(140): Homolog of NCBI NO: 15224266 NR Description: peroxidase, putative [Arabidopsis thaliana]
  misc_feature (1)..(140): Homolog of NCBI NO: 1620369 NR Description: peroxidase ATP22a [Arabidopsis thaliana]
  misc_feature (1)..(39): Homolog of NCBI NO: 23343905 NR Description: seed peroxidase 2 [Setaria faberi]
  misc_feature (1)..(140): Homolog of NCBI NO: 39545735 NR Description: OSJNBa0071I13.13 [Oryza sativa (japonica
MIALSGAHTIGVTHCDKFVRRIYTFKQRLAWNPPMNLDFLRSLRRVCPLSYSPTAFAMLDVTTPRVFDNAYFNNLRYNKGLLASDQVLFTDRRSRPTVNLFAANATAFHEAFVAAMAKLGRIGLKTGADGEIRRVCTAVN

SEQ ID NO: 4458 - DNA, 1333 bp, Zea mays subsp. mays
  misc_feature (1)..(1333): Ceres Seq. ID no. 12566545
  misc_feature: MA Experiment ID: 108504 Result: Up-regulated in Transcription
  misc_feature: MA Experiment 108504 PARAMETER Experiment Name: Zm_Drought_P Parameter: Age (day) Value: 8
  misc_feature: MA Experiment 108504 PARAMETER Experiment Name: Zm_Drought_P Parameter: Organism Value: Zea mays
  misc_feature: MA Experiment 108504 PARAMETER Experiment Name: Zm_Drought_P Parameter: Plant Line Value: 35A19
  misc_feature: MA Experiment 108504 PARAMETER Experiment Name: Zm_Drought_P Parameter: Timepoint (hr) Value: 12
  misc_feature: MA Experiment 108504 PARAMETER Experiment Name: Zm_Drought_P Parameter: Tissue Value: Aerial
  misc_feature: MA Experiment 108504 PARAMETER Experiment Name: Zm_Drought_P Parameter: Treatment Value: Drought vs. No Drought
  misc_feature: MA Experiment ID: 108522 Result: Up-regulated in Transcription
  misc_feature: MA Experiment 108522 PARAMETER Experiment Name: Zm_42deg_Heat_P Parameter: Age (day) Value: 8
  misc_feature: MA Experiment 108522 PARAMETER Experiment Name: Zm_42deg_Heat_P Parameter: Organism Value: Zea mays
  misc_feature: MA Experiment 108522 PARAMETER Experiment Name: Zm_42deg_Heat_P Parameter: Plant Line Value: 35A19
  misc_feature: MA Experiment 108522 PARAMETER Experiment Name: Zm_42deg_Heat_P Parameter: Temperature (deg C) Value: 42 vs. 22
  misc_feature: MA Experiment 108522 PARAMETER Experiment Name: Zm_42deg_Heat_P Parameter: Timepoint (hr) Value: 1
  misc_feature: MA Experiment 108522 PARAMETER Experiment Name: Zm_42deg_Heat_P Parameter: Tissue Value: Aerial
  misc_feature: MA Experiment ID: 108523 Result: Up-regulated in Transcription
  misc_feature: MA Experiment 108523 PARAMETER Experiment Name: Zm_42deg_Heat_P Parameter: Age (day) Value: 8
  misc_feature: MA Experiment 108523 PARAMETER Experiment Name: Zm_42deg_Heat_P Parameter: Organism Value: Zea mays
  misc_feature: MA Experiment 108523 PARAMETER Experiment Name: Zm_42deg_Heat_P Parameter: Plant Line Value: 35A19
  misc_feature: MA Experiment 108523 PARAMETER Experiment Name: Zm_42deg_Heat_P Parameter: Temperature (deg C) Value: 42 vs. 22
  misc_feature: MA Experiment 108523 PARAMETER Experiment Name: Zm_42deg_Heat_P Parameter: Timepoint (hr) Value: 6
  misc_feature: MA Experiment 108523 PARAMETER Experiment Name: Zm_42deg_Heat_P Parameter: Tissue Value: Aerial
  misc_feature: MA Experiment ID: 108527 Result: Up-regulated in Transcription
  misc_feature: MA Experiment 108527 PARAMETER Experiment Name: Zm_5mM_NO_P Parameter: Age (day) Value: 8
  misc_feature: MA Experiment 108527 PARAMETER Experiment Name: Zm_5mM_NO_P Parameter: Organism Value: Zea mays
  misc_feature: MA Experiment 108527 PARAMETER Experiment Name: Zm_5mM_NO_P Parameter: Plant Line Value: 35A19
  misc_feature: MA Experiment 108527 PARAMETER Experiment Name: Zm_5mM_NO_P Parameter: Timepoint (hr) Value: 6
  misc_feature: MA Experiment 108527 PARAMETER Experiment Name: Zm_5mM_NO_P Parameter: Tissue Value: Aerial
  misc_feature: MA Experiment 108527 PARAMETER Experiment Name: Zm_5mM_NO_P Parameter: Treatment Value: 5mM NO vs. No Treatment
  misc_feature: MA Experiment ID: 108534 Result: Up-regulated in Transcription
  misc_feature: MA Experiment 108534 PARAMETER Experiment Name: Zm_4deg_Cold_P Parameter: Age (hr) Value: 8
  misc_feature: MA Experiment 108534 PARAMETER Experiment Name: Zm_4deg_Cold_P Parameter: Organism Value: Zea mays
  misc_feature: MA Experiment 108534 PARAMETER Experiment Name: Zm_4deg_Cold_P Parameter: Plant Line Value: 35A19
  misc_feature: MA Experiment 108534 PARAMETER Experiment Name: Zm_4deg_Cold_P Parameter: Temperature (deg C) Value: 4 vs. 22
  misc_feature: MA Experiment 108534 PARAMETER Experiment Name: Zm_4deg_Cold_P Parameter: Timepoint (hr) Value: 6
  misc_feature: MA Experiment 108534 PARAMETER Experiment Name: Zm_4deg_Cold_P Parameter: Tissue Value: Aerial
  misc_feature: MA Experiment ID: 108540 Result: Up-regulated in Transcription
  misc_feature: MA Experiment 108540 PARAMETER Experiment Name: Zm_20percent_PEG_P Parameter: Age (day) Value: 8
  misc_feature: MA Experiment 108540 PARAMETER Experiment Name: Zm_20percent_PEG_P Parameter: Organism Value: Zea mays
  misc_feature: MA Experiment 108540 PARAMETER Experiment Name: Zm_20percent_PEG_P Parameter: Plant Line Value: 35A19
  misc_feature: MA Experiment 108540 PARAMETER Experiment Name: Zm_20percent_PEG_P Parameter: Timepoint (hr) Value: 6
  misc_feature: MA Experiment 108540 PARAMETER Experiment Name: Zm_20percent_PEG_P Parameter: Tissue Value: Aerial
  misc_feature: MA Experiment 108540 PARAMETER Experiment Name: Zm_20percent_PEG_P Parameter: Treatment Value: 20percent PEG vs. No Treatment
  misc_feature: MA Experiment ID: 108545 Result: Down-regulated in Transcription
  misc_feature: MA Experiment 108545 PARAMETER Experiment Name: Zm_Imbibed_Seeds_P Parameter: Age (day) Value: 3 vs. 2
  misc_feature: MA Experiment 108545 PARAMETER Experiment Name: Zm_Imbibed_Seeds_P Parameter: Organism Value: Zea mays
  misc_feature: MA Experiment 108545 PARAMETER Experiment Name: Zm_Imbibed_Seeds_P Parameter: Plant Line Value: 35A19
  misc_feature: MA Experiment 108545 PARAMETER Experiment Name: Zm_Imbibed_Seeds_P Parameter: Tissue Value: Aerial vs. Embryo
  misc_feature: MA Experiment ID: 108556 Result: Up-regulated in Transcription
  misc_feature: MA Experiment 108556 PARAMETER Experiment Name: Zm_Drought_P Parameter: Age (day) Value: 9
  misc_feature: MA Experiment 108556 PARAMETER Experiment Name: Zm_Drought_P Parameter: Organism Value: Zea mays
  misc_feature: MA Experiment 108556 PARAMETER Experiment Name: Zm_Drought_P Parameter: Plant Line Value: 35A19
  misc_feature: MA Experiment 108556 PARAMETER Experiment Name: Zm_Drought_P Parameter: Timepoint (hr) Value: 24
  misc_feature: MA Experiment 108556 PARAMETER Experiment Name: Zm_Drought_P Parameter: Tissue Value: Aerial
  misc_feature: MA Experiment 108556 PARAMETER Experiment Name: Zm_Drought_P Parameter: Treatment Value: Drought vs. No Drought
  misc_feature: MA Experiment ID: 108559 Result: Up-regulated in Transcription
  misc_feature: MA Experiment 108559 PARAMETER Experiment Name: Zm_5mM_NO_P Parameter: Age (day) Value: 8
  misc_feature: MA Experiment 108559 PARAMETER Experiment Name: Zm_5mM_NO_P Parameter: Organism Value: Zea mays
  misc_feature: MA Experiment 108559 PARAMETER Experiment Name: Zm_5mM_NO_P Parameter: Plant Line Value: 35A19
  misc_feature: MA Experiment 108559 PARAMETER Experiment Name: Zm_5mM_NO_P Parameter: Timepoint (hr) Value: 12
  misc_feature: MA Experiment 108559 PARAMETER Experiment Name: Zm_5mM_NO_P Parameter: Tissue Value: Aerial
  misc_feature: MA Experiment 108559 PARAMETER Experiment Name: Zm_5mM_NO_P Parameter: Treatment Value: 5mM NO vs. No Treatment
  misc_feature: MA Experiment ID: 108597 Result: Up-regulated in Transcription
  misc_feature: MA Experiment 108597 PARAMETER Experiment Name: Zm_100uM_ABA_P Parameter: Age (day) Value: 9
  misc_feature: MA Experiment 108597 PARAMETER Experiment Name: Zm_100uM_ABA_P Parameter: Organism Value: Zea mays
  misc_feature: MA Experiment 108597 PARAMETER Experiment Name: Zm_100uM_ABA_P Parameter: Plant Line Value: 35A19
  misc_feature: MA Experiment 108597 PARAMETER Experiment Name: Zm_100uM_ABA_P Parameter: Timepoint (hr) Value: 24
  misc_feature: MA Experiment 108597 PARAMETER Experiment Name: Zm_100uM_ABA_P Parameter: Tissue Value: Aerial
  misc_feature: MA Experiment 108597 PARAMETER Experiment Name: Zm_100uM_ABA_P Parameter: Treatment Value: 100uM ABA vs. No Treatment
  misc_feature: MA Experiment ID: 108688 Result: Down-regulated in Transcription
  misc_feature: MA Experiment 108688 PARAMETER Experiment Name: Zm_Embryos-Flowers__P Parameter: Tissue Value: Immature Flowers vs. Aerial+
  misc_feature: MA Experiment ID: 20000478 Result: Up-regulated in Transcription
  misc_feature: MA Experiment 20000478 PARAMETER Experiment Name: Zm_5mM_SA_P Parameter: Age (day) Value: 11
  misc_feature: MA Experiment 20000478 PARAMETER Experiment Name: Zm_5mM_SA_P Parameter: Organism Value: Zea mays
  misc_feature: MA Experiment 20000478 PARAMETER Experiment Name: Zm_5mM_SA_P Parameter: Plant Line Value: 35A19
  misc_feature: MA Experiment 20000478 PARAMETER Experiment Name: Zm_5mM_SA_P Parameter: Timepoint (hr) Value: 72
  misc_feature: MA Experiment 20000478 PARAMETER Experiment Name: Zm_5mM_SA_P Parameter: Tissue Value: Aerial
  misc_feature: MA Experiment 20000478 PARAMETER Experiment Name: Zm_5mM_SA_P Parameter: Treatment Value: 5mM SA vs. No Treatment
  misc_feature: MA Experiment ID: 20000479 Result: Up-regulated in Transcription
  misc_feature: MA Experiment 20000479 PARAMETER Experiment Name: Zm_Drought_P Parameter: Age (day) Value: 10
  misc_feature: MA Experiment 20000479 PARAMETER Experiment Name: Zm_Drought_P Parameter: Organism Value: Zea mays
  misc_feature: MA Experiment 20000479 PARAMETER Experiment Name: Zm_Drought_P Parameter: Plant Line Value: 35A19
  misc_feature: MA Experiment 20000479 PARAMETER Experiment Name: Zm_Drought_P Parameter: Timepoint (hr) Value: 48
  misc_feature: MA Experiment 20000479 PARAMETER Experiment Name: Zm_Drought_P Parameter: Tissue Value: Aerial
  misc_feature: MA Experiment 20000479 PARAMETER Experiment Name: Zm_Drought_P Parameter: Treatment Value: Drought vs. No Drought
  misc_feature: MA Experiment ID: 20000480 Result: Up-regulated in Transcription
  misc_feature: MA Experiment 20000480 PARAMETER Experiment Name: Zm_Drought_P Parameter: Age (day) Value: 11
  misc_feature: MA Experiment 20000480 PARAMETER Experiment Name: Zm_Drought_P Parameter: Organism Value: Zea mays
  misc_feature: MA Experiment 20000480 PARAMETER Experiment Name: Zm_Drought_P Parameter: Plant Line Value: 35A19
  misc_feature: MA Experiment 20000480 PARAMETER Experiment Name: Zm_Drought_P Parameter: Timepoint (hr) Value: 72
  misc_feature: MA Experiment 20000480 PARAMETER Experiment Name: Zm_Drought_P Parameter: Tissue Value: Aerial
  misc_feature: MA Experiment 20000480 PARAMETER Experiment Name: Zm_Drought_P Parameter: Treatment Value: Drought vs. No Drought
  misc_feature: MA Experiment ID: 20000535 Result: Up-regulated in Transcription
  misc_feature: MA Experiment 20000535 PARAMETER Experiment Name: Zm_Hybrid_Seed_Dev_P Parameter: DAP Value: 30 vs. 12
  misc_feature: MA Experiment 20000535 PARAMETER Experiment Name: Zm_Hybrid_Seed_Dev_P Parameter: Organism Value: Zea mays
  misc_feature: MA Experiment 20000535 PARAMETER Experiment Name: Zm_Hybrid_Seed_Dev_P Parameter: Plant Line Value: 35A19
  misc_feature: MA Experiment 20000535 PARAMETER Experiment Name: Zm_Hybrid_Seed_Dev_P Parameter: Tissue Value: Embryo vs. Unfert Floret
acgacacgtcattgccgtggcccagcgctagtttccagaagcagccgcgagcttccaccgccttcttcccgtgcattttctcgagcgacggagcgatccgttcgggccgtccaccacagcgagagagagcggcagaggcgcagagcgcaaccgagcgagagagagaggacggcgacggcggagatgatggggtggggagaggaggtggtggctctgtccctgcgaggctacggctatggcaacgaggaggacgaccggccggagaagccgcggcggtacggggtgacggagatgcggagccccttctactccttccgccccgcaaaccaggcgctccaggaaatattggattctcttagtccattcgttgatggtttgaagttctctggcggatgccatagtttgatgggaaaggagttggttagagagatcactgatctagcacacaggcatgacatttatgtgagcacaggtgattgggcagagcatttgctgcgccaaggaccctcttctttcaagcaatatgtagaggaatgcaaggccttagggtttgacacaattgagctgaatgctgggtctctcaacctccctgaagaggctctgttgagactagtccgcctcatcaagagtagtggtttaagggcaaagccaatgttttcggtgaagtttgacagttctgatattcctgcgtctggtgatagggcctttggggcttacatagctccagtcaaagggaagacctcagaaagagttgaagatgttgacctgctgattaggagggcagagagatgcttggaagcaggcgctgatatgatcatgatcgatgctgatgatgtttgccagcgtgctgaatctctgaggacagacatcatcgccaagattgtaggccggctcgggcttgataaaaccatgtttgaagcttccaactccaacacctcggagtggttcgtcagacgttatggcccaagggtaaatctctttgttgaacactctgacgtgatgaatctggagcgcctccggggcttcaacatgcgcagaagcaactcggcctcccgttttgcctcgccgttcttcctgatctaatgggctaatggccattccccttcctgagatgtgtaagatacttctacatgttctcaccctcgcagagcttgttatggcctagagatgtaaccgcctttgttaatgcctcgatgtagcccccagcgagcagcgcatagcacctgttatgttgtcagcgtcgctactgataatcggttctgttggtcaatgctactataataatcggttgtggtgcaagtaatgtgaatagtgtaagagtgttttgtgtttc

SEQ ID NO: 4459 - protein, 360 aa, Zea mays subsp. mays
  peptide (1)..(360): Ceres Seq. ID no. 12566546
  misc_feature (82)..(341): Pfam Name: (2R)-phospho-3-sulfolactate synthase (ComA) Pfam Description: (2R)-phospho-3-sulfolactate synthase (ComA)
  misc_feature (87)..(340): Homolog of NCBI NO: 29655237 NR Description: hypothetical protein [Coxiella burnetii RSA 493]
  misc_feature (46)..(340): Homolog of NCBI NO: 40745438 NR Description: hypothetical protein AN1464.2 [Aspergillus
  misc_feature (86)..(340): Homolog of NCBI NO: 19553737 NR Description: hypothetical protein [Corynebacterium glutamicum
  misc_feature (82)..(360): Homolog of NCBI NO: 7487784 NR Description: hypothetical protein T6K22.50 - Arabidopsis
  misc_feature (82)..(359): Homolog of NCBI NO: 30685384 NR Description: expressed protein [Arabidopsis thaliana]
TTRHCRGPALVSRSSRELPPPSSRAFSRATERSVRAVHHSERERQRRRAQPSERERTATAEMMGWGEEVVALSLRGYGYGNEEDDRPEKPRRYGVTEMRSPFYSFRPANQALQEILDSLSPFVDGLKFSGGCHSLMGKELVREITDLAHRHDIYVSTGDWAEHLLRQGPSSFKQYVEECKALGFDTIELNAGSLNLPEEALLRLVRLIKSSGLRAKPMFSVKFDSSDIPASGDRAFGAYIAPVKGKTSERVEDVDLLIRRAERCLEAGADMIMIDADDVCQRAESLRTDIIAKIVGRLGLDKTMFEASNSNTSEWFVRRYGPRVNLFVEHSDVMNLERLRGFNMRRSNSASRFASPFFLI

SEQ ID NO: 4460 - protein, 299 aa, Zea mays subsp. mays
  peptide (1)..(299): Ceres Seq. ID no. 12566547
  misc_feature (21)..(280): Pfam Name: (2R)-phospho-3-sulfolactate synthase (ComA) Pfam Description: (2R)-phospho-3-sulfolactate synthase (ComA)
  misc_feature (26)..(279): Homolog of NCBI NO: 29655237 NR Description: hypothetical protein [Coxiella burnetii RSA 493]
  misc_feature (1)..(279): Homolog of NCBI NO: 40745438 NR Description: hypothetical protein AN1464.2 [Aspergillus
  misc_feature (25)..(279): Homolog of NCBI NO: 19553737 NR Description: hypothetical protein [Corynebacterium glutamicum
  misc_feature (21)..(299): Homolog of NCBI NO: 7487784 NR Description: hypothetical protein T6K22.50 - Arabidopsis
  misc_feature (21)..(298): Homolog of NCBI NO: 30685384 NR Description: expressed protein [Arabidopsis thaliana]
MMGWGEEVVALSLRGYGYGNEEDDRPEKPRRYGVTEMRSPFYSFRPANQALQEILDSLSPFVDGLKFSGGCHSLMGKELVREITDLAHRHDIYVSTGDWAEHLLRQGPSSFKQYVEECKALGFDTIELNAGSLNLPEEALLRLVRLIKSSGLRAKPMFSVKFDSSDIPASGDRAFGAYIAPVKGKTSERVEDVDLLIRRAERCLEAGADMIMIDADDVCQRAESLRTDIIAKIVGRLGLDKTMFEASNSNTSEWFVRRYGPRVNLFVEHSDVMNLERLRGFNMRRSNSASRFASPFFLI

SEQ ID NO: 4461 - protein, 298 aa, Zea mays subsp. mays
  peptide (1)..(298): Ceres Seq. ID no. 12566548
  misc_feature (20)..(279): Pfam Name: (2R)-phospho-3-sulfolactate synthase (ComA) Pfam Description: (2R)-phospho-3-sulfolactate synthase (ComA)
  misc_feature (20)..(298): Homolog of NCBI NO: 7487784 NR Description: hypothetical protein T6K22.50 - Arabidopsis
  misc_feature (25)..(278): Homolog of NCBI NO: 29655237 NR Description: hypothetical protein [Coxiella burnetii RSA 493]
  misc_feature (24)..(278): Homolog of NCBI NO: 19553737 NR Description: hypothetical protein [Corynebacterium glutamicum
  misc_feature (1)..(278): Homolog of NCBI NO: 40745438 NR Description: hypothetical protein AN1464.2 [Aspergillus
  misc_feature (20)..(297): Homolog of NCBI NO: 30685384 NR Description: expressed protein [Arabidopsis thaliana]
MGWGEEVVALSLRGYGYGNEEDDRPEKPRRYGVTEMRSPFYSFRPANQALQEILDSLSPFVDGLKFSGGCHSLMGKELVREITDLAHRHDIYVSTGDWAEHLLRQGPSSFKQYVEECKALGFDTIELNAGSLNLPEEALLRLVRLIKSSGLRAKPMFSVKFDSSDIPASGDRAFGAYIAPVKGKTSERVEDVDLLIRRAERCLEAGADMIMIDADDVCQRAESLRTDIIAKIVGRLGLDKTMFEASNSNTSEWFVRRYGPRVNLFVEHSDVMNLERLRGFNMRRSNSASRFASPFFLI

SEQ ID NO: 4462 - DNA, 1430 bp, Zea mays subsp. mays
  misc_feature (1)..(1430): Ceres Seq. ID no. 12386925
  misc_feature: MA Experiment ID: 20000488 Result: Down-regulated in Transcription
  misc_feature: MA Experiment 20000488 PARAMETER Experiment Name: Zm_50mM_NH4NO3_L_to_H_P Parameter: Organism Value: Zea mays
  misc_feature: MA Experiment 20000488 PARAMETER Experiment Name: Zm_50mM_NH4NO3_L_to_H_P Parameter: Timepoint (hr) Value: 8
  misc_feature: MA Experiment 20000488 PARAMETER Experiment Name: Zm_50mM_NH4NO3_L_to_H_P Parameter: Tissue Value: Leaves
  misc_feature: MA Experiment 20000488 PARAMETER Experiment Name: Zm_50mM_NH4NO3_L_to_H_P Parameter: Treatment Value: 50mM NH4NO3 vs. 100mM Mannitol
gctctaaaaagtccaactccaaacctagactagaggcccctcaccgaggcgacgacgcacgcagccgagcgccactccgccgccgccgcctcctcctcgtccccgtcccgcgccgcaacggcctcccccaccctgcgcccgccggccgcccctcgacgggtcgagcggagcggggaacccatccgtccggccgttggtcgctctcgctcgtctggtgttggttgtaatgagaagctggacctgttaggccgaagagttctcgttgcaagtctgtgcctcagcgatgggttcaggcaacttgatcgtgaagaaggtggtaaagcacagctcctttgatctggacatacagcttgataagagttggatggaggatgttacctgcccgatctgccttgattaccctcacaatgcagtgctactgaggtgcacgtcttatgagaagggatgcaggccgtttgtttgcgatacagaccagacccgctcaaactgtcttgagaggtttaaatctgcatatgaactgccttccaatgtgaaagtttcatctttagccgtgcctcctcttgatagcattattcatattgtgccgtctaacgcaaacaaccgccccagctgccctttgtgtagaggtgatgttattgggtgggttgttattggtgaggctcggctgcatcttaatcagaagaaaaggtgctgtgaagaggattgctgctcgtttgttggcaacttcaatgagcttcagaagcacacgcaacaaaagcatcctgattcacgcccttcagagatcgatcctgctaggcaagttgattgggagaatttccagcaatcttctgatatcgtagatgtcttgagcacaatacatgcacaagttccaaacgggattgttctgggagactatgtgattgagtatggggatgatgacactggtgaggactatgaagttttccgcagggtcaggacgaactggtggtcatgtattttctgcagggcgttttcaagatcttcaagaagtcgtagaagatccagagcaagggaaagaataggcagtggaaggaggaatggcaaccaggttaatctagaaaattttaacctcgtggttccgacacaacctgttgaattaagggaaattaggtttgatgaaattgatgatgaatacatagtcacaggggccattcctagtatcgcagcaccgggaagaatggctagtttccattacagggatacaagatatggacgttgatgcatagggtctgcagtaaaaaaaggaatagatgttatgcaatttaccgatcaacgtaacgttgtaactccgctcatttggattccttccacctgccctcggtaggtgctgccgcagttcaaacttatctgtgcataaaaagtagcaacagaacctcgctgttcgtttgaatcaggcctcgtcattctagttc

SEQ ID NO: 4463 - protein, 317 aa, Zea mays subsp. mays
  peptide (1)..(317): Ceres Seq. ID no. 12386926
  misc_feature (13)..(109): Homolog of NCBI NO: 38346521 NR Description: OSJNBa0027H09.16 [Oryza sativa (japonica
  misc_feature (106)..(210): Homolog of NCBI NO: 38346521 NR Description: OSJNBa0027H09.16 [Oryza sativa (japonica
  misc_feature (11)..(82): Homolog of NCBI NO: 15230170 NR Description: unknown protein
  misc_feature (110)..(215): Homolog of NCBI NO: 15230170 NR Description: unknown protein
  misc_feature (25)..(77): Homolog of NCBI NO: 30699285 NR Description: expressed protein [Arabidopsis thaliana]
  misc_feature (25)..(77): Homolog of NCBI NO: 25365932 NR Description: unknown protein T32E8.10 [imported] - Arabidopsis
  misc_feature (110)..(217): Homolog of NCBI NO: 30699285 NR Description: expressed protein [Arabidopsis thaliana]
  misc_feature (110)..(217): Homolog of NCBI NO: 25365932 NR Description: unknown protein T32E8.10 [imported] - Arabidopsis
  misc_feature (7)..(295): Homolog of NCBI NO: 18417801 NR Description: expressed protein
  misc_feature (1)..(311): Homolog of NCBI NO: 7486671 NR Description: hypothetical protein F8F16.230 - Arabidopsis
MGSGNLIVKKVVKHSSFDLDIQLDKSWMEDVTCPICLDYPHNAVLLRCTSYEKGCRPFVCDTDQTRSNCLERFKSAYELPSNVKVSSLAVPPLDSIIHIVPSNANNRPSCPLCRGDVIGWVVIGEARLHLNQKKRCCEEDCCSFVGNFNELQKHTQQKHPDSRPSEIDPARQVDWENFQQSSDIVDVLSTIHAQVPNGIVLGDYVIEYGDDDTGEDYEVFRRVRTNWWSCIFCRAFSRSSRSRRRSRARERIGSGRRNGNQVNLENFNLVVPTQPVELREIRFDEIDDEYIVTGAIPSIAAPGRMASFHYRDTRYGR

SEQ ID NO: 4464 - protein, 290 aa, Zea mays subsp. mays
  peptide (1)..(290): Ceres Seq. ID no. 12386927
  misc_feature (1)..(82): Homolog of NCBI NO: 38346521 NR Description: OSJNBa0027H09.16 [Oryza sativa (japonica
  misc_feature (79)..(183): Homolog of NCBI NO: 38346521 NR Description: OSJNBa0027H09.16 [Oryza sativa (japonica
  misc_feature (1)..(55): Homolog of NCBI NO: 15230170 NR Description: unknown protein
  misc_feature (83)..(188): Homolog of NCBI NO: 15230170 NR Description: unknown protein
  misc_feature (1)..(50): Homolog of NCBI NO: 30699285 NR Description: expressed protein [Arabidopsis thaliana]
  misc_feature (1)..(50): Homolog of NCBI NO: 25365932 NR Description: unknown protein T32E8.10 [imported] - Arabidopsis
  misc_feature (83)..(190): Homolog of NCBI NO: 30699285 NR Description: expressed protein [Arabidopsis thaliana]
  misc_feature (83)..(190): Homolog of NCBI NO: 25365932 NR Description: unknown protein T32E8.10 [imported] - Arabidopsis
  misc_feature (1)..(268): Homolog of NCBI NO: 18417801 NR Description: expressed protein
  misc_feature (1)..(284): Homolog of NCBI NO: 7486671 NR Description: hypothetical protein F8F16.230 - Arabidopsis
MEDVTCPICLDYPHNAVLLRCTSYEKGCRPFVCDTDQTRSNCLERFKSAYELPSNVKVSSLAVPPLDSIIHIVPSNANNRPSCPLCRGDVIGWVVIGEARLHLNQKKRCCEEDCCSFVGNFNELQKHTQQKHPDSRPSEIDPARQVDWENFQQSSDIVDVLSTIHAQVPNGIVLGDYVIEYGDDDTGEDYEVFRRVRTNWWSCIFCRAFSRSSRSRRRSRARERIGSGRRNGNQVNLENFNLVVPTQPVELREIRFDEIDDEYIVTGAIPSIAAPGRMASFHYRDTRYGR

SEQ ID NO: 4465 - DNA, 1539 bp, Zea mays subsp. mays
  misc_feature (1)..(1539): Ceres Seq. ID no. 12356198
  misc_feature: MA Experiment ID: 108504 Result: Up-regulated in Transcription
  misc_feature: MA Experiment 108504 PARAMETER Experiment Name: Zm_Drought_P Parameter: Age (day) Value: 8
  misc_feature: MA Experiment 108504 PARAMETER Experiment Name: Zm_Drought_P Parameter: Organism Value: Zea mays
  misc_feature: MA Experiment 108504 PARAMETER Experiment Name: Zm_Drought_P Parameter: Plant Line Value: 35A19
  misc_feature: MA Experiment 108504 PARAMETER Experiment Name: Zm_Drought_P Parameter: Timepoint (hr) Value: 12
  misc_feature: MA Experiment 108504 PARAMETER Experiment Name: Zm_Drought_P Parameter: Tissue Value: Aerial
  misc_feature: MA Experiment 108504 PARAMETER Experiment Name: Zm_Drought_P Parameter: Treatment Value: Drought vs. No Drought
  misc_feature: MA Experiment ID: 108522 Result: Up-regulated in Transcription
  misc_feature: MA Experiment 108522 PARAMETER Experiment Name: Zm_42deg_Heat_P Parameter: Age (day) Value: 8
  misc_feature: MA Experiment 108522 PARAMETER Experiment Name: Zm_42deg_Heat_P Parameter: Organism Value: Zea mays
  misc_feature: MA Experiment 108522 PARAMETER Experiment Name: Zm_42deg_Heat_P Parameter: Plant Line Value: 35A19
  misc_feature: MA Experiment 108522 PARAMETER Experiment Name: Zm_42deg_Heat_P Parameter: Temperature (deg C) Value: 42 vs. 22
  misc_feature: MA Experiment 108522 PARAMETER Experiment Name: Zm_42deg_Heat_P Parameter: Timepoint (hr) Value: 1
  misc_feature: MA Experiment 108522 PARAMETER Experiment Name: Zm_42deg_Heat_P Parameter: Tissue Value: Aerial
  misc_feature: MA Experiment ID: 108533 Result: Down-regulated in Transcription
  misc_feature: MA Experiment 108533 PARAMETER Experiment Name: Zm_4deg_Cold_P Parameter: Age (hr) Value: 8
  misc_feature: MA Experiment 108533 PARAMETER Experiment Name: Zm_4deg_Cold_P Parameter: Organism Value: Zea mays
  misc_feature: MA Experiment 108533 PARAMETER Experiment Name: Zm_4deg_Cold_P Parameter: Plant Line Value: 35A19
  misc_feature: MA Experiment 108533 PARAMETER Experiment Name: Zm_4deg_Cold_P Parameter: Temperature (deg C) Value: 4 vs. 22
  misc_feature: MA Experiment 108533 PARAMETER Experiment Name: Zm_4deg_Cold_P Parameter: Timepoint (hr) Value: 1
  misc_feature: MA Experiment 108533 PARAMETER Experiment Name: Zm_4deg_Cold_P Parameter: Tissue Value: Aerial
  misc_feature: MA Experiment ID: 108539 Result: Up-regulated in Transcription
  misc_feature: MA Experiment 108539 PARAMETER Experiment Name: Zm_20percent_PEG_P Parameter: Age (day) Value: 8
  misc_feature: MA Experiment 108539 PARAMETER Experiment Name: Zm_20percent_PEG_P Parameter: Organism Value: Zea mays
  misc_feature: MA Experiment 108539 PARAMETER Experiment Name: Zm_20percent_PEG_P Parameter: Plant Line Value: 35A19
  misc_feature: MA Experiment 108539 PARAMETER Experiment Name: Zm_20percent_PEG_P Parameter: Timepoint (hr) Value: 1
  misc_feature: MA Experiment 108539 PARAMETER Experiment Name: Zm_20percent_PEG_P Parameter: Tissue Value: Aerial
  misc_feature: MA Experiment 108539 PARAMETER Experiment Name: Zm_20percent_PEG_P Parameter: Treatment Value: 20percent PEG vs. No Treatment
  misc_feature: MA Experiment ID: 108540 Result: Up-regulated in Transcription
  misc_feature: MA Experiment 108540 PARAMETER Experiment Name: Zm_20percent_PEG_P Parameter: Age (day) Value: 8
  misc_feature: MA Experiment 108540 PARAMETER Experiment Name: Zm_20percent_PEG_P Parameter: Organism Value: Zea mays
  misc_feature: MA Experiment 108540 PARAMETER Experiment Name: Zm_20percent_PEG_P Parameter: Plant Line Value: 35A19
  misc_feature: MA Experiment 108540 PARAMETER Experiment Name: Zm_20percent_PEG_P Parameter: Timepoint (hr) Value: 6
  misc_feature: MA Experiment 108540 PARAMETER Experiment Name: Zm_20percent_PEG_P Parameter: Tissue Value: Aerial
  misc_feature: MA Experiment 108540 PARAMETER Experiment Name: Zm_20percent_PEG_P Parameter: Treatment Value: 20percent PEG vs. No Treatment
  misc_feature: MA Experiment ID: 108556 Result: Up-regulated in Transcription
  misc_feature: MA Experiment 108556 PARAMETER Experiment Name: Zm_Drought_P Parameter: Age (day) Value: 9
  misc_feature: MA Experiment 108556 PARAMETER Experiment Name: Zm_Drought_P Parameter: Organism Value: Zea mays
  misc_feature: MA Experiment 108556 PARAMETER Experiment Name: Zm_Drought_P Parameter: Plant Line Value: 35A19
  misc_feature: MA Experiment 108556 PARAMETER Experiment Name: Zm_Drought_P Parameter: Timepoint (hr) Value: 24
  misc_feature: MA Experiment 108556 PARAMETER Experiment Name: Zm_Drought_P Parameter: Tissue Value: Aerial
  misc_feature: MA Experiment 108556 PARAMETER Experiment Name: Zm_Drought_P Parameter: Treatment Value: Drought vs. No Drought
  misc_feature: MA Experiment ID: 108689 Result: Up-regulated in Transcription
  misc_feature: MA Experiment 108689 PARAMETER Experiment Name: Zm_Drought_Roots_P Parameter: Age (day) Value: 9
  misc_feature: MA Experiment 108689 PARAMETER Experiment Name: Zm_Drought_Roots_P Parameter: Organism Value: Zea mays
  misc_feature: MA Experiment 108689 PARAMETER Experiment Name: Zm_Drought_Roots_P Parameter: Plant Line Value: 35A19
  misc_feature: MA Experiment 108689 PARAMETER Experiment Name: Zm_Drought_Roots_P Parameter: Timepoint (hr) Value: 24
  misc_feature: MA Experiment 108689 PARAMETER Experiment Name: Zm_Drought_Roots_P Parameter: Tissue Value: Roots
  misc_feature: MA Experiment 108689 PARAMETER Experiment Name: Zm_Drought_Roots_P Parameter: Treatment Value: Drought vs. No Drought
  misc_feature: MA Experiment ID: 20000479 Result: Up-regulated in Transcription
  misc_feature: MA Experiment 20000479 PARAMETER Experiment Name: Zm_Drought_P Parameter: Age (day) Value: 10
  misc_feature: MA Experiment 20000479 PARAMETER Experiment Name: Zm_Drought_P Parameter: Organism Value: Zea mays
  misc_feature: MA Experiment 20000479 PARAMETER Experiment Name: Zm_Drought_P Parameter: Plant Line Value: 35A19
  misc_feature: MA Experiment 20000479 PARAMETER Experiment Name: Zm_Drought_P Parameter: Timepoint (hr) Value: 48
  misc_feature: MA Experiment 20000479 PARAMETER Experiment Name: Zm_Drought_P Parameter: Tissue Value: Aerial
  misc_feature: MA Experiment 20000479 PARAMETER Experiment Name: Zm_Drought_P Parameter: Treatment Value: Drought vs. No Drought
  misc_feature: MA Experiment ID: 20000480 Result: Up-regulated in Transcription
  misc_feature: MA Experiment 20000480 PARAMETER Experiment Name: Zm_Drought_P Parameter: Age (day) Value: 11
  misc_feature: MA Experiment 20000480 PARAMETER Experiment Name: Zm_Drought_P Parameter: Organism Value: Zea mays
  misc_feature: MA Experiment 20000480 PARAMETER Experiment Name: Zm_Drought_P Parameter: Plant Line Value: 35A19
  misc_feature: MA Experiment 20000480 PARAMETER Experiment Name: Zm_Drought_P Parameter: Timepoint (hr) Value: 72
  misc_feature: MA Experiment 20000480 PARAMETER Experiment Name: Zm_Drought_P Parameter: Tissue Value: Aerial
  misc_feature: MA Experiment 20000480 PARAMETER Experiment Name: Zm_Drought_P Parameter: Treatment Value: Drought vs. No Drought
  misc_feature: MA Experiment ID: 20000532 Result: Up-regulated in Transcription
  misc_feature: MA Experiment 20000532 PARAMETER Experiment Name: Zm_0.001percent_MeJA_P Parameter: Age (day) Value: 10
  misc_feature: MA Experiment 20000532 PARAMETER Experiment Name: Zm_0.001percent_MeJA_P Parameter: Organism Value: Zea mays
  misc_feature: MA Experiment 20000532 PARAMETER Experiment Name: Zm_0.001percent_MeJA_P Parameter: Plant Line Value: 35A19
  misc_feature: MA Experiment 20000532 PARAMETER Experiment Name: Zm_0.001percent_MeJA_P Parameter: Timepoint (hr) Value: 48
  misc_feature: MA Experiment 20000532 PARAMETER Experiment Name: Zm_0.001percent_MeJA_P Parameter: Tissue Value: Aerial
  misc_feature: MA Experiment 20000532 PARAMETER Experiment Name: Zm_0.001percent_MeJA_P Parameter: Treatment Value: 0.001percent MeJA vs. No Treatment
agaagcacggcaatctcgatctcgttcgttcccctgagcggcagtcagtgcgagcgagcgcgcacacagacaactcatcctctcccctctctctctcacacacacacatccatcatcccatccctgtgacgggcgatccgagggcctaccgacgatggtgtccgccgtgctccggaccatcctcgtgacgggcggcgccgggtacatcggcagccacacggtgctgcagctgctgcagcagggcttccgcgtcgtcgtcgtcgacaacctcgacaacgcctccgaggccgccctcgcccgcgtcgccgagctcgccgggcacgacggcgccaacctcgtcttccacaaggttgaccttcgcgacaggcacgcgttggtggacatcttctcgtcgcacaggttcgaggctgtcattcactttgctgggctcaaggctgttggggagagcgtgcacaagcccctgctttactacgacaacaacctggtcggcaccatcaccctcctggaggtgatggctgcgaatggctgcaagaagctggtgttctcgtcatctgcaactgtctatgggtggcccaaggaagtaccatgcaccgaagaattcccgctctgcgccaccaatccctatgggcggacaaagcttgtgattgaagacatctgccgcgacgtccaccgctccgacccggactggaagatcatactgctcaggtacttcaaccccgttggcgctcatccaagcgggtacatcggcgaagacccctgcggtgtcccgaacaacctgatgccctacgtgcagcaagtcgctgttgtgaggttacctcacctcacggtctacgggacggactacagcaccaaggatgggactggggtgcgtgattacatccacgttgtcgacctggctgacggccacatagcagccctgaggaagctccacgaagactccgacaaaataggctgtgaagtgtacaacttggggactggaaaggggacgtcggtgttggaaatggtggctgcattcgagaaggcttctgggaagaaaatccctctgggtgttcgctgggcgaagacccggagacgcagagatcgtctacgccgcaactgccaaggcagagaaagagctcaaatggaaggccaagtacgggatcgaggagatgtgcagagatctgtggaactgggcgagcaagaacccgtacgggtacgctgggtcacgcgacaacagcaaatgaaccacccatccatgcatcccatcctgcagtaggagcaagcagcagccttatagcctatgctaccataattagtaactcatcaatcatgcatacataatcagccagtcatctgattaggggtactgcgatgggcctcgcttcttcagtgtatagagggaggaggaggggggtcatcttgatattctttttttttatcattcccgaatgattattattagtagccagttcgatattactccatggttggttgctagagaaggaataagctccattcatatacctaactaaagatatatatatacatgcattcactgtc

SEQ ID NO: 4466 - protein, 366 aa, Zea mays subsp. mays
  peptide (1)..(366): Ceres Seq. ID no. 12356199
  misc_feature (9)..(297): Pfam Name: NAD dependent epimerase/dehydratase family Pfam Description: NAD dependent epimerase/dehydratase family
  misc_feature (9)..(324): Homolog of NCBI NO: 15217653 NR Description: UDP-galactose 4-epimerase, putative; protein id:
  misc_feature (6)..(297): Homolog of NCBI NO: 25553520 NR Description: putative UDP-glucose 4-epimerase
  misc_feature (7)..(297): Homolog of NCBI NO: 21553659 NR Description: UDP-galactose 4-epimerase-like protein
  misc_feature (7)..(297): Homolog of NCBI NO: 15236988 NR Description: UDP-galactose 4-epimerase - like protein
  misc_feature (7)..(297): Homolog of NCBI NO: 12643850 NR Description: Probable UDP-glucose 4-epimerase At4g10960
  misc_feature (7)..(297): Homolog of NCBI NO: 21536846 NR Description: UDPglucose 4-epimerase-like protein [Arabidopsis
  misc_feature (7)..(297): Homolog of NCBI NO: 15236663 NR Description: UDPglucose 4-epimerase - like protein
  misc_feature (7)..(297): Homolog of NCBI NO: 11386775 NR Description: UDP-glucose 4-epimerase GEPI48 (Galactowaldenase)
  misc_feature (1)..(297): Homolog of NCBI NO: 21715990 NR Description: UDP-glucose 4-epimerase [Oryza sativa (japonica
  misc_feature (1)..(297): Homolog of NCBI NO: 32130594 NR Description: UDP-glucose-4-epimerase [Zea mays]
MVSAVLRTILVTGGAGYIGSHTVLQLLQQGFRVVVVDNLDNASEAALARVAELAGHDGANLVFHKVDLRDRHALVDIFSSHRFEAVIHFAGLKAVGESVHKPLLYYDNNLVGTITLLEVMAANGCKKLVFSSSATVYGWPKEVPCTEEFPLCATNPYGRTKLVIEDICRDVHRSDPDWKIILLRYFNPVGAHPSGYIGEDPCGVPNNLMPYVQQVAVVRLPHLTVYGTDYSTKDGTGVRDYIHVVDLADGHIAALRKLHEDSDKIGCEVYNLGTGKGTSVLEMVAAFEKASGKKIPLGVRWAKTRRRRDRLRRNCQGRERAQMEGQVRDRGDVQRSVELGEQEPVRVRWVTRQQQMNHPSMHPILQ

SEQ ID NO: 4467 - protein, 247 aa, Zea mays subsp. mays
  peptide (1)..(247): Ceres Seq. ID no. 12356200
  misc_feature (1)..(178): Pfam Name: NAD dependent epimerase/dehydratase family Pfam Description: NAD dependent epimerase/dehydratase family
  misc_feature (1)..(205): Homolog of NCBI NO: 15217653 NR Description: UDP-galactose 4-epimerase, putative; protein id:
  misc_feature (1)..(178): Homolog of NCBI NO: 25553520 NR Description: putative UDP-glucose 4-epimerase
  misc_feature (1)..(178): Homolog of NCBI NO: 21553659 NR Description: UDP-galactose 4-epimerase-like protein
  misc_feature (1)..(178): Homolog of NCBI NO: 15236988 NR Description: UDP-galactose 4-epimerase - like protein
  misc_feature (1)..(178): Homolog of NCBI NO: 12643850 NR Description: Probable UDP-glucose 4-epimerase At4g10960
  misc_feature (1)..(178): Homolog of NCBI NO: 21536846 NR Description: UDPglucose 4-epimerase-like protein [Arabidopsis
  misc_feature (1)..(178): Homolog of NCBI NO: 15236663 NR Description: UDPglucose 4-epimerase - like protein
  misc_feature (1)..(178): Homolog of NCBI NO: 11386775 NR Description: UDP-glucose 4-epimerase GEPI48 (Galactowaldenase)
  misc_feature (1)..(178): Homolog of NCBI NO: 21715990 NR Description: UDP-glucose 4-epimerase [Oryza sativa (japonica
  misc_feature (1)..(178): Homolog of NCBI NO: 32130594 NR Description: UDP-glucose-4-epimerase [Zea mays]
MAANGCKKLVFSSSATVYGWPKEVPCTEEFPLCATNPYGRTKLVIEDICRDVHRSDPDWKIILLRYFNPVGAHPSGYIGEDPCGVPNNLMPYVQQVAVVRLPHLTVYGTDYSTKDGTGVRDYIHVVDLADGHIAALRKLHEDSDKIGCEVYNLGTGKGTSVLEMVAAFEKASGKKIPLGVRWAKTRRRRDRLRRNCQGRERAQMEGQVRDRGDVQRSVELGEQEPVRVRWVTRQQQMNHPSMHPILQ

SEQ ID NO: 4468 - DNA, 919 bp, Zea mays subsp. mays
  misc_feature (1)..(919): Ceres Seq. ID no. 12412873
  misc_feature: MA Experiment ID: 108527 Result: Up-regulated in Transcription
  misc_feature: MA Experiment 108527 PARAMETER Experiment Name: Zm_5mM_NO_P Parameter: Age (day) Value: 8
  misc_feature: MA Experiment 108527 PARAMETER Experiment Name: Zm_5mM_NO_P Parameter: Organism Value: Zea mays
  misc_feature: MA Experiment 108527 PARAMETER Experiment Name: Zm_5mM_NO_P Parameter: Plant Line Value: 35A19
  misc_feature: MA Experiment 108527 PARAMETER Experiment Name: Zm_5mM_NO_P Parameter: Timepoint (hr) Value: 6
  misc_feature: MA Experiment 108527 PARAMETER Experiment Name: Zm_5mM_NO_P Parameter: Tissue Value: Aerial
  misc_feature: MA Experiment 108527 PARAMETER Experiment Name: Zm_5mM_NO_P Parameter: Treatment Value: 5mM NO vs. No Treatment
  misc_feature: MA Experiment ID: 108544 Result: Down-regulated in Transcription
  misc_feature: MA Experiment ID: 20000626 Result: Up-regulated in Transcription
  misc_feature: MA Experiment 20000626 PARAMETER Experiment Name: Zm_Herbicide-Treatments_P Parameter: Timepoint (hr) Value: 12
  misc_feature: MA Experiment 20000626 PARAMETER Experiment Name: Zm_Herbicide-Treatments_P Parameter: Tissue Value: Aerial
  misc_feature: MA Experiment 20000626 PARAMETER Experiment Name: Zm_Herbicide-Treatments_P Parameter: Treatment Value: Roundup vs. No Treatment
ttttctccagcaagtaccgctcggtgaaaggagctaaagttattattgatgcaaacacaggccgttccaggggctatggatttgtcaggtttggagacgacaacgacaaatctcatgccatgtctgaaatgaatggtgtatattgctctacgaggccaattcgtataggacctgcgactcccagaagatcttcaggtgattctggctcctcgactcctggtcattcagatggtgattcttctaacagaacggtatatgttggtgggcttgaccccaatgtcagtgaagatgaactgagaaaagcctttgccaaatatgatcttgcctctgtgaaaattcctctaggaaagcaatgtggctttgttcaatttgttagcagaactgatgctgaagaagcactacaaggattaaatggatcactcattggaaaccaggcagttcgcctttcatgggtccgcagcccatcgcataagcagtctaggggtgactccgtcaacaggaggaacaacatgtactatggcacaccattctacggcggatatggctatgcctccccggtgccacacccaaacatgtacgctgcagcgtatggcacgtacccgctatatggcaaccagcagctagtgagctagagagctcccctccgacgtgtcccctctgacgggaaacaaaggttttggtccggtgagcatagtagcgtcaggtgagaaggtgcctttataaggctgtcctaagaagtgggcgagatatgttgttgcatcgttatcgttatggtgcctgtaactgttgtgtgtgccgtgtgcgtccggaagaattggatggaatggaactcgtggcttgttgtagtacatcagagagtcatgttattctttcaagaaattttgacttggtaataaattaaactattgtttgtgcgtcc

SEQ ID NO: 4469 - protein, 209 aa, Zea mays subsp. mays
  peptide (1)..(209): Ceres Seq. ID no. 12412874
  misc_feature (1)..(55): Pfam Name: RNA recognition motif. (a.k.a. RRM, RBD, or RNP domain) Pfam Description: RNA recognition motif. (a.k.a. RRM, RBD, or RNP
  misc_feature (1)..(209): Homolog of NCBI NO: 15220241 NR Description: RNA binding protein 47 (RBP47), putative; protein At1g47500.1 [Arabidopsis thaliana] >gi|25386564|pir||C96515
  misc_feature (1)..(202): Homolog of NCBI NO: 15594035 NR Description: nucleic acid binding protein [Nicotiana tabacum]
  misc_feature (1)..(209): Homolog of NCBI NO: 15220233 NR Description: RNA binding protein 47 (RBP47), putative; protein At1g47490.1, supported by cDNA: gi_12744992, supported by cDNA: supported by cDNA: gi_17065623 [Arabidopsis thaliana] 3 PF|00076
  misc_feature (67)..(209): Homolog of NCBI NO: 7489196 NR Description: RNA binding protein homolog - common tobacco >gi|2708532|gb|AAB92518.1| putative RNA binding protein
  misc_feature (67)..(209): Homolog of NCBI NO: 9663769 NR Description: RNA Binding Protein 47 [Nicotiana plumbaginifolia]
  misc_feature (1)..(81): Homolog of NCBI NO: 7489196 NR Description: RNA binding protein homolog - common tobacco >gi|2708532|gb|AAB92518.1| putative RNA binding protein
  misc_feature (1)..(81): Homolog of NCBI NO: 9663769 NR Description: RNA Binding Protein 47 [Nicotiana plumbaginifolia]
  misc_feature (67)..(209): Homolog of NCBI NO: 7489112 NR Description: DNA binding protein ACBF - common tobacco
  misc_feature (1)..(81): Homolog of NCBI NO: 7489112 NR Description: DNA binding protein ACBF - common tobacco
  misc_feature (67)..(209): Homolog of NCBI NO: 40804404 NR Description: DNA-binding protein [Lycopersicon esculentum]
FSSKYRSVKGAKVIIDANTGRSRGYGFVRFGDDNDKSHAMSEMNGVYCSTRPIRIGPATPRRSSGDSGSSTPGHSDGDSSNRTVYVGGLDPNVSEDELRKAFAKYDLASVKIPLGKQCGFVQFVSRTDAEEALQGLNGSLIGNQAVRLSWVRSPSHKQSRGDSVNRRNNMYYGTPFYGGYGYASPVPHPNMYAAAYGTYPLYGNQQLVS

SEQ ID NO: 4470 - protein, 170 aa, Zea mays subsp. mays
  peptide (1)..(170): Ceres Seq. ID no. 12412875
  misc_feature (1)..(170): Homolog of NCBI NO: 15220241 NR Description: RNA binding protein 47 (RBP47), putative; protein At1g47500.1 [Arabidopsis thaliana] >gi|25386564|pir||C96515
  misc_feature (1)..(163): Homolog of NCBI NO: 15594035 NR Description: nucleic acid binding protein [Nicotiana tabacum]
  misc_feature (1)..(170): Homolog of NCBI NO: 15220233 NR Description: RNA binding protein 47 (RBP47), putative; protein At1g47490.1, supported by cDNA: gi_12744992, supported by cDNA: supported by cDNA: gi_17065623 [Arabidopsis thaliana] 3 PF|00076
  misc_feature (28)..(170): Homolog of NCBI NO: 7489196 NR Description: RNA binding protein homolog - common tobacco >gi|2708532|gb|AAB92518.1| putative RNA binding protein
  misc_feature (28)..(170): Homolog of NCBI NO: 9663769 NR Description: RNA Binding Protein 47 [Nicotiana plumbaginifolia]
  misc_feature (1)..(42): Homolog of NCBI NO: 7489196 NR Description: RNA binding protein homolog - common tobacco >gi|2708532|gb|AAB92518.1| putative RNA binding protein
  misc_feature (1)..(42): Homolog of NCBI NO: 9663769 NR Description: RNA Binding Protein 47 [Nicotiana plumbaginifolia]
  misc_feature (28)..(170): Homolog of NCBI NO: 7489112 NR Description: DNA binding protein ACBF - common tobacco
  misc_feature (1)..(42): Homolog of NCBI NO: 7489112 NR Description: DNA binding protein ACBF - common tobacco
  misc_feature (28)..(170): Homolog of NCBI NO: 40804404 NR Description: DNA-binding protein [Lycopersicon esculentum]
MSEMNGVYCSTRPIRIGPATPRRSSGDSGSSTPGHSDGDSSNRTVYVGGLDPNVSEDELRKAFAKYDLASVKIPLGKQCGFVQFVSRTDAEEALQGLNGSLIGNQAVRLSWVRSPSHKQSRGDSVNRRNNMYYGTPFYGGYGYASPVPHPNMYAAAYGTYPLYGNQQLVS

SEQ ID NO: 4471 - protein, 167 aa, Zea mays subsp. mays
  peptide (1)..(167): Ceres Seq. ID no. 12412876
  misc_feature (1)..(167): Homolog of NCBI NO: 15220241 NR Description: RNA binding protein 47 (RBP47), putative; protein At1g47500.1 [Arabidopsis thaliana] >gi|25386564|pir||C96515
  misc_feature (1)..(160): Homolog of NCBI NO: 15594035 NR Description: nucleic acid binding protein [Nicotiana tabacum]
  misc_feature (1)..(167): Homolog of NCBI NO: 15220233 NR Description: RNA binding protein 47 (RBP47), putative; protein At1g47490.1, supported by cDNA: gi_12744992, supported by cDNA: supported by cDNA: gi_17065623 [Arabidopsis thaliana] 3 PF|00076
  misc_feature (25)..(167): Homolog of NCBI NO: 7489196 NR Description: RNA binding protein homolog - common tobacco >gi|2708532|gb|AAB92518.1| putative RNA binding protein
  misc_feature (25)..(167): Homolog of NCBI NO: 9663769 NR Description: RNA Binding Protein 47 [Nicotiana plumbaginifolia]
  misc_feature (1)..(39): Homolog of NCBI NO: 7489196 NR Description: RNA binding protein homolog - common tobacco >gi|2708532|gb|AAB92518.1| putative RNA binding protein
  misc_feature (1)..(39): Homolog of NCBI NO: 9663769 NR Description: RNA Binding Protein 47 [Nicotiana plumbaginifolia]
  misc_feature (25)..(167): Homolog of NCBI NO: 7489112 NR Description: DNA binding protein ACBF - common tobacco
  misc_feature (1)..(39): Homolog of NCBI NO: 7489112 NR Description: DNA binding protein ACBF - common tobacco
  misc_feature (25)..(167): Homolog of NCBI NO: 40804404 NR Description: DNA-binding protein [Lycopersicon esculentum]
MNGVYCSTRPIRIGPATPRRSSGDSGSSTPGHSDGDSSNRTVYVGGLDPNVSEDELRKAFAKYDLASVKIPLGKQCGFVQFVSRTDAEEALQGLNGSLIGNQAVRLSWVRSPSHKQSRGDSVNRRNNMYYGTPFYGGYGYASPVPHPNMYAAAYGTYPLYGNQQLVS

SEQ ID NO: 4472 - DNA, 1847 bp, Zea mays subsp. mays
  misc_feature (1)..(1847): Ceres Seq. ID no. 12344025
  misc_feature: MA Experiment ID: 108547 Result: Down-regulated in Transcription
  misc_feature: MA Experiment 108547 PARAMETER Experiment Name: Zm_Imbibed_Seeds_P Parameter: Age (day) Value: 4 vs. 2
  misc_feature: MA Experiment 108547 PARAMETER Experiment Name: Zm_Imbibed_Seeds_P Parameter: Organism Value: Zea mays
  misc_feature: MA Experiment 108547 PARAMETER Experiment Name: Zm_Imbibed_Seeds_P Parameter: Plant Line Value: 35A19
  misc_feature: MA Experiment 108547 PARAMETER Experiment Name: Zm_Imbibed_Seeds_P Parameter: Tissue Value: Aerial vs. Embryo
gtaacttagccgtattgatatatgcactgatgactggccagaggcgacgatggagacggtctgctagttcaagttctacttccttccgcggccgcacgcgcgtcgttcgacgaattgccggagccagctgaaaatcgccggaggtgctctcggcggtcctggcctgattctctaccgacgcgagctgtggtcagtagccacgtctgtatatccacgtctagctggccatctttgcaccctccccacgtccatggaccctccaagaggtggagcttccacctccagtgaattagaagaacacagcagtggtagggtgccctggtgagcgctcatcatcctctgtgatgacgatgatgatgacaaaagagaggtcatttgttgctaagtcgagacggatgagtattgagtaggcggccttataggagcactaagatgttccgggcaaatttgtggcatttacacacatgctgttactgctgattcttctttaaaagccatggatgtatgtcaaataccacgacctccatggaggcaaacaagaatcaaggaagtcaaattacaccgatttggcaaacaagtactatgatcttgtcactggcttttacgaatatggatggggcgactcattccatcttgctggcggatatccgggtgagacttcccgtgaagccattaagcggcaccagcattttttggcactacaattggggctcaagaagggtatgaaggttttggatgtgggatgtggaattgggggacctttaatagaaatcgccagattcaggcaatgatctgcaataatgtttcattgcccattcaatcaataaattccaacaataatgaagaacatacatacatatatatatatatgtgtgtgtgtgaattttcaattctgtttattgtagctcaacatcgataactggactgaacaacaatgactaccacatctcaaggggcaaggagctcattttttcagcaggtttgagtgagcaatgctgcttcttgaagggggacttcatggacatgccaatatctgataacacctttgatgcggcctatgcaatacaggctacatgtcatgcaccagatgcacaaggcgtctatagtgaggtctaccgtgtgctgaaacctgggcagtattttgcactggatgaatggtgcttgaccgaccgatttgatcccaacaacgccaagcatttggccatcaaggctgagattgagctcggtgatggcctacctgacatccgtaccactcgccaatgtgtccaagctatgaaagatgcaggatttgaggtcgtttttgcaaaggatcttgctcaagtttttccttgcccgtggtaccgggtgatggatcccacctacttttcatgggctcacttccaatgcacacgcccaggacggatcgtcacccgtgcaattgtcaatacactagagttcctccgtattgccccagcaggcagcatgggagcctacaacgtcctgatgagtgcctctgatggccttctaaaaggtggccgggaaggtatcttcacagcgaccttcttcgtcctgggccgcaagcctctcaaggaagttgatatagtaagcctctcaaggaagttgatatagtgaacggcggcgtcctttgagctgcaagattagtatggggctgtactcataagagctatgaatcatggccaacgtgttctgtgctgaggtgtgtttactggattgtcttatgggttatggcccttgcgctgtgtgctggcctgctgggtcatgttcccgcagtagcctgtatctgcttgtcagcttgtgtgctgtgtactatgcactatctgaataaaaatgcagttttacgcattgtt

SEQ ID NO: 4473 - protein, 196 aa, Zea mays subsp. mays
  peptide (1)..(196): Ceres Seq. ID no. 12344026
  misc_feature (1)..(103): Pfam Name: ubiE/COQ5 methyltransferase family Pfam Description: ubiE/COQ5 methyltransferase family
  misc_feature (1)..(182): Homolog of NCBI NO: 21434843 NR Description: cephalopod [Arabidopsis thaliana]
  misc_feature (1)..(182): Homolog of NCBI NO: 7443720 NR Description: probable sterol 24-C-methyltransferase (EC
  misc_feature (1)..(185): Homolog of NCBI NO: 3560531 NR Description: cycloartenol-C24-methyltransferase [Oryza sativa
  misc_feature (1)..(185): Homolog of NCBI NO: 34393309 NR Description: cycloartenol-C24-methyltransferase
  misc_feature (1)..(185): Homolog of NCBI NO: 7443715 NR Description: sterol 24-C-methyltransferase (EC 2.1.1.41) -
  misc_feature (1)..(182): Homolog of NCBI NO: 15240691 NR Description: 24-sterol C-methyltransferase
  misc_feature (1)..(185): Homolog of NCBI NO: 7443716 NR Description: sterol 24-C-methyltransferase (EC 2.1.1.41)
  misc_feature (1)..(185): Homolog of NCBI NO: 1872473 NR Description: delta-24-sterol methyltransferase [Triticum
  misc_feature (1)..(185): Homolog of NCBI NO: 7489677 NR Description: probable sterol 24-C-methyltransferase (EC
  misc_feature (1)..(188): Homolog of NCBI NO: 30103006 NR Description: putative endosperm C-24 sterol methyltransferase
MDMPISDNTFDAAYAIQATCHAPDAQGVYSEVYRVLKPGQYFALDEWCLTDRFDPNNAKHLAIKAEIELGDGLPDIRTTRQCVQAMKDAGFEVVFAKDLAQVFPCPWYRVMDPTYFSWAHFQCTRPGRIVTRAIVNTLEFLRIAPAGSMGAYNVLMSASDGLLKGGREGIFTATFFVLGRKPLKEVDIVSLSRKLI

SEQ ID NO: 4474 - protein, 194 aa, Zea mays subsp. mays
  peptide (1)..(194): Ceres Seq. ID no. 12344027
  misc_feature (1)..(101): Pfam Name: ubiE/COQ5 methyltransferase family Pfam Description: ubiE/COQ5 methyltransferase family
  misc_feature (1)..(180): Homolog of NCBI NO: 15240691 NR Description: 24-sterol C-methyltransferase
  misc_feature (1)..(180): Homolog of NCBI NO: 21434843 NR Description: cephalopod [Arabidopsis thaliana]
  misc_feature (1)..(180): Homolog of NCBI NO: 7443720 NR Description: probable sterol 24-C-methyltransferase (EC
  misc_feature (1)..(183): Homolog of NCBI NO: 3560531 NR Description: cycloartenol-C24-methyltransferase [Oryza sativa
  misc_feature (1)..(183): Homolog of NCBI NO: 34393309 NR Description: cycloartenol-C24-methyltransferase
  misc_feature (1)..(183): Homolog of NCBI NO: 7443715 NR Description: sterol 24-C-methyltransferase (EC 2.1.1.41) -
  misc_feature (1)..(183): Homolog of NCBI NO: 7443716 NR Description: sterol 24-C-methyltransferase (EC 2.1.1.41)
  misc_feature (1)..(183): Homolog of NCBI NO: 1872473 NR Description: delta-24-sterol methyltransferase [Triticum
  misc_feature (1)..(183): Homolog of NCBI NO: 7489677 NR Description: probable sterol 24-C-methyltransferase (EC
  misc_feature (1)..(186): Homolog of NCBI NO: 30103006 NR Description: putative endosperm C-24 sterol methyltransferase
MPISDNTFDAAYAIQATCHAPDAQGVYSEVYRVLKPGQYFALDEWCLTDRFDPNNAKHLAIKAEIELGDGLPDIRTTRQCVQAMKDAGFEVVFAKDLAQVFPCPWYRVMDPTYFSWAHFQCTRPGRIVTRAIVNTLEFLRIAPAGSMGAYNVLMSASDGLLKGGREGIFTATFFVLGRKPLKEVDIVSLSRKLI

SEQ ID NO: 4475 - protein, 111 aa, Zea mays subsp. mays
  peptide (1)..(111): Ceres Seq. ID no. 12344028
  misc_feature (1)..(97): Homolog of NCBI NO: 15240691 NR Description: 24-sterol C-methyltransferase
  misc_feature (1)..(97): Homolog of NCBI NO: 21434843 NR Description: cephalopod [Arabidopsis thaliana]
  misc_feature (1)..(97): Homolog of NCBI NO: 7443720 NR Description: probable sterol 24-C-methyltransferase (EC
  misc_feature (1)..(100): Homolog of NCBI NO: 3560531 NR Description: cycloartenol-C24-methyltransferase [Oryza sativa
  misc_feature (1)..(100): Homolog of NCBI NO: 34393309 NR Description: cycloartenol-C24-methyltransferase
  misc_feature (1)..(100): Homolog of NCBI NO: 7443715 NR Description: sterol 24-C-methyltransferase (EC 2.1.1.41) -
  misc_feature (1)..(100): Homolog of NCBI NO: 7443716 NR Description: sterol 24-C-methyltransferase (EC 2.1.1.41)
  misc_feature (1)..(100): Homolog of NCBI NO: 1872473 NR Description: delta-24-sterol methyltransferase [Triticum
  misc_feature (1)..(100): Homolog of NCBI NO: 7489677 NR Description: probable sterol 24-C-methyltransferase (EC
  misc_feature (1)..(103): Homolog of NCBI NO: 30103006 NR Description: putative endosperm C-24 sterol methyltransferase
MKDAGFEVVFAKDLAQVFPCPWYRVMDPTYFSWAHFQCTRPGRIVTRAIVNTLEFLRIAPAGSMGAYNVLMSASDGLLKGGREGIFTATFFVLGRKPLKEVDIVSLSRKLI

SEQ ID NO: 4476 - DNA, 1768 bp, Zea mays subsp. mays
  misc_feature (1)..(1768): Ceres Seq. ID no. 12357458
  misc_feature: MA Experiment ID: 108527 Result: Up-regulated in Transcription
  misc_feature: MA Experiment 108527 PARAMETER Experiment Name: Zm_5mM_NO_P Parameter: Age (day) Value: 8
  misc_feature: MA Experiment 108527 PARAMETER Experiment Name: Zm_5mM_NO_P Parameter: Organism Value: Zea mays
  misc_feature: MA Experiment 108527 PARAMETER Experiment Name: Zm_5mM_NO_P Parameter: Plant Line Value: 35A19
  misc_feature: MA Experiment 108527 PARAMETER Experiment Name: Zm_5mM_NO_P Parameter: Timepoint (hr) Value: 6
  misc_feature: MA Experiment 108527 PARAMETER Experiment Name: Zm_5mM_NO_P Parameter: Tissue Value: Aerial
  misc_feature: MA Experiment 108527 PARAMETER Experiment Name: Zm_5mM_NO_P Parameter: Treatment Value: 5mM NO vs. No Treatment
  misc_feature: MA Experiment ID: 108530 Result: Down-regulated in Transcription
  misc_feature: MA Experiment 108530 PARAMETER Experiment Name: Zm_Imbibed_Seeds_P Parameter: Age (day) Value: 6 vs. 2
  misc_feature: MA Experiment 108530 PARAMETER Experiment Name: Zm_Imbibed_Seeds_P Parameter: Organism Value: Zea mays
  misc_feature: MA Experiment 108530 PARAMETER Experiment Name: Zm_Imbibed_Seeds_P Parameter: Plant Line Value: 35A19
  misc_feature: MA Experiment 108530 PARAMETER Experiment Name: Zm_Imbibed_Seeds_P Parameter: Tissue Value: Aerial vs. Embryo
  misc_feature: MA Experiment ID: 108545 Result: Down-regulated in Transcription
  misc_feature: MA Experiment 108545 PARAMETER Experiment Name: Zm_Imbibed_Seeds_P Parameter: Age (day) Value: 3 vs. 2
  misc_feature: MA Experiment 108545 PARAMETER Experiment Name: Zm_Imbibed_Seeds_P Parameter: Organism Value: Zea mays
  misc_feature: MA Experiment 108545 PARAMETER Experiment Name: Zm_Imbibed_Seeds_P Parameter: Plant Line Value: 35A19
  misc_feature: MA Experiment 108545 PARAMETER Experiment Name: Zm_Imbibed_Seeds_P Parameter: Tissue Value: Aerial vs. Embryo
  misc_feature: MA Experiment ID: 108559 Result: Up-regulated in Transcription
  misc_feature: MA Experiment 108559 PARAMETER Experiment Name: Zm_5mM_NO_P Parameter: Age (day) Value: 8
  misc_feature: MA Experiment 108559 PARAMETER Experiment Name: Zm_5mM_NO_P Parameter: Organism Value: Zea mays
  misc_feature: MA Experiment 108559 PARAMETER Experiment Name: Zm_5mM_NO_P Parameter: Plant Line Value: 35A19
  misc_feature: MA Experiment 108559 PARAMETER Experiment Name: Zm_5mM_NO_P Parameter: Timepoint (hr) Value: 12
  misc_feature: MA Experiment 108559 PARAMETER Experiment Name: Zm_5mM_NO_P Parameter: Tissue Value: Aerial
  misc_feature: MA Experiment 108559 PARAMETER Experiment Name: Zm_5mM_NO_P Parameter: Treatment Value: 5mM NO vs. No Treatment
  misc_feature: MA Experiment ID: 20000478 Result: Up-regulated in Transcription
  misc_feature: MA Experiment 20000478 PARAMETER Experiment Name: Zm_5mM_SA_P Parameter: Age (day) Value: 11
  misc_feature: MA Experiment 20000478 PARAMETER Experiment Name: Zm_5mM_SA_P Parameter: Organism Value: Zea mays
  misc_feature: MA Experiment 20000478 PARAMETER Experiment Name: Zm_5mM_SA_P Parameter: Plant Line Value: 35A19
  misc_feature: MA Experiment 20000478 PARAMETER Experiment Name: Zm_5mM_SA_P Parameter: Timepoint (hr) Value: 72
  misc_feature: MA Experiment 20000478 PARAMETER Experiment Name: Zm_5mM_SA_P Parameter: Tissue Value: Aerial
  misc_feature: MA Experiment 20000478 PARAMETER Experiment Name: Zm_5mM_SA_P Parameter: Treatment Value: 5mM SA vs. No Treatment
  misc_feature: MA Experiment ID: 20000626 Result: Up-regulated in Transcription
  misc_feature: MA Experiment 20000626 PARAMETER Experiment Name: Zm_Herbicide-Treatments_P Parameter: Timepoint (hr) Value: 12
  misc_feature: MA Experiment 20000626 PARAMETER Experiment Name: Zm_Herbicide-Treatments_P Parameter: Tissue Value: Aerial
  misc_feature: MA Experiment 20000626 PARAMETER Experiment Name: Zm_Herbicide-Treatments_P Parameter: Treatment Value: Roundup vs. No Treatment
accggtgacgaagccttccgtgtcatcaggatcgcagggttttgtttcgtttcgcgggcgttgggaatccatccatggcgaggaagatgctcatcgacggggaggtggcggccgtcgcggatggtgggcactatgactacgatctcttcgtcatcggggcgggcagcggcggtgttcgcggctctcgcaccgccgcctccttcggagctaaggttgcgatttgtgagctcccattccaccccatcagctcagagtggctaggaggacatggtgggacttgcgtgatacgtggttgcgtacctaaaaagatactcgtgtatggtgcatcattccgtggagaatttgaggattcgataattttgggtgggagattaacggagatattaacttcaattggaaaacgctattggaaaataagactaaagaaattgttagattaaatggtgtgtatcagaggatccttaccagtgccggtgtgacaatgattgaaggggcaggcagtctagttgatgctcatactgttgaagttagccagcccgatggttcaaagcaaaggtataccgcgaagcacattttgatcgcgactggtagccgtgctcaacgtgtcaacatacctggaaaggatctggctattacttctgatgaggccttgagcttggaggagcttccaaagcgcgctgtaatcctgggtggcggatatattgctgttgaatttgcttctatctggagggggatgggtgctgaagtagatttgttttatcgaagagatcttcctctaagaggttttgatgatgagatgagagctattgttgcaagcaaccttgagggaaggggaatcaagttgcatccagggacaaatctctctgagttgagtaaaacggctgacggaataaaagttgtaactgataaaggagaagagctcattgcagatgttgtcctatttgcgacagggcgcacaccaaactcccagagactgaacttgcaagctgcaggcgttgagattgaccgggttggagccatcaaggttgacgaatattctcgtacttctgctcctagtgtatgggctgtgggtgatgtaacaaaccggattaatttaacacctgttgcattaatggaggcaacttgctttgctaaaactgtgtttggtggccagcaagttaagcctgatcacagagatgttccttgtgctgttttctccattccaccactatctgtagtgggcctcagcgaagaacaggccttggaggaagccaatggtgatattcttgttttcatctcatcattcaacccaatgaagaacagcatatccaagcgccaggagaagactatcatgaaactggtagttgatgctgaaactgacaaagtacttggtgcatccatgtgtggaccagacgcacctgaaattatccagggcatcgctattgcggttaaatgtggagccaccaaagcagacttcgacagcactgtcggaatccacccttccgctgctgaagagttcgtgaccatgcgcaccgtgacaaggcgcttgagcccgacatccaagccaaagacgaacttgtaagcaagaaattggtgttttgggggaatgttacaccggacaaatacactggtttcatcacgttggtaatttttacgtcattggaactggaaccatgtatattgaaggaataagtttttttttcatggcaacacaccgaaaataatgagaccatggattttcttgatacaaataatgagctcaagcagagaacgtttatggttggttctc

SEQ ID NO: 4477 - protein, 359 aa, Zea mays subsp. mays
  peptide (1)..(359): Ceres Seq. ID no. 12357459
  misc_feature (1)..(208): Pfam Name: Pyridine nucleotide-disulphide oxidoreductase Pfam Description: Pyridine nucleotide-disulphide oxidoreductase
  misc_feature (1)..(359): Homolog of NCBI NO: 22450154 NR Description: deoxymugineic acid synthase 1 [Hordeum vulgare
  misc_feature (1)..(329): Homolog of NCBI NO: 10862871 NR Description: glutathione reductase [Mesembryanthemum
  misc_feature (1)..(359): Homolog of NCBI NO: 7431864 NR Description: glutathione-disulfide reductase (EC 1.8.1.7) -
  misc_feature (1)..(359): Homolog of NCBI NO: 2500115 NR Description: Glutathione reductase, chloroplast precursor (GR)
  misc_feature (1)..(359): Homolog of NCBI NO: 15230074 NR Description: glutathione reductase, putative
  misc_feature (1)..(359): Homolog of NCBI NO: 13430632 NR Description: putative glutathione reductase [Arabidopsis
  misc_feature (1)..(359): Homolog of NCBI NO: 21263645 NR Description: Glutathione reductase, cytosolic (GR) (GRase)
  misc_feature (1)..(359): Homolog of NCBI NO: 2500116 NR Description: Glutathione reductase, cytosolic (GR) (GRase)
  misc_feature (1)..(359): Homolog of NCBI NO: 7431855 NR Description: probable glutathione-disulfide reductase (EC
  misc_feature (1)..(359): Homolog of NCBI NO: 19860133 NR Description: Glutathione reductase, cytosolic (GR) (GRase)
MIEGAGSLVDAHTVEVSQPDGSKQRYTAKHILIATGSRAQRVNIPGKDLAITSDEALSLEELPKRAVILGGGYIAVEFASIWRGMGAEVDLFYRRDLPLRGFDDEMRAIVASNLEGRGIKLHPGTNLSELSKTADGIKVVTDKGEELIADVVLFATGRTPNSQRLNLQAAGVEIDRVGAIKVDEYSRTSAPSVWAVGDVTNRINLTPVALMEATCFAKTVFGGQQVKPDHRDVPCAVFSIPPLSVVGLSEEQALEEANGDILVFISSFNPMKNSISKRQEKTIMKLVVDAETDKVLGASMCGPDAPEIIQGIAIAVKCGATKADFDSTVGIHPSAAEEFVTMRTVTRRLSPTSKPKTNL

SEQ ID NO: 4478 - protein, 275 aa, Zea mays subsp. mays
  peptide (1)..(275): Ceres Seq. ID no. 12357460
  misc_feature (1)..(124): Pfam Name: Pyridine nucleotide-disulphide oxidoreductase Pfam Description: Pyridine nucleotide-disulphide oxidoreductase
  misc_feature (1)..(275): Homolog of NCBI NO: 22450154 NR Description: deoxymugineic acid synthase 1 [Hordeum vulgare
  misc_feature (1)..(245): Homolog of NCBI NO: 10862871 NR Description: glutathione reductase [Mesembryanthemum
  misc_feature (1)..(275): Homolog of NCBI NO: 7431864 NR Description: glutathione-disulfide reductase (EC 1.8.1.7) -
  misc_feature (1)..(275): Homolog of NCBI NO: 2500115 NR Description: Glutathione reductase, chloroplast precursor (GR)
  misc_feature (1)..(275): Homolog of NCBI NO: 15230074 NR Description: glutathione reductase, putative
  misc_feature (1)..(275): Homolog of NCBI NO: 13430632 NR Description: putative glutathione reductase [Arabidopsis
  misc_feature (1)..(275): Homolog of NCBI NO: 21263645 NR Description: Glutathione reductase, cytosolic (GR) (GRase)
  misc_feature (1)..(275): Homolog of NCBI NO: 2500116 NR Description: Glutathione reductase, cytosolic (GR) (GRase)
  misc_feature (1)..(275): Homolog of NCBI NO: 7431855 NR Description: probable glutathione-disulfide reductase (EC
  misc_feature (1)..(275): Homolog of NCBI NO: 19860133 NR Description: Glutathione reductase, cytosolic (GR) (GRase)
MGAEVDLFYRRDLPLRGFDDEMRAIVASNLEGRGIKLHPGTNLSELSKTADGIKVVTDKGEELIADVVLFATGRTPNSQRLNLQAAGVEIDRVGAIKVDEYSRTSAPSVWAVGDVTNRINLTPVALMEATCFAKTVFGGQQVKPDHRDVPCAVFSIPPLSVVGLSEEQALEEANGDILVFISSFNPMKNSISKRQEKTIMKLVVDAETDKVLGASMCGPDAPEIIQGIAIAVKCGATKADFDSTVGIHPSAAEEFVTMRTVTRRLSPTSKPKTNL

SEQ ID NO: 4479 - protein, 254 aa, Zea mays subsp. mays
  peptide (1)..(254): Ceres Seq. ID no. 12357461
  misc_feature (1)..(103): Pfam Name: Pyridine nucleotide-disulphide oxidoreductase Pfam Description: Pyridine nucleotide-disulphide oxidoreductase
  misc_feature (1)..(254): Homolog of NCBI NO: 22450154 NR Description: deoxymugineic acid synthase 1 [Hordeum vulgare
  misc_feature (1)..(224): Homolog of NCBI NO: 10862871 NR Description: glutathione reductase [Mesembryanthemum
  misc_feature (1)..(254): Homolog of NCBI NO: 7431864 NR Description: glutathione-disulfide reductase (EC 1.8.1.7) -
  misc_feature (1)..(254): Homolog of NCBI NO: 2500115 NR Description: Glutathione reductase, chloroplast precursor (GR)
  misc_feature (1)..(254): Homolog of NCBI NO: 15230074 NR Description: glutathione reductase, putative
  misc_feature (1)..(254): Homolog of NCBI NO: 13430632 NR Description: putative glutathione reductase [Arabidopsis
  misc_feature (1)..(254): Homolog of NCBI NO: 21263645 NR Description: Glutathione reductase, cytosolic (GR) (GRase)
  misc_feature (1)..(254): Homolog of NCBI NO: 2500116 NR Description: Glutathione reductase, cytosolic (GR) (GRase)
  misc_feature (1)..(254): Homolog of NCBI NO: 7431855 NR Description: probable glutathione-disulfide reductase (EC
  misc_feature (1)..(254): Homolog of NCBI NO: 19860133 NR Description: Glutathione reductase, cytosolic (GR) (GRase)
MRAIVASNLEGRGIKLHPGTNLSELSKTADGIKVVTDKGEELIADVVLFATGRTPNSQRLNLQAAGVEIDRVGAIKVDEYSRTSAPSVWAVGDVTNRINLTPVALMEATCFAKTVFGGQQVKPDHRDVPCAVFSIPPLSVVGLSEEQALEEANGDILVFISSFNPMKNSISKRQEKTIMKLVVDAETDKVLGASMCGPDAPEIIQGIAIAVKCGATKADFDSTVGIHPSAAEEFVTMRTVTRRLSPTSKPKTNL

SEQ ID NO: 4480 - DNA, 1244 bp, Zea mays subsp. mays
  misc_feature (1)..(1244): Ceres Seq. ID no. 12566552
  misc_feature: MA Experiment ID: 20000534 Result: Down-regulated in Transcription
  misc_feature: MA Experiment 20000534 PARAMETER Experiment Name: Zm_Hybrid_Pollen_P Parameter: Age (day) Value: 8
  misc_feature: MA Experiment 20000534 PARAMETER Experiment Name: Zm_Hybrid_Pollen_P Parameter: Organism Value: Zea mays
  misc_feature: MA Experiment 20000534 PARAMETER Experiment Name: Zm_Hybrid_Pollen_P Parameter: Plant Line Value: 35A19
  misc_feature: MA Experiment 20000534 PARAMETER Experiment Name: Zm_Hybrid_Pollen_P Parameter: Tissue Value: Pollen vs. Aerial
cgaccctcgcgccttcgcgagtctctctctttctctcgagtctcgacacaccacagcggaagcggctcgactcgctgagtgacaagacgcgacgcgacgccaagccaagaccaaattaccaaaccctaccccttcgccgcgaccgcgatcccccacatcgttggcgatgagctcctcctccaacagcgggaagaagccggcgcccgccggcggccgcggggggcccaccatccgcacgctcgccgacataaaccgtggccctgccggtttcccaggtgccggaggcggcagcagcgatgacgacgagccccaggagtactacaccggcggcgagaagagtggaatgcttgttcaagatccaacaagaagaaatgacgtggatgcaatatttgaacaagcaagacaggcgggcgctatccatggaatgcccccttttcttggtggcgagtcttccagctctaggagctttactgggactggccgacttcttacaggggagacagtaccatctgctgcacctcaggaaccagtaccaattcgaatacgccacaatatacatttgtggaacaatggctttactgtggatgatggtccactgagatactacgatgatcctgaaaatgaagagttccttgagagccttaagatgtcaaagtgccccaaggagctggtgcctactgatggagaacatgttgatgtgtctgttattaaaaggatggaagattaccgggaacctgtaaggcctcaatcagctttccagggtgttggaagaacccttggtggtggaccttccccagatgagagtgcaacacctgctcctgcaccagcggcccctgctgcttcgaggtccgctggcatagtcgtggatgactcccagccatttacatccatacagctgaggctggctgacggcactcgcatggtcgcccggttcaacatgcaccacaccgtgggagacatcaggtccttcatcgacgcatctcggcctggaaccgcaaggccgtatcagctgcagacaggtttcccacccaagcagctggctgacccaacgcagaccgtggtgcaagctgggctggcaaactcggttatcatgcagaagatgtaatgtttcgacaacatgggtaactaggatgcatcgtactgcatcttttgagaactgtcttattgtggttgacatactgctctggtgcgtcattcatggtcttaatagtttatagttcatctatgaactgaattatgcttcc

SEQ ID NO: 4481 - protein, 312 aa, Zea mays subsp. mays
  peptide (1)..(312): Ceres Seq. ID no. 12566553
  misc_feature (234)..(311): Pfam Name: UBX domain Pfam Description: UBX domain
  misc_feature (44)..(312): Homolog of NCBI NO: 20149635 NR Description: p47 [Homo sapiens]
  misc_feature (1)..(293): Homolog of NCBI NO: 40739694 NR Description: hypothetical protein AN8228.2 [Aspergillus
  misc_feature (1)..(308): Homolog of NCBI NO: 7485149 NR Description: hypothetical protein - Arabidopsis thaliana
  misc_feature (1)..(311): Homolog of NCBI NO: 15292665 NR Description: putative phosphatase [Arabidopsis thaliana]
  misc_feature (1)..(311): Homolog of NCBI NO: 18414442 NR Description: phosphatase like protein
  misc_feature (4)..(311): Homolog of NCBI NO: 15234731 NR Description: putative protein; protein id: At4g22150.1
  misc_feature (1)..(312): Homolog of NCBI NO: 13123659 NR Description: phosphatase-like protein Psc923 [Pisum sativum]
  misc_feature (5)..(311): Homolog of NCBI NO: 7487458 NR Description: hypothetical protein T27D20.10 - Arabidopsis
  misc_feature (1)..(311): Homolog of NCBI NO: 13123657 NR Description: phosphatase-like protein Mtc923 [Medicago
  misc_feature (5)..(311): Homolog of NCBI NO: 18412499 NR Description: putative membrane trafficking factor
MSSSSNSGKKPAPAGGRGGPTIRTLADINRGPAGFPGAGGGSSDDDEPQEYYTGGEKSGMLVQDPTRRNDVDAIFEQARQAGAIHGMPPFLGGESSSSRSFTGTGRLLTGETVPSAAPQEPVPIRIRHNIHLWNNGFTVDDGPLRYYDDPENEEFLESLKMSKCPKELVPTDGEHVDVSVIKRMEDYREPVRPQSAFQGVGRTLGGGPSPDESATPAPAPAAPAASRSAGIVVDDSQPFTSIQLRLADGTRMVARFNMHHTVGDIRSFIDASRPGTARPYQLQTGFPPKQLADPTQTVVQAGLANSVIMQKM

SEQ ID NO: 4482 - protein, 253 aa, Zea mays subsp. mays
  peptide (1)..(253): Ceres Seq. ID no. 12566554
  misc_feature (175)..(252): Pfam Name: UBX domain Pfam Description: UBX domain
  misc_feature (1)..(253): Homolog of NCBI NO: 20149635 NR Description: p47 [Homo sapiens]
  misc_feature (1)..(234): Homolog of NCBI NO: 40739694 NR Description: hypothetical protein AN8228.2 [Aspergillus
  misc_feature (1)..(249): Homolog of NCBI NO: 7485149 NR Description: hypothetical protein - Arabidopsis thaliana
  misc_feature (1)..(252): Homolog of NCBI NO: 15292665 NR Description: putative phosphatase [Arabidopsis thaliana]
  misc_feature (1)..(252): Homolog of NCBI NO: 18414442 NR Description: phosphatase like protein
  misc_feature (1)..(252): Homolog of NCBI NO: 15234731 NR Description: putative protein; protein id: At4g22150.1
  misc_feature (1)..(253): Homolog of NCBI NO: 13123659 NR Description: phosphatase-like protein Psc923 [Pisum sativum]
  misc_feature (1)..(252): Homolog of NCBI NO: 7487458 NR Description: hypothetical protein T27D20.10 - Arabidopsis
  misc_feature (1)..(252): Homolog of NCBI NO: 13123657 NR Description: phosphatase-like protein Mtc923 [Medicago
  misc_feature (1)..(252): Homolog of NCBI NO: 18412499 NR Description: putative membrane trafficking factor
MLVQDPTRRNDVDAIFEQARQAGAIHGMPPFLGGESSSSRSFTGTGRLLTGETVPSAAPQEPVPIRIRHNIHLWNNGFTVDDGPLRYYDDPENEEFLESLKMSKCPKELVPTDGEHVDVSVIKRMEDYREPVRPQSAFQGVGRTLGGGPSPDESATPAPAPAAPAASRSAGIVVDDSQPFTSIQLRLADGTRMVARFNMHHTVGDIRSFIDASRPGTARPYQLQTGFPPKQLADPTQTVVQAGLANSVIMQKM

SEQ ID NO: 4483 - protein, 226 aa, Zea mays subsp. mays
  peptide (1)..(226): Ceres Seq. ID no. 12566555
  misc_feature (148)..(225): Pfam Name: UBX domain Pfam Description: UBX domain
  misc_feature (1)..(207): Homolog of NCBI NO: 40739694 NR Description: hypothetical protein AN8228.2 [Aspergillus
  misc_feature (1)..(222): Homolog of NCBI NO: 7485149 NR Description: hypothetical protein - Arabidopsis thaliana
  misc_feature (1)..(225): Homolog of NCBI NO: 15292665 NR Description: putative phosphatase [Arabidopsis thaliana]
  misc_feature (1)..(225): Homolog of NCBI NO: 18414442 NR Description: phosphatase like protein
  misc_feature (1)..(225): Homolog of NCBI NO: 15234731 NR Description: putative protein; protein id: At4g22150.1
  misc_feature (1)..(226): Homolog of NCBI NO: 20149635 NR Description: p47 [Homo sapiens]
  misc_feature (1)..(226): Homolog of NCBI NO: 13123659 NR Description: phosphatase-like protein Psc923 [Pisum sativum]
  misc_feature (1)..(225): Homolog of NCBI NO: 7487458 NR Description: hypothetical protein T27D20.10 - Arabidopsis
  misc_feature (1)..(225): Homolog of NCBI NO: 13123657 NR Description: phosphatase-like protein Mtc923 [Medicago
  misc_feature (1)..(225): Homolog of NCBI NO: 18412499 NR Description: putative membrane trafficking factor
MPPFLGGESSSSRSFTGTGRLLTGETVPSAAPQEPVPIRIRHNIHLWNNGFTVDDGPLRYYDDPENEEFLESLKMSKCPKELVPTDGEHVDVSVIKRMEDYREPVRPQSAFQGVGRTLGGGPSPDESATPAPAPAAPAASRSAGIVVDDSQPFTSIQLRLADGTRMVARFNMHHTVGDIRSFIDASRPGTARPYQLQTGFPPKQLADPTQTVVQAGLANSVIMQKM

SEQ ID NO: 4484 - DNA, 1862 bp, Zea mays subsp. mays
  misc_feature (1)..(1862): Ceres Seq. ID no. 12344032
  misc_feature: MA Experiment ID: 108515 Result: Down-regulated in Transcription
  misc_feature: MA Experiment 108515 PARAMETER Experiment Name: Zm_2mM_SA_P Parameter: Age (day) Value: 8
  misc_feature: MA Experiment 108515 PARAMETER Experiment Name: Zm_2mM_SA_P Parameter: Organism Value: Zea mays
  misc_feature: MA Experiment 108515 PARAMETER Experiment Name: Zm_2mM_SA_P Parameter: Plant Line Value: 35A19
  misc_feature: MA Experiment 108515 PARAMETER Experiment Name: Zm_2mM_SA_P Parameter: Timepoint (hr) Value: 12
  misc_feature: MA Experiment 108515 PARAMETER Experiment Name: Zm_2mM_SA_P Parameter: Tissue Value: Aerial
  misc_feature: MA Experiment 108515 PARAMETER Experiment Name: Zm_2mM_SA_P Parameter: Treatment Value: 2mM SA vs. No Treatment
  misc_feature: MA Experiment ID: 108535 Result: Up-regulated in Transcription
  misc_feature: MA Experiment 108535 PARAMETER Experiment Name: Zm_Meristem_P Parameter: Age (day) Value: 8
  misc_feature: MA Experiment 108535 PARAMETER Experiment Name: Zm_Meristem_P Parameter: Organism Value: Zea mays
  misc_feature: MA Experiment 108535 PARAMETER Experiment Name: Zm_Meristem_P Parameter: Plant Line Value: 35A19
  misc_feature: MA Experiment 108535 PARAMETER Experiment Name: Zm_Meristem_P Parameter: Tissue Value: Root Meristem vs. Above Root Meristem
  misc_feature: MA Experiment ID: 108543 Result: Up-regulated in Transcription
  misc_feature: MA Experiment ID: 108556 Result: Down-regulated in Transcription
  misc_feature: MA Experiment 108556 PARAMETER Experiment Name: Zm_Drought_P Parameter: Age (day) Value: 9
  misc_feature: MA Experiment 108556 PARAMETER Experiment Name: Zm_Drought_P Parameter: Organism Value: Zea mays
  misc_feature: MA Experiment 108556 PARAMETER Experiment Name: Zm_Drought_P Parameter: Plant Line Value: 35A19
  misc_feature: MA Experiment 108556 PARAMETER Experiment Name: Zm_Drought_P Parameter: Timepoint (hr) Value: 24
  misc_feature: MA Experiment 108556 PARAMETER Experiment Name: Zm_Drought_P Parameter: Tissue Value: Aerial
  misc_feature: MA Experiment 108556 PARAMETER Experiment Name: Zm_Drought_P Parameter: Treatment Value: Drought vs. No Drought
  misc_feature: MA Experiment ID: 108559 Result: Down-regulated in Transcription
  misc_feature: MA Experiment 108559 PARAMETER Experiment Name: Zm_5mM_NO_P Parameter: Age (day) Value: 8
  misc_feature: MA Experiment 108559 PARAMETER Experiment Name: Zm_5mM_NO_P Parameter: Organism Value: Zea mays
  misc_feature: MA Experiment 108559 PARAMETER Experiment Name: Zm_5mM_NO_P Parameter: Plant Line Value: 35A19
  misc_feature: MA Experiment 108559 PARAMETER Experiment Name: Zm_5mM_NO_P Parameter: Timepoint (hr) Value: 12
  misc_feature: MA Experiment 108559 PARAMETER Experiment Name: Zm_5mM_NO_P Parameter: Tissue Value: Aerial
  misc_feature: MA Experiment 108559 PARAMETER Experiment Name: Zm_5mM_NO_P Parameter: Treatment Value: 5mM NO vs. No Treatment
  misc_feature: MA Experiment ID: 108597 Result: Down-regulated in Transcription
  misc_feature: MA Experiment 108597 PARAMETER Experiment Name: Zm_100uM_ABA_P Parameter: Age (day) Value: 9
  misc_feature: MA Experiment 108597 PARAMETER Experiment Name: Zm_100uM_ABA_P Parameter: Organism Value: Zea mays
  misc_feature: MA Experiment 108597 PARAMETER Experiment Name: Zm_100uM_ABA_P Parameter: Plant Line Value: 35A19
  misc_feature: MA Experiment 108597 PARAMETER Experiment Name: Zm_100uM_ABA_P Parameter: Timepoint (hr) Value: 24
  misc_feature: MA Experiment 108597 PARAMETER Experiment Name: Zm_100uM_ABA_P Parameter: Tissue Value: Aerial
  misc_feature: MA Experiment 108597 PARAMETER Experiment Name: Zm_100uM_ABA_P Parameter: Treatment Value: 100uM ABA vs. No Treatment
  misc_feature: MA Experiment ID: 20000477 Result: Down-regulated in Transcription
  misc_feature: MA Experiment 20000477 PARAMETER Experiment Name: Zm_5mM_SA_P Parameter: Age (day) Value: 10
  misc_feature: MA Experiment 20000477 PARAMETER Experiment Name: Zm_5mM_SA_P Parameter: Organism Value: Zea mays
  misc_feature: MA Experiment 20000477 PARAMETER Experiment Name: Zm_5mM_SA_P Parameter: Plant Line Value: 35A19
  misc_feature: MA Experiment 20000477 PARAMETER Experiment Name: Zm_5mM_SA_P Parameter: Timepoint (hr) Value: 48
  misc_feature: MA Experiment 20000477 PARAMETER Experiment Name: Zm_5mM_SA_P Parameter: Tissue Value: Aerial
  misc_feature: MA Experiment 20000477 PARAMETER Experiment Name: Zm_5mM_SA_P Parameter: Treatment Value: 5mM SA vs. No Treatment
  misc_feature: MA Experiment ID: 20000478 Result: Down-regulated in Transcription
  misc_feature: MA Experiment 20000478 PARAMETER Experiment Name: Zm_5mM_SA_P Parameter: Age (day) Value: 11
  misc_feature: MA Experiment 20000478 PARAMETER Experiment Name: Zm_5mM_SA_P Parameter: Organism Value: Zea mays
  misc_feature: MA Experiment 20000478 PARAMETER Experiment Name: Zm_5mM_SA_P Parameter: Plant Line Value: 35A19
  misc_feature: MA Experiment 20000478 PARAMETER Experiment Name: Zm_5mM_SA_P Parameter: Timepoint (hr) Value: 72
  misc_feature: MA Experiment 20000478 PARAMETER Experiment Name: Zm_5mM_SA_P Parameter: Tissue Value: Aerial
  misc_feature: MA Experiment 20000478 PARAMETER Experiment Name: Zm_5mM_SA_P Parameter: Treatment Value: 5mM SA vs. No Treatment
  misc_feature: MA Experiment ID: 20000480 Result: Down-regulated in Transcription
  misc_feature: MA Experiment 20000480 PARAMETER Experiment Name: Zm_Drought_P Parameter: Age (day) Value: 11
  misc_feature: MA Experiment 20000480 PARAMETER Experiment Name: Zm_Drought_P Parameter: Organism Value: Zea mays
  misc_feature: MA Experiment 20000480 PARAMETER Experiment Name: Zm_Drought_P Parameter: Plant Line Value: 35A19
  misc_feature: MA Experiment 20000480 PARAMETER Experiment Name: Zm_Drought_P Parameter: Timepoint (hr) Value: 72
  misc_feature: MA Experiment 20000480 PARAMETER Experiment Name: Zm_Drought_P Parameter: Tissue Value: Aerial
  misc_feature: MA Experiment 20000480 PARAMETER Experiment Name: Zm_Drought_P Parameter: Treatment Value: Drought vs. No Drought
  misc_feature: MA Experiment ID: 20000487 Result: Down-regulated in Transcription
  misc_feature: MA Experiment 20000487 PARAMETER Experiment Name: Zm_50mM_NH4NO3_L_to_H_P Parameter: Organism Value: Zea mays
  misc_feature: MA Experiment 20000487 PARAMETER Experiment Name: Zm_50mM_NH4NO3_L_to_H_P Parameter: Timepoint (hr) Value: 4
  misc_feature: MA Experiment 20000487 PARAMETER Experiment Name: Zm_50mM_NH4NO3_L_to_H_P Parameter: Tissue Value: Leaves
  misc_feature: MA Experiment 20000487 PARAMETER Experiment Name: Zm_50mM_NH4NO3_L_to_H_P Parameter: Treatment Value: 50mM NH4NO3 vs. 100mM Mannitol
  misc_feature: MA Experiment ID: 20000492 Result: Up-regulated in Transcription
  misc_feature: MA Experiment 20000492 PARAMETER Experiment Name: Zm_Hybrid_Seed_Dev_P Parameter: DAP Value: 12
  misc_feature: MA Experiment 20000492 PARAMETER Experiment Name: Zm_Hybrid_Seed_Dev_P Parameter: Organism Value: Zea mays
  misc_feature: MA Experiment 20000492 PARAMETER Experiment Name: Zm_Hybrid_Seed_Dev_P Parameter: Plant Line Value: 35A19
  misc_feature: MA Experiment 20000492 PARAMETER Experiment Name: Zm_Hybrid_Seed_Dev_P Parameter: Tissue Value: Fert Kernel vs. Unfert Floret
  misc_feature: MA Experiment ID: 20000626 Result: Down-regulated in Transcription
  misc_feature: MA Experiment 20000626 PARAMETER Experiment Name: Zm_Herbicide-Treatments_P Parameter: Timepoint (hr) Value: 12
  misc_feature: MA Experiment 20000626 PARAMETER Experiment Name: Zm_Herbicide-Treatments_P Parameter: Tissue Value: Aerial
  misc_feature: MA Experiment 20000626 PARAMETER Experiment Name: Zm_Herbicide-Treatments_P Parameter: Treatment Value: Roundup vs. No Treatment
  misc_feature: MA Experiment ID: 20000629 Result: Down-regulated in Transcription
  misc_feature: MA Experiment 20000629 PARAMETER Experiment Name: Zm_Herbicide-Treatments_P Parameter: Timepoint (hr) Value: 12
  misc_feature: MA Experiment 20000629 PARAMETER Experiment Name: Zm_Herbicide-Treatments_P Parameter: Tissue Value: Aerial
  misc_feature: MA Experiment 20000629 PARAMETER Experiment Name: Zm_Herbicide-Treatments_P Parameter: Treatment Value: Trimec vs. No Treatment
  misc_feature: MA Experiment ID: 20000632 Result: Down-regulated in Transcription
  misc_feature: MA Experiment 20000632 PARAMETER Experiment Name: Zm_Herbicide-Treatments_P Parameter: Timepoint (hr) Value: 4
  misc_feature: MA Experiment 20000632 PARAMETER Experiment Name: Zm_Herbicide-Treatments_P Parameter: Tissue Value: Aerial
  misc_feature: MA Experiment 20000632 PARAMETER Experiment Name: Zm_Herbicide-Treatments_P Parameter: Treatment Value: Glean vs. No Treatment
ctcgttccctcgagaactgtaccatcacgcgccgcccgcccgcccttgattgagcagggactgggagagagggtgaaagggggcaagaaaacgcttcttgttgccgctgtgcttctgcggatccgtggctgcgcacgccggcggggaagaggagtcgctggcggcgcgcctccagtctttcttcacctccgtgctctccgggctcttcggccaggccgaggccgaggacgaggacgaagagatgcccacgcgcaaccacaacgctgccgcggctgccgctccgcagcatcaccatcacaaccgaggtggtgctcccgctcttggaaagagcaaggccgtgcccggccgagctgatgccatgaaccggcgagcccccctcggcgatattggcaacctcgtcagcgtccgcccagccgaagggaaacctcagctgcaggagcagatcaatcgccccatcacgcgaagcttcggcgctcagctcgtgaagaacgtgcaggcgaatgccgcaatcaagaatgccgcaatcctacccgcgaggcatgcgccgaggcaggaaaggaaggctcctgccaagcagccgcctcctgaggatgtcatagtactcagctccgactctgaacaaagcaggacgcagttggagagcagcgctagctccgtccggtcgaggaagaaggtcatcaacaccctttcttctgtgctctcggctcgctcaaaggctgcctgtggaatcactgacaagaggcggcaagtagtagtgatcgaagacatcgacaagttggacgtcaacaatgagctcgcagttgtggaatacattgaggacatctacacgttctacaagattgctcagcatgacagacggccatgtgattatatagacacccaagtcgagatcaaccctaagatgagggctatcctagctgattggataattgaagtacaccacaagttcgctctgatgccggagactctctacttgaccatgtacatcatcgatcagtacctctcgctgcaaccagtcctgcgaagggagctgcagctggtcggtgtttcagctatgctgatcgcctgcaagtacgaggagatttgggccccagaggtgaacgatttcattcttatatcagacagtgcatacagcagggagcagatcctttcgatggagaagggaatcctgaatagcctggagtggaacctcactgtccctacagtatacatgttccttgttcgttttctgaaggcggcaaccttgggcaacaaagttgagaaagagatggagaatatggtcttcttcttcgctgaactggcgctgatgcagtacggcttggtgacgcggctgccttcgctggtcgctgcttcggttgtctacgcagccaggctcactctcaagagggctcccctctggaccgacaccctcaagcaccacacgggcttcagagagtcagagacagagctaatcgagtgcacgaagttgctggtcagcgcacactcgtccaccgctgacagcaagctgaggtctgtatacaagaagtattccagtgagcagttcggaggtgtcgcgcttcgcccacccgcagccgcagtggagatcaagtaaacgaagataacttcgtgctagtgtttgttagtataatgtaatggaaggcgagcctgacattcgctagggtctatccgtctatgtttgcttgtcggggtagtcaagaaagtttgaatgcttgaggcagccgtttgtttggtaggctgttctcagagtccaggtgttatctgacttgtgatggcatgttgtgtttcatgtgatggatatcattagaatcctaatctagtacgatatctattcatgaatataaatggtatttattcatttgttc

SEQ ID NO: 4485 - protein, 449 aa, Zea mays subsp. mays
  peptide (1)..(449): Ceres Seq. ID no. 12344033
  misc_feature (193)..(318): Pfam Name: Cyclin, N-terminal domain Pfam Description: Cyclin, N-terminal domain
  misc_feature (20)..(446): Homolog of NCBI NO: 7438485 NR Description: mitosis-specific cyclin CYM, B-type - common
  misc_feature (15)..(446): Homolog of NCBI NO: 9502284 NR Description: cyclin [Cicer arietinum]
  misc_feature (22)..(446): Homolog of NCBI NO: 7438499 NR Description: mitosis-specific cyclin - parsley
  misc_feature (15)..(446): Homolog of NCBI NO: 461725 NR Description: G2/mitotic-specific cyclin 1
  misc_feature (28)..(443): Homolog of NCBI NO: 6093215 NR Description: CYCB1-1 protein [Petunia x hybrida]
  misc_feature (1)..(446): Homolog of NCBI NO: 7438506 NR Description: mitosis-specific cyclin B-type - Madagascar
  misc_feature (1)..(445): Homolog of NCBI NO: 2130120 NR Description: cyclin Ib - maize
  misc_feature (1)..(443): Homolog of NCBI NO: 34909050 NR Description: putative cyclin Ia [Oryza sativa (japonica
  misc_feature (40)..(449): Homolog of NCBI NO: 516554 NR Description: cyclin IaZm
  misc_feature (40)..(449): Homolog of NCBI NO: 2130119 NR Description: cyclin Ia - maize
MPTRNHNAAAAAAPQHHHHNRGGAPALGKSKAVPGRADAMNRRAPLGDIGNLVSVRPAEGKPQLQEQINRPITRSFGAQLVKNVQANAAIKNAAILPARHAPRQERKAPAKQPPPEDVIVLSSDSEQSRTQLESSASSVRSRKKVINTLSSVLSARSKAACGITDKRRQVVVIEDIDKLDVNNELAVVEYIEDIYTFYKIAQHDRRPCDYIDTQVEINPKMRAILADWIIEVHHKFALMPETLYLTMYIIDQYLSLQPVLRRELQLVGVSAMLIACKYEEIWAPEVNDFILISDSAYSREQILSMEKGILNSLEWNLTVPTVYMFLVRFLKAATLGNKVEKEMENMVFFFAELALMQYGLVTRLPSLVAASVVYAARLTLKRAPLWTDTLKHHTGFRESETELIECTKLLVSAHSSTADSKLRSVYKKYSSEQFGGVALRPPAAAVEIK

SEQ ID NO: 4486 - protein, 410 aa, Zea mays subsp. mays
  peptide (1)..(410): Ceres Seq. ID no. 12344034
  misc_feature (154)..(279): Pfam Name: Cyclin, N-terminal domain Pfam Description: Cyclin, N-terminal domain
  misc_feature (1)..(407): Homolog of NCBI NO: 7438485 NR Description: mitosis-specific cyclin CYM, B-type - common
  misc_feature (1)..(407): Homolog of NCBI NO: 9502284 NR Description: cyclin [Cicer arietinum]
  misc_feature (1)..(407): Homolog of NCBI NO: 7438499 NR Description: mitosis-specific cyclin - parsley
  misc_feature (1)..(407): Homolog of NCBI NO: 461725 NR Description: G2/mitotic-specific cyclin 1
  misc_feature (1)..(404): Homolog of NCBI NO: 6093215 NR Description: CYCB1-1 protein [Petunia x hybrida]
  misc_feature (1)..(407): Homolog of NCBI NO: 7438506 NR Description: mitosis-specific cyclin B-type - Madagascar
  misc_feature (1)..(406): Homolog of NCBI NO: 2130120 NR Description: cyclin Ib - maize
  misc_feature (1)..(404): Homolog of NCBI NO: 34909050 NR Description: putative cyclin Ia [Oryza sativa (japonica
  misc_feature (1)..(410): Homolog of NCBI NO: 516554 NR Description: cyclin IaZm
  misc_feature (1)..(410): Homolog of NCBI NO: 2130119 NR Description: cyclin Ia - maize
MNRRAPLGDIGNLVSVRPAEGKPQLQEQINRPITRSFGAQLVKNVQANAAIKNAAILPARHAPRQERKAPAKQPPPEDVIVLSSDSEQSRTQLESSASSVRSRKKVINTLSSVLSARSKAACGITDKRRQVVVIEDIDKLDVNNELAVVEYIEDIYTFYKIAQHDRRPCDYIDTQVEINPKMRAILADWIIEVHHKFALMPETLYLTMYIIDQYLSLQPVLRRELQLVGVSAMLIACKYEEIWAPEVNDFILISDSAYSREQILSMEKGILNSLEWNLTVPTVYMFLVRFLKAATLGNKVEKEMENMVFFFAELALMQYGLVTRLPSLVAASVVYAARLTLKRAPLWTDTLKHHTGFRESETELIECTKLLVSAHSSTADSKLRSVYKKYSSEQFGGVALRPPAAAVEIK

SEQ ID NO: 4487 - protein, 229 aa, Zea mays subsp. mays
  peptide (1)..(229): Ceres Seq. ID no. 12344035
  misc_feature (1)..(98): Pfam Name: Cyclin, N-terminal domain Pfam Description: Cyclin, N-terminal domain
  misc_feature (1)..(226): Homolog of NCBI NO: 7438485 NR Description: mitosis-specific cyclin CYM, B-type - common
  misc_feature (1)..(226): Homolog of NCBI NO: 9502284 NR Description: cyclin [Cicer arietinum]
  misc_feature (1)..(226): Homolog of NCBI NO: 7438499 NR Description: mitosis-specific cyclin - parsley
  misc_feature (1)..(226): Homolog of NCBI NO: 461725 NR Description: G2/mitotic-specific cyclin 1
  misc_feature (1)..(223): Homolog of NCBI NO: 6093215 NR Description: CYCB1-1 protein [Petunia x hybrida]
  misc_feature (1)..(226): Homolog of NCBI NO: 7438506 NR Description: mitosis-specific cyclin B-type - Madagascar
  misc_feature (1)..(225): Homolog of NCBI NO: 2130120 NR Description: cyclin Ib - maize
  misc_feature (1)..(223): Homolog of NCBI NO: 34909050 NR Description: putative cyclin Ia [Oryza sativa (japonica
  misc_feature (1)..(229): Homolog of NCBI NO: 516554 NR Description: cyclin IaZm
  misc_feature (1)..(229): Homolog of NCBI NO: 2130119 NR Description: cyclin Ia - maize
MRAILADWIIEVHHKFALMPETLYLTMYIIDQYLSLQPVLRRELQLVGVSAMLIACKYEEIWAPEVNDFILISDSAYSREQILSMEKGILNSLEWNLTVPTVYMFLVRFLKAATLGNKVEKEMENMVFFFAELALMQYGLVTRLPSLVAASVVYAARLTLKRAPLWTDTLKHHTGFRESETELIECTKLLVSAHSSTADSKLRSVYKKYSSEQFGGVALRPPAAAVEIK

SEQ ID NO: 4488 - DNA, 1487 bp, Zea mays subsp. mays
  misc_feature (1)..(1487): Ceres Seq. ID no. 12409925
  misc_feature: MA Experiment ID: 20000535 Result: Up-regulated in Transcription
  misc_feature: MA Experiment 20000535 PARAMETER Experiment Name: Zm_Hybrid_Seed_Dev_P Parameter: DAP Value: 30 vs. 12
  misc_feature: MA Experiment 20000535 PARAMETER Experiment Name: Zm_Hybrid_Seed_Dev_P Parameter: Organism Value: Zea mays
  misc_feature: MA Experiment 20000535 PARAMETER Experiment Name: Zm_Hybrid_Seed_Dev_P Parameter: Plant Line Value: 35A19
  misc_feature: MA Experiment 20000535 PARAMETER Experiment Name: Zm_Hybrid_Seed_Dev_P Parameter: Tissue Value: Embryo vs. Unfert Floret
aaaacctctcctgccgccgccgccatggagagtgcgccgcaaacccccaccatggcggccgccggcgatgtccttcgcgtggccgacctcccgggacgaggtcgcggtctcgttgccgcccgcatcgtccgcgagggtgaggtgctcttctccgagcctcccgtcctcctctacccgtcgactctctcctccctccgctcctactgctccgcctgcttccgctccctcacccccgccgccacgattccctgcgtttcctgccgcgccgctgccttctgctccccggcctgcgccgccgcttcgcacccgcacctcctctgtgccgcgctctcccacggcggcggcgctggcctcgccgccgccgcccccaccgaggcgatccaagagccgctcctcttcctcctctccgcctactccctcccggagtcaaccatgcgctccatgctctctctctcctcggcgccgcccccgcccccgggcgcgcaggacgccgcggggctccatgctgctgtggcagccctagcgccgccgcacatgcttccccagggcttgtcgccagacctaacggcggctctcctcgccaaggaccggggcaatagcttcgccatcatggagccgtaccgacacgggatgtcgctcgagctcctgaaggcgcgggcctacgcagtctacccccgtgcttcgctgttcaaccatgactgcctgcccaatgcgtgccatttcgattaccccgacaggcctgggccagggaacactgacattgtggtgcgtgcactccatgacatacccgaggggagggaggtctgcatcagctactttgcggctaattggaggtatgctgataggcagcgcaggctgctggaggattatggattccggtgcgagtgtgatcgctgtcaggtggagagtcagtggaaggatgatgatgataacaatggagatgatggggatgacaccatggaagaggaggatgaggatgatgctggagatagaggtgatgatgggattgaggaggaagagggggatggtgctaccaatggcggtgatgatgatttcccacatgcctacttctttgtcaggtacttatgtgacaatgagggttgttggggtatgcttgctccattgccaccctcaccaaacggggacctgtcccatgtgtttgaatgcaatctctgtgggaagctgaggaaggaagaggatgtcattcctgatgagggcacttctggcatggtccattagtttgatgaaaacatactgatccatgtgctgcttcttttagtgggagtcagggaagtctgttgtttaaatctactgactgaagtatcccagctccaatgagaggctgcaataataaaaatccaaaaggttaagagtgagtatggtcctaataaggcatcaaaatgtcttttttgtagagaagatagccatatgcagactgtaatagcttcaaactagtttccaaagaaggataattatgactcaatttt

SEQ ID NO: 4489 - protein, 412 aa, Zea mays subsp. mays
  peptide (1)..(412): Ceres Seq. ID no. 12409926
  misc_feature (24)..(280): Pfam Name: SET domain Pfam Description: SET domain
  misc_feature (302)..(351): Homolog of NCBI NO: 9886896 NR Description: Orf73 [Human herpesvirus 8]
  misc_feature (295)..(351): Homolog of NCBI NO: 4154097 NR Description: unknown [Human herpesvirus 8]
  misc_feature (297)..(351): Homolog of NCBI NO: 4154097 NR Description: unknown [Human herpesvirus 8]
  misc_feature (302)..(351): Homolog of NCBI NO: 4154097 NR Description: unknown [Human herpesvirus 8]
  misc_feature (25)..(299): Homolog of NCBI NO: 30680137 NR Description: SET-domain transcriptional regulator family
  misc_feature (21)..(110): Homolog of NCBI NO: 40253402 NR Description: SET-domain transcriptional regulator-like protein
  misc_feature (24)..(337): Homolog of NCBI NO: 18399103 NR Description: putative SET-domain transcriptional regulator
  misc_feature (24)..(399): Homolog of NCBI NO: 30680748 NR Description: SET-domain transcriptional regulator family
  misc_feature (128)..(410): Homolog of NCBI NO: 40253402 NR Description: SET-domain transcriptional regulator-like protein
  misc_feature (21)..(410): Homolog of NCBI NO: 40253403 NR Description: SET-domain transcriptional regulator-like protein
KTSPAAAAMESAPQTPTMAAAGDVLRVADLPGRGRGLVAARIVREGEVLFSEPPVLLYPSTLSSLRSYCSACFRSLTPAATIPCVSCRAAAFCSPACAAASHPHLLCAALSHGGGAGLAAAAPTEAIQEPLLFLLSAYSLPESTMRSMLSLSSAPPPPPGAQDAAGLHAAVAALAPPHMLPQGLSPDLTAALLAKDRGNSFAIMEPYRHGMSLELLKARAYAVYPRASLFNHDCLPNACHFDYPDRPGPGNTDIVVRALHDIPEGREVCISYFAANWRYADRQRRLLEDYGFRCECDRCQVESQWKDDDDNNGDDGDDTMEEEDEDDAGDRGDDGIEEEEGDGATNGGDDDFPHAYFFVRYLCDNEGCWGMLAPLPPSPNGDLSHVFECNLCGKLRKEEDVIPDEGTSGMVH

SEQ ID NO: 4490 - protein, 404 aa, Zea mays subsp. mays
  peptide (1)..(404): Ceres Seq. ID no. 12409927
  misc_feature (16)..(272): Pfam Name: SET domain Pfam Description: SET domain
  misc_feature (294)..(343): Homolog of NCBI NO: 9886896 NR Description: Orf73 [Human herpesvirus 8]
  misc_feature (287)..(343): Homolog of NCBI NO: 4154097 NR Description: unknown [Human herpesvirus 8]
  misc_feature (289)..(343): Homolog of NCBI NO: 4154097 NR Description: unknown [Human herpesvirus 8]
  misc_feature (294)..(343): Homolog of NCBI NO: 4154097 NR Description: unknown [Human herpesvirus 8]
  misc_feature (17)..(291): Homolog of NCBI NO: 30680137 NR Description: SET-domain transcriptional regulator family
  misc_feature (13)..(102): Homolog of NCBI NO: 40253402 NR Description: SET-domain transcriptional regulator-like protein
  misc_feature (16)..(329): Homolog of NCBI NO: 18399103 NR Description: putative SET-domain transcriptional regulator
  misc_feature (16)..(391): Homolog of NCBI NO: 30680748 NR Description: SET-domain transcriptional regulator family
  misc_feature (120)..(402): Homolog of NCBI NO: 40253402 NR Description: SET-domain transcriptional regulator-like protein
  misc_feature (13)..(402): Homolog of NCBI NO: 40253403 NR Description: SET-domain transcriptional regulator-like protein
MESAPQTPTMAAAGDVLRVADLPGRGRGLVAARIVREGEVLFSEPPVLLYPSTLSSLRSYCSACFRSLTPAATIPCVSCRAAAFCSPACAAASHPHLLCAALSHGGGAGLAAAAPTEAIQEPLLFLLSAYSLPESTMRSMLSLSSAPPPPPGAQDAAGLHAAVAALAPPHMLPQGLSPDLTAALLAKDRGNSFAIMEPYRHGMSLELLKARAYAVYPRASLFNHDCLPNACHFDYPDRPGPGNTDIVVRALHDIPEGREVCISYFAANWRYADRQRRLLEDYGFRCECDRCQVESQWKDDDDNNGDDGDDTMEEEDEDDAGDRGDDGIEEEEGDGATNGGDDDFPHAYFFVRYLCDNEGCWGMLAPLPPSPNGDLSHVFECNLCGKLRKEEDVIPDEGTSGMVH

SEQ ID NO: 4491 - protein, 395 aa, Zea mays subsp. mays
  peptide (1)..(395): Ceres Seq. ID no. 12409928
  misc_feature (7)..(263): Pfam Name: SET domain Pfam Description: SET domain
  misc_feature (285)..(334): Homolog of NCBI NO: 9886896 NR Description: Orf73 [Human herpesvirus 8]
  misc_feature (278)..(334): Homolog of NCBI NO: 4154097 NR Description: unknown [Human herpesvirus 8]
  misc_feature (280)..(334): Homolog of NCBI NO: 4154097 NR Description: unknown [Human herpesvirus 8]
  misc_feature (285)..(334): Homolog of NCBI NO: 4154097 NR Description: unknown [Human herpesvirus 8]
  misc_feature (8)..(282): Homolog of NCBI NO: 30680137 NR Description: SET-domain transcriptional regulator family
  misc_feature (4)..(93): Homolog of NCBI NO: 40253402 NR Description: SET-domain transcriptional regulator-like protein
  misc_feature (7)..(320): Homolog of NCBI NO: 18399103 NR Description: putative SET-domain transcriptional regulator
  misc_feature (7)..(382): Homolog of NCBI NO: 30680748 NR Description: SET-domain transcriptional regulator family
  misc_feature (111)..(393): Homolog of NCBI NO: 40253402 NR Description: SET-domain transcriptional regulator-like protein
  misc_feature (4)..(393): Homolog of NCBI NO: 40253403 NR Description: SET-domain transcriptional regulator-like protein
MAAAGDVLRVADLPGRGRGLVAARIVREGEVLFSEPPVLLYPSTLSSLRSYCSACFRSLTPAATIPCVSCRAAAFCSPACAAASHPHLLCAALSHGGGAGLAAAAPTEAIQEPLLFLLSAYSLPESTMRSMLSLSSAPPPPPGAQDAAGLHAAVAALAPPHMLPQGLSPDLTAALLAKDRGNSFAIMEPYRHGMSLELLKARAYAVYPRASLFNHDCLPNACHFDYPDRPGPGNTDIVVRALHDIPEGREVCISYFAANWRYADRQRRLLEDYGFRCECDRCQVESQWKDDDDNNGDDGDDTMEEEDEDDAGDRGDDGIEEEEGDGATNGGDDDFPHAYFFVRYLCDNEGCWGMLAPLPPSPNGDLSHVFECNLCGKLRKEEDVIPDEGTSGMVH

SEQ ID NO: 4492 - DNA, 1672 bp, Zea mays subsp. mays
  misc_feature (1)..(1672): Ceres Seq. ID no. 12566560
  misc_feature: MA Experiment ID: 108522 Result: Down-regulated in Transcription
  misc_feature: MA Experiment 108522 PARAMETER Experiment Name: Zm_42deg_Heat_P Parameter: Age (day) Value: 8
  misc_feature: MA Experiment 108522 PARAMETER Experiment Name: Zm_42deg_Heat_P Parameter: Organism Value: Zea mays
  misc_feature: MA Experiment 108522 PARAMETER Experiment Name: Zm_42deg_Heat_P Parameter: Plant Line Value: 35A19
  misc_feature: MA Experiment 108522 PARAMETER Experiment Name: Zm_42deg_Heat_P Parameter: Temperature (deg C) Value: 42 vs. 22
  misc_feature: MA Experiment 108522 PARAMETER Experiment Name: Zm_42deg_Heat_P Parameter: Timepoint (hr) Value: 1
  misc_feature: MA Experiment 108522 PARAMETER Experiment Name: Zm_42deg_Heat_P Parameter: Tissue Value: Aerial
  misc_feature: MA Experiment ID: 108528 Result: Down-regulated in Transcription
  misc_feature: MA Experiment 108528 PARAMETER Experiment Name: Zm_Imbibed_Seeds_P Parameter: Age (day) Value: 5 vs. 2
  misc_feature: MA Experiment 108528 PARAMETER Experiment Name: Zm_Imbibed_Seeds_P Parameter: Organism Value: Zea mays
  misc_feature: MA Experiment 108528 PARAMETER Experiment Name: Zm_Imbibed_Seeds_P Parameter: Plant Line Value: 35A19
  misc_feature: MA Experiment 108528 PARAMETER Experiment Name: Zm_Imbibed_Seeds_P Parameter: Tissue Value: Aerial vs. Embryo
  misc_feature: MA Experiment ID: 108536 Result: Up-regulated in Transcription
  misc_feature: MA Experiment 108536 PARAMETER Experiment Name: Zm_Meristem_P Parameter: Age (day) Value: 8
  misc_feature: MA Experiment 108536 PARAMETER Experiment Name: Zm_Meristem_P Parameter: Organism Value: Zea mays
  misc_feature: MA Experiment 108536 PARAMETER Experiment Name: Zm_Meristem_P Parameter: Plant Line Value: 35A19
  misc_feature: MA Experiment 108536 PARAMETER Experiment Name: Zm_Meristem_P Parameter: Tissue Value: Shoot Meristem vs. Above Shoot Meristem
  misc_feature: MA Experiment ID: 108544 Result: Up-regulated in Transcription
  misc_feature: MA Experiment ID: 108545 Result: Down-regulated in Transcription
  misc_feature: MA Experiment 108545 PARAMETER Experiment Name: Zm_Imbibed_Seeds_P Parameter: Age (day) Value: 3 vs. 2
  misc_feature: MA Experiment 108545 PARAMETER Experiment Name: Zm_Imbibed_Seeds_P Parameter: Organism Value: Zea mays
  misc_feature: MA Experiment 108545 PARAMETER Experiment Name: Zm_Imbibed_Seeds_P Parameter: Plant Line Value: 35A19
  misc_feature: MA Experiment 108545 PARAMETER Experiment Name: Zm_Imbibed_Seeds_P Parameter: Tissue Value: Aerial vs. Embryo
  misc_feature: MA Experiment ID: 108547 Result: Down-regulated in Transcription
  misc_feature: MA Experiment 108547 PARAMETER Experiment Name: Zm_Imbibed_Seeds_P Parameter: Age (day) Value: 4 vs. 2
  misc_feature: MA Experiment 108547 PARAMETER Experiment Name: Zm_Imbibed_Seeds_P Parameter: Organism Value: Zea mays
  misc_feature: MA Experiment 108547 PARAMETER Experiment Name: Zm_Imbibed_Seeds_P Parameter: Plant Line Value: 35A19
  misc_feature: MA Experiment 108547 PARAMETER Experiment Name: Zm_Imbibed_Seeds_P Parameter: Tissue Value: Aerial vs. Embryo
  misc_feature: MA Experiment ID: 108687 Result: Down-regulated in Transcription
  misc_feature: MA Experiment 108687 PARAMETER Experiment Name: Zm_Embryos-Flowers__P Parameter: Tissue Value: Embryo vs. Aerial+
  misc_feature: MA Experiment ID: 20000535 Result: Down-regulated in Transcription
  misc_feature: MA Experiment 20000535 PARAMETER Experiment Name: Zm_Hybrid_Seed_Dev_P Parameter: DAP Value: 30 vs. 12
  misc_feature: MA Experiment 20000535 PARAMETER Experiment Name: Zm_Hybrid_Seed_Dev_P Parameter: Organism Value: Zea mays
  misc_feature: MA Experiment 20000535 PARAMETER Experiment Name: Zm_Hybrid_Seed_Dev_P Parameter: Plant Line Value: 35A19
  misc_feature: MA Experiment 20000535 PARAMETER Experiment Name: Zm_Hybrid_Seed_Dev_P Parameter: Tissue Value: Embryo vs. Unfert Floret
aattccgctgcatacttgcattgcatctcatccctcctgctcctgcgtcctcctcctctatttctctcctgctgcttgctactacctcatcgatccattccatccatcgccgaggggggagggccgccgcccgcccgggtcgcatcgcatcgcccggtcggccggggactcggggcaggcgagcgacactagctataaaagacctcccgccgcctgcgactgggccgtgtgcaagcaaagcgcaaggccgatctggggttggagggccggccatggtgatgatgatgcggtcgtgcctcggcggcggcctgctaccggtggcggtcatgctctgcctcaacgtggtggcggcggtcatggtgtcgctcgtcaaggtggccatggacggcggcatgaaaccgctcgtgatcgtcaccctgcagcagctcaccgccgccgtcttcctcgcgccaatcgcattcttcaaggagaggaagtcgaggccaaagctgacgctggagatcttcgcctacatcttcgtcagtgcggcgctcggcctgcgccatatattgcagggcagctcttcgtcagtacatgatcttcgtggccctgcgctacaccacggccaccttcgtgaccgccttctccaacatcgcccccgtgctcaccttcctcctggccgtcgctacgcggtccgaagcgctggacctcaagagcaggacggggttggcgaagctgctgggcacgctggtgtcgctggccggcgccatggtgctcaccctctacaagggcgtggcgctcacccacgcggcggcagcctcgcaggaccaccagcagcactcccacggccggttgccgccgagcgccgccgacagccgcggcaagtggacgctgggcaccgtggccatcctgggcaactgcgtctgcctctcctgctggttcctgctccacggccgcctcgccaagaagtacccgcacgtctactcctgcaacgcgctcatgtccttgctcagcttcctccaggtcgccgtcgtcggcctctgcacccagcgcagcatctccccctggatcgtcaccagcaagttcaacatcctcaccgtcctatacgccggcatcgtcggctgcggcgtctcgttcgtgctggtgacatggtgcatcgagaagagaggagccgtgttcgtggccgccttcataccggtggtgcagatcatcgtctccgtcatcgacttctccatcctgcacgagcagctctacctcggaaggtacgcacggacacggtaccatgccatcactgaatggcaatcgacctgatcgaaagtgaagtcacctgctctgctctgctctgcttccccctttgtgctgtgcagcgtgctgggatcagtgctagtgataggtggcctttaccttctgctgtggggcaagaggcaggaggccctgcactgtcctcctcctcctccaaaggttgccgaagaagaccctgctgacaaagagcagcagcaagtgcagcacaactgaagacggacagcatcctctgactgtttggtcgtttggttgtaacagtgccagcaataagatctctctgcctccttttcttttcttttggtgtctcaggggggtgggcaatgttccttccttctcagatcgatcaccaacaaagtgtttagattctaatccaaaacagtagaatggtctt

SEQ ID NO: 4493 - protein, 423 aa, Zea mays subsp. mays
  peptide (1)..(423): Ceres Seq. ID no. 12566561
  misc_feature (104)..(178): Homolog of NCBI NO: 28932880 NR Description: nodulin-like protein [Gossypium hirsutum]
  misc_feature (106)..(178): Homolog of NCBI NO: 38605909 NR Description: OSJNBb0088C09.3 [Oryza sativa (japonica
  misc_feature (105)..(178): Homolog of NCBI NO: 15234179 NR Description: unknown protein
  misc_feature (99)..(178): Homolog of NCBI NO: 15234185 NR Description: unknown protein; protein id: At4g01450.1
  misc_feature (106)..(178): Homolog of NCBI NO: 30689857 NR Description: nodulin N21 family protein [Arabidopsis thaliana]
  misc_feature (125)..(159): Homolog of NCBI NO: 32489301 NR Description: OSJNBa0028I23.24 [Oryza sativa (japonica
  misc_feature (105)..(178): Homolog of NCBI NO: 34897814 NR Description: P0514G12.27 [Oryza sativa (japonica
  misc_feature (104)..(178): Homolog of NCBI NO: 34897816 NR Description: P0514G12.28 [Oryza sativa (japonica
  misc_feature (99)..(178): Homolog of NCBI NO: 34897774 NR Description: ESTs AU030746(E60179) correspond to a region of the predicted
  misc_feature (99)..(178): Homolog of NCBI NO: 6815050 NR Description: ESTs AU030746(E60179) correspond to a region of the predicted
FRCILALHLIPPAPASSSSISLLLLATTSSIHSIHRRGGRAAARPGRIASPGRPGTRGRRATLAIKDLPPPATGPCASKAQGRSGVGGPAMVMMMRSCLGGGLLPVAVMLCLNVVAAVMVSLVKVAMDGGMKPLVIVTLQQLTAAVFLAPIAFFKERKSRPKLTLEIFAYIFVSAALGLRHILQGSSSSVHDLRGPALHHGHLRDRLLQHRPRAHLPPGRRYAVRSAGPQEQDGVGEAAGHAGVAGRRHGAHPLQGRGAHPRGGSLAGPPAALPRPVAAERRRQPRQVDAGHRGHPGQLRLPLLLVPAPRPPRQEVPARLLLQRAHVLAQLPPGRRRRPLHPAQHLPLDRHQQVQHPHRPIRRHRRLRRLVRAGDMVHREERSRVRGRLHTGGADHRLRHRLLHPARAALPRKVRTDTVPCHH

SEQ ID NO: 4494 - protein, 333 aa, Zea mays subsp. mays
  peptide (1)..(333): Ceres Seq. ID no. 12566562
  misc_feature (14)..(88): Homolog of NCBI NO: 28932880 NR Description: nodulin-like protein [Gossypium hirsutum]
  misc_feature (16)..(88): Homolog of NCBI NO: 38605909 NR Description: OSJNBb0088C09.3 [Oryza sativa (japonica
  misc_feature (15)..(88): Homolog of NCBI NO: 15234179 NR Description: unknown protein
  misc_feature (9)..(88): Homolog of NCBI NO: 15234185 NR Description: unknown protein; protein id: At4g01450.1
  misc_feature (16)..(88): Homolog of NCBI NO: 30689857 NR Description: nodulin N21 family protein [Arabidopsis thaliana]
  misc_feature (35)..(69): Homolog of NCBI NO: 32489301 NR Description: OSJNBa0028I23.24 [Oryza sativa (japonica
  misc_feature (15)..(88): Homolog of NCBI NO: 34897814 NR Description: P0514G12.27 [Oryza sativa (japonica
  misc_feature (14)..(88): Homolog of NCBI NO: 34897816 NR Description: P0514G12.28 [Oryza sativa (japonica
  misc_feature (9)..(88): Homolog of NCBI NO: 34897774 NR Description: ESTs AU030746(E60179) correspond to a region of the predicted
  misc_feature (9)..(88): Homolog of NCBI NO: 6815050 NR Description: ESTs AU030746(E60179) correspond to a region of the predicted
MVMMMRSCLGGGLLPVAVMLCLNVVAAVMVSLVKVAMDGGMKPLVIVTLQQLTAAVFLAPIAFFKERKSRPKLTLEIFAYIFVSAALGLRHILQGSSSSVHDLRGPALHHGHLRDRLLQHRPRAHLPPGRRYAVRSAGPQEQDGVGEAAGHAGVAGRRHGAHPLQGRGAHPRGGSLAGPPAALPRPVAAERRRQPRQVDAGHRGHPGQLRLPLLLVPAPRPPRQEVPARLLLQRAHVLAQLPPGRRRRPLHPAQHLPLDRHQQVQHPHRPIRRHRRLRRLVRAGDMVHREERSRVRGRLHTGGADHRLRHRLLHPARAALPRKVRTDTVPCHH

SEQ ID NO: 4495 - protein, 331 aa, Zea mays subsp. mays
  peptide (1)..(331): Ceres Seq. ID no. 12566563
  misc_feature (12)..(86): Homolog of NCBI NO: 28932880 NR Description: nodulin-like protein [Gossypium hirsutum]
  misc_feature (14)..(86): Homolog of NCBI NO: 38605909 NR Description: OSJNBb0088C09.3 [Oryza sativa (japonica
  misc_feature (13)..(86): Homolog of NCBI NO: 15234179 NR Description: unknown protein
  misc_feature (7)..(86): Homolog of NCBI NO: 15234185 NR Description: unknown protein; protein id: At4g01450.1
  misc_feature (14)..(86): Homolog of NCBI NO: 30689857 NR Description: nodulin N21 family protein [Arabidopsis thaliana]
  misc_feature (33)..(67): Homolog of NCBI NO: 32489301 NR Description: OSJNBa0028I23.24 [Oryza sativa (japonica
  misc_feature (13)..(86): Homolog of NCBI NO: 34897814 NR Description: P0514G12.27 [Oryza sativa (japonica
  misc_feature (12)..(86): Homolog of NCBI NO: 34897816 NR Description: P0514G12.28 [Oryza sativa (japonica
  misc_feature (7)..(86): Homolog of NCBI NO: 34897774 NR Description: ESTs AU030746(E60179) correspond to a region of the predicted
  misc_feature (7)..(86): Homolog of NCBI NO: 6815050 NR Description: ESTs AU030746(E60179) correspond to a region of the predicted
MMMRSCLGGGLLPVAVMLCLNVVAAVMVSLVKVAMDGGMKPLVIVTLQQLTAAVFLAPIAFFKERKSRPKLTLEIFAYIFVSAALGLRHILQGSSSSVHDLRGPALHHGHLRDRLLQHRPRAHLPPGRRYAVRSAGPQEQDGVGEAAGHAGVAGRRHGAHPLQGRGAHPRGGSLAGPPAALPRPVAAERRRQPRQVDAGHRGHPGQLRLPLLLVPAPRPPRQEVPARLLLQRAHVLAQLPPGRRRRPLHPAQHLPLDRHQQVQHPHRPIRRHRRLRRLVRAGDMVHREERSRVRGRLHTGGADHRLRHRLLHPARAALPRKVRTDTVPCHH

SEQ ID NO: 4496 - DNA, 1600 bp, Zea mays subsp. mays
  misc_feature (1)..(1600): Ceres Seq. ID no. 12409921
  misc_feature: MA Experiment ID: 108504 Result: Down-regulated in Transcription
  misc_feature: MA Experiment 108504 PARAMETER Experiment Name: Zm_Drought_P Parameter: Age (day) Value: 8
  misc_feature: MA Experiment 108504 PARAMETER Experiment Name: Zm_Drought_P Parameter: Organism Value: Zea mays
  misc_feature: MA Experiment 108504 PARAMETER Experiment Name: Zm_Drought_P Parameter: Plant Line Value: 35A19
  misc_feature: MA Experiment 108504 PARAMETER Experiment Name: Zm_Drought_P Parameter: Timepoint (hr) Value: 12
  misc_feature: MA Experiment 108504 PARAMETER Experiment Name: Zm_Drought_P Parameter: Tissue Value: Aerial
  misc_feature: MA Experiment 108504 PARAMETER Experiment Name: Zm_Drought_P Parameter: Treatment Value: Drought vs. No Drought
  misc_feature: MA Experiment ID: 108535 Result: Down-regulated in Transcription
  misc_feature: MA Experiment 108535 PARAMETER Experiment Name: Zm_Meristem_P Parameter: Age (day) Value: 8
  misc_feature: MA Experiment 108535 PARAMETER Experiment Name: Zm_Meristem_P Parameter: Organism Value: Zea mays
  misc_feature: MA Experiment 108535 PARAMETER Experiment Name: Zm_Meristem_P Parameter: Plant Line Value: 35A19
  misc_feature: MA Experiment 108535 PARAMETER Experiment Name: Zm_Meristem_P Parameter: Tissue Value: Root Meristem vs. Above Root Meristem
  misc_feature: MA Experiment ID: 108543 Result: Up-regulated in Transcription
  misc_feature: MA Experiment ID: 108556 Result: Down-regulated in Transcription
  misc_feature: MA Experiment 108556 PARAMETER Experiment Name: Zm_Drought_P Parameter: Age (day) Value: 9
  misc_feature: MA Experiment 108556 PARAMETER Experiment Name: Zm_Drought_P Parameter: Organism Value: Zea mays
  misc_feature: MA Experiment 108556 PARAMETER Experiment Name: Zm_Drought_P Parameter: Plant Line Value: 35A19
  misc_feature: MA Experiment 108556 PARAMETER Experiment Name: Zm_Drought_P Parameter: Timepoint (hr) Value: 24
  misc_feature: MA Experiment 108556 PARAMETER Experiment Name: Zm_Drought_P Parameter: Tissue Value: Aerial
  misc_feature: MA Experiment 108556 PARAMETER Experiment Name: Zm_Drought_P Parameter: Treatment Value: Drought vs. No Drought
  misc_feature: MA Experiment ID: 20000477 Result: Down-regulated in Transcription
  misc_feature: MA Experiment 20000477 PARAMETER Experiment Name: Zm_5mM_SA_P Parameter: Age (day) Value: 10
  misc_feature: MA Experiment 20000477 PARAMETER Experiment Name: Zm_5mM_SA_P Parameter: Organism Value: Zea mays
  misc_feature: MA Experiment 20000477 PARAMETER Experiment Name: Zm_5mM_SA_P Parameter: Plant Line Value: 35A19
  misc_feature: MA Experiment 20000477 PARAMETER Experiment Name: Zm_5mM_SA_P Parameter: Timepoint (hr) Value: 48
  misc_feature: MA Experiment 20000477 PARAMETER Experiment Name: Zm_5mM_SA_P Parameter: Tissue Value: Aerial
  misc_feature: MA Experiment 20000477 PARAMETER Experiment Name: Zm_5mM_SA_P Parameter: Treatment Value: 5mM SA vs. No Treatment
  misc_feature: MA Experiment ID: 20000478 Result: Down-regulated in Transcription
  misc_feature: MA Experiment 20000478 PARAMETER Experiment Name: Zm_5mM_SA_P Parameter: Age (day) Value: 11
  misc_feature: MA Experiment 20000478 PARAMETER Experiment Name: Zm_5mM_SA_P Parameter: Organism Value: Zea mays
  misc_feature: MA Experiment 20000478 PARAMETER Experiment Name: Zm_5mM_SA_P Parameter: Plant Line Value: 35A19
  misc_feature: MA Experiment 20000478 PARAMETER Experiment Name: Zm_5mM_SA_P Parameter: Timepoint (hr) Value: 72
  misc_feature: MA Experiment 20000478 PARAMETER Experiment Name: Zm_5mM_SA_P Parameter: Tissue Value: Aerial
  misc_feature: MA Experiment 20000478 PARAMETER Experiment Name: Zm_5mM_SA_P Parameter: Treatment Value: 5mM SA vs. No Treatment
  misc_feature: MA Experiment ID: 20000479 Result: Down-regulated in Transcription
  misc_feature: MA Experiment 20000479 PARAMETER Experiment Name: Zm_Drought_P Parameter: Age (day) Value: 10
  misc_feature: MA Experiment 20000479 PARAMETER Experiment Name: Zm_Drought_P Parameter: Organism Value: Zea mays
  misc_feature: MA Experiment 20000479 PARAMETER Experiment Name: Zm_Drought_P Parameter: Plant Line Value: 35A19
  misc_feature: MA Experiment 20000479 PARAMETER Experiment Name: Zm_Drought_P Parameter: Timepoint (hr) Value: 48
  misc_feature: MA Experiment 20000479 PARAMETER Experiment Name: Zm_Drought_P Parameter: Tissue Value: Aerial
  misc_feature: MA Experiment 20000479 PARAMETER Experiment Name: Zm_Drought_P Parameter: Treatment Value: Drought vs. No Drought
  misc_feature: MA Experiment ID: 20000480 Result: Down-regulated in Transcription
  misc_feature: MA Experiment 20000480 PARAMETER Experiment Name: Zm_Drought_P Parameter: Age (day) Value: 11
  misc_feature: MA Experiment 20000480 PARAMETER Experiment Name: Zm_Drought_P Parameter: Organism Value: Zea mays
  misc_feature: MA Experiment 20000480 PARAMETER Experiment Name: Zm_Drought_P Parameter: Plant Line Value: 35A19
  misc_feature: MA Experiment 20000480 PARAMETER Experiment Name: Zm_Drought_P Parameter: Timepoint (hr) Value: 72
  misc_feature: MA Experiment 20000480 PARAMETER Experiment Name: Zm_Drought_P Parameter: Tissue Value: Aerial
  misc_feature: MA Experiment 20000480 PARAMETER Experiment Name: Zm_Drought_P Parameter: Treatment Value: Drought vs. No Drought
  misc_feature: MA Experiment ID: 20000492 Result: Down-regulated in Transcription
  misc_feature: MA Experiment 20000492 PARAMETER Experiment Name: Zm_Hybrid_Seed_Dev_P Parameter: DAP Value: 12
  misc_feature: MA Experiment 20000492 PARAMETER Experiment Name: Zm_Hybrid_Seed_Dev_P Parameter: Organism Value: Zea mays
  misc_feature: MA Experiment 20000492 PARAMETER Experiment Name: Zm_Hybrid_Seed_Dev_P Parameter: Plant Line Value: 35A19
  misc_feature: MA Experiment 20000492 PARAMETER Experiment Name: Zm_Hybrid_Seed_Dev_P Parameter: Tissue Value: Fert Kernel vs. Unfert Floret
  misc_feature: MA Experiment ID: 20000533 Result: Down-regulated in Transcription
  misc_feature: MA Experiment 20000533 PARAMETER Experiment Name: Zm_0.001percent_MeJA_P Parameter: Age (day) Value: 11
  misc_feature: MA Experiment 20000533 PARAMETER Experiment Name: Zm_0.001percent_MeJA_P Parameter: Organism Value: Zea mays
  misc_feature: MA Experiment 20000533 PARAMETER Experiment Name: Zm_0.001percent_MeJA_P Parameter: Plant Line Value: 35A19
  misc_feature: MA Experiment 20000533 PARAMETER Experiment Name: Zm_0.001percent_MeJA_P Parameter: Timepoint (hr) Value: 72
  misc_feature: MA Experiment 20000533 PARAMETER Experiment Name: Zm_0.001percent_MeJA_P Parameter: Tissue Value: Aerial
  misc_feature: MA Experiment 20000533 PARAMETER Experiment Name: Zm_0.001percent_MeJA_P Parameter: Treatment Value: 0.001percent MeJA vs. No Treatment
  misc_feature: MA Experiment ID: 20000535 Result: Down-regulated in Transcription
  misc_feature: MA Experiment 20000535 PARAMETER Experiment Name: Zm_Hybrid_Seed_Dev_P Parameter: DAP Value: 30 vs. 12
  misc_feature: MA Experiment 20000535 PARAMETER Experiment Name: Zm_Hybrid_Seed_Dev_P Parameter: Organism Value: Zea mays
  misc_feature: MA Experiment 20000535 PARAMETER Experiment Name: Zm_Hybrid_Seed_Dev_P Parameter: Plant Line Value: 35A19
  misc_feature: MA Experiment 20000535 PARAMETER Experiment Name: Zm_Hybrid_Seed_Dev_P Parameter: Tissue Value: Embryo vs. Unfert Floret
  misc_feature: MA Experiment ID: 20000626 Result: Down-regulated in Transcription
  misc_feature: MA Experiment 20000626 PARAMETER Experiment Name: Zm_Herbicide-Treatments_P Parameter: Timepoint (hr) Value: 12
  misc_feature: MA Experiment 20000626 PARAMETER Experiment Name: Zm_Herbicide-Treatments_P Parameter: Tissue Value: Aerial
  misc_feature: MA Experiment 20000626 PARAMETER Experiment Name: Zm_Herbicide-Treatments_P Parameter: Treatment Value: Roundup vs. No Treatment
atcctgtttcttgccgcactagaaacgtcgatccagcaatggctgctaccccgaccatcgttctggtgcccgtctggggcattggccacttcgtaccaatgctcgaggtcggcaagcggctgctcgcacgcagcgcactgcccctcaccgtcaccgtgctcgtaatgccgttgcctgcagaggcgaagcgggcgtccgagatcaccgagcacatacgccagcaggaagcctccggcctcgccatccgcttccaccatctgccagcggtggaacccccaaccgaccactcgggcatcgaggagtacatatcccgctacgtgcagctgtactcgccccacgtcaaggcggccgtcgccggggttgacgtgcccggtggccggcgtcgttgtcgacatcttctgcacggcgctgttcgacgcggcgcaccagctcggcgtgcccggcctacgtgtacctgatcaccagcgccgcgatgtgcgcgctcttgctgcgctccccgacgctcgacgaggaggtagccgtcgaggtcgagttcgagcaaatggaaggcggagtggacgtgccagggctgccgccggtgccggcgtcctgcctgccgacggggctggagaacagaaagatcccgacctatcgctggttcctgtacaacggcaggcgctatatggaagcagcaggcatcatcgtcaacaccattgccgaggccgagccgcgcgtcctcgcggccatcgccgacgggcggtgcacgcgtggtgtcccggcacctccggtgtactcgatcgggccggtgatcccctccaccccgcccgccgagcagcaggcgcaggagtgcgtgcgctggctcgactcgcagcctccgagctccgtggtgttcctatgcttcggcagcggtggctgcttcacggcgccccaagcgcacgagatagcgcacggcctggaccgcagcgggcatcgattcctgtgggtgctgcgcgggacgccggagcccggcacgaagttgccctcggacgggaacctcgcggagctgcttccggcggatttcttggcgaggacgaaggatagagggctcgtgtggcctaccaaggcgccgcagaaggagatactcgcccacgccgccgtgggaggcttcgtcacgcactgtggctggaactcggtcctcgagagcctctggcatggcgtgccgatggtgccatggccgcttggcgccgagcagcactacaacgcgttcacgctggtggccgacatgggcgtcgccgtggcgctgaacgtggaaaggaagaggaagaatttcgtggaggcgaccgagctggagcgagcggttaaagctctgatgtgcgacggcgagacagcgaggaaggttagggacaaggtcatggagataaaagccgcgtgccggaaggcaatggaggagggcggatcatcgaacatgtcgttgcagaggctctgtgatgcgctcgtcgaaggcgcggtgcacccgggaaagtgatgcccacagagttcaatcaggaggctctgtccaccagccatccaatggtgtacatgtattctgttatgagttctctgtttttagagcaagttaaataatattttttatgagttctcg

SEQ ID NO: 4497 - protein, 336 aa, Zea mays subsp. mays
  peptide (1)..(336): Ceres Seq. ID no. 12409922
  misc_feature (1)..(328): Pfam Name: UDP-glucoronosyl and UDP-glucosyl transferase Pfam Description: UDP-glucoronosyl and UDP-glucosyl transferase
  misc_feature (1)..(336): Homolog of NCBI NO: 34394653 NR Description: putative glucosyltransferase-3
  misc_feature (1)..(327): Homolog of NCBI NO: 34394683 NR Description: putative flavonol 3-O-glucosyltransferase
  misc_feature (1)..(329): Homolog of NCBI NO: 14349251 NR Description: glucosyltransferase [Nicotiana tabacum]
  misc_feature (1)..(334): Homolog of NCBI NO: 34394680 NR Description: putative glucosyltransferase
  misc_feature (1)..(330): Homolog of NCBI NO: 34394676 NR Description: putative glucosyltransferase
  misc_feature (1)..(323): Homolog of NCBI NO: 34394688 NR Description: putative glucosyltransferase
  misc_feature (1)..(328): Homolog of NCBI NO: 34898742 NR Description: putative betanidin 6-O-glucosyltransferase
  misc_feature (38)..(226): Homolog of NCBI NO: 19911213 NR Description: glucosyltransferase like protein [Vigna angularis]
  misc_feature (1)..(323): Homolog of NCBI NO: 15234056 NR Description: putative flavonol glucosyltransferase
  misc_feature (1)..(332): Homolog of NCBI NO: 34394651 NR Description: putative glucosyltransferase
MCALLLRSPTLDEEVAVEVEFEQMEGGVDVPGLPPVPASCLPTGLENRKIPTYRWFLYNGRRYMEAAGIIVNTIAEAEPRVLAAIADGRCTRGVPAPPVYSIGPVIPSTPPAEQQAQECVRWLDSQPPSSVVFLCFGSGGCFTAPQAHEIAHGLDRSGHRFLWVLRGTPEPGTKLPSDGNLAELLPADFLARTKDRGLVWPTKAPQKEILAHAAVGGFVTHCGWNSVLESLWHGVPMVPWPLGAEQHYNAFTLVADMGVAVALNVERKRKNFVEATELERAVKALMCDGETARKVRDKVMEIKAACRKAMEEGGSSNMSLQRLCDALVEGAVHPGK

SEQ ID NO: 4498 - protein, 313 aa, Zea mays subsp. mays
  peptide (1)..(313): Ceres Seq. ID no. 12409923
  misc_feature (1)..(305): Pfam Name: UDP-glucoronosyl and UDP-glucosyl transferase Pfam Description: UDP-glucoronosyl and UDP-glucosyl transferase
  misc_feature (1)..(300): Homolog of NCBI NO: 15234056 NR Description: putative flavonol glucosyltransferase
  misc_feature (1)..(306): Homolog of NCBI NO: 14349251 NR Description: glucosyltransferase [Nicotiana tabacum]
  misc_feature (15)..(203): Homolog of NCBI NO: 19911213 NR Description: glucosyltransferase like protein [Vigna angularis]
  misc_feature (1)..(311): Homolog of NCBI NO: 34394680 NR Description: putative glucosyltransferase
  misc_feature (1)..(305): Homolog of NCBI NO: 34898742 NR Description: putative betanidin 6-O-glucosyltransferase
  misc_feature (1)..(307): Homolog of NCBI NO: 34394676 NR Description: putative glucosyltransferase
  misc_feature (1)..(300): Homolog of NCBI NO: 34394688 NR Description: putative glucosyltransferase
  misc_feature (1)..(313): Homolog of NCBI NO: 34394653 NR Description: putative glucosyltransferase-3
  misc_feature (1)..(304): Homolog of NCBI NO: 34394683 NR Description: putative flavonol 3-O-glucosyltransferase
  misc_feature (1)..(309): Homolog of NCBI NO: 34394651 NR Description: putative glucosyltransferase
MEGGVDVPGLPPVPASCLPTGLENRKIPTYRWFLYNGRRYMEAAGIIVNTIAEAEPRVLAAIADGRCTRGVPAPPVYSIGPVIPSTPPAEQQAQECVRWLDSQPPSSVVFLCFGSGGCFTAPQAHEIAHGLDRSGHRFLWVLRGTPEPGTKLPSDGNLAELLPADFLARTKDRGLVWPTKAPQKEILAHAAVGGFVTHCGWNSVLESLWHGVPMVPWPLGAEQHYNAFTLVADMGVAVALNVERKRKNFVEATELERAVKALMCDGETARKVRDKVMEIKAACRKAMEEGGSSNMSLQRLCDALVEGAVHPGK

SEQ ID NO: 4499 - protein, 273 aa, Zea mays subsp. mays
  peptide (1)..(273): Ceres Seq. ID no. 12409924
  misc_feature (1)..(265): Pfam Name: UDP-glucoronosyl and UDP-glucosyl transferase Pfam Description: UDP-glucoronosyl and UDP-glucosyl transferase
  misc_feature (1)..(260): Homolog of NCBI NO: 15234056 NR Description: putative flavonol glucosyltransferase
  misc_feature (1)..(266): Homolog of NCBI NO: 14349251 NR Description: glucosyltransferase [Nicotiana tabacum]
  misc_feature (1)..(163): Homolog of NCBI NO: 19911213 NR Description: glucosyltransferase like protein [Vigna angularis]
  misc_feature (1)..(271): Homolog of NCBI NO: 34394680 NR Description: putative glucosyltransferase
  misc_feature (1)..(265): Homolog of NCBI NO: 34898742 NR Description: putative betanidin 6-O-glucosyltransferase
  misc_feature (1)..(267): Homolog of NCBI NO: 34394676 NR Description: putative glucosyltransferase
  misc_feature (1)..(260): Homolog of NCBI NO: 34394688 NR Description: putative glucosyltransferase
  misc_feature (1)..(273): Homolog of NCBI NO: 34394653 NR Description: putative glucosyltransferase-3
  misc_feature (1)..(264): Homolog of NCBI NO: 34394683 NR Description: putative flavonol 3-O-glucosyltransferase
  misc_feature (1)..(269): Homolog of NCBI NO: 34394651 NR Description: putative glucosyltransferase
MEAAGIIVNTIAEAEPRVLAAIADGRCTRGVPAPPVYSIGPVIPSTPPAEQQAQECVRWLDSQPPSSVVFLCFGSGGCFTAPQAHEIAHGLDRSGHRFLWVLRGTPEPGTKLPSDGNLAELLPADFLARTKDRGLVWPTKAPQKEILAHAAVGGFVTHCGWNSVLESLWHGVPMVPWPLGAEQHYNAFTLVADMGVAVALNVERKRKNFVEATELERAVKALMCDGETARKVRDKVMEIKAACRKAMEEGGSSNMSLQRLCDALVEGAVHPGK

SEQ ID NO: 4500 - DNA, 1523 bp, Zea mays subsp. mays
  misc_feature (1)..(1523): Ceres Seq. ID no. 12363351
  misc_feature: MA Experiment ID: 108527 Result: Up-regulated in Transcription
  misc_feature: MA Experiment 108527 PARAMETER Experiment Name: Zm_5mM_NO_P Parameter: Age (day) Value: 8
  misc_feature: MA Experiment 108527 PARAMETER Experiment Name: Zm_5mM_NO_P Parameter: Organism Value: Zea mays
  misc_feature: MA Experiment 108527 PARAMETER Experiment Name: Zm_5mM_NO_P Parameter: Plant Line Value: 35A19
  misc_feature: MA Experiment 108527 PARAMETER Experiment Name: Zm_5mM_NO_P Parameter: Timepoint (hr) Value: 6
  misc_feature: MA Experiment 108527 PARAMETER Experiment Name: Zm_5mM_NO_P Parameter: Tissue Value: Aerial
  misc_feature: MA Experiment 108527 PARAMETER Experiment Name: Zm_5mM_NO_P Parameter: Treatment Value: 5mM NO vs. No Treatment
  misc_feature: MA Experiment ID: 108528 Result: Down-regulated in Transcription
  misc_feature: MA Experiment 108528 PARAMETER Experiment Name: Zm_Imbibed_Seeds_P Parameter: Age (day) Value: 5 vs. 2
  misc_feature: MA Experiment 108528 PARAMETER Experiment Name: Zm_Imbibed_Seeds_P Parameter: Organism Value: Zea mays
  misc_feature: MA Experiment 108528 PARAMETER Experiment Name: Zm_Imbibed_Seeds_P Parameter: Plant Line Value: 35A19
  misc_feature: MA Experiment 108528 PARAMETER Experiment Name: Zm_Imbibed_Seeds_P Parameter: Tissue Value: Aerial vs. Embryo
  misc_feature: MA Experiment ID: 20000535 Result: Down-regulated in Transcription
  misc_feature: MA Experiment 20000535 PARAMETER Experiment Name: Zm_Hybrid_Seed_Dev_P Parameter: DAP Value: 30 vs. 12
  misc_feature: MA Experiment 20000535 PARAMETER Experiment Name: Zm_Hybrid_Seed_Dev_P Parameter: Organism Value: Zea mays
  misc_feature: MA Experiment 20000535 PARAMETER Experiment Name: Zm_Hybrid_Seed_Dev_P Parameter: Plant Line Value: 35A19
  misc_feature: MA Experiment 20000535 PARAMETER Experiment Name: Zm_Hybrid_Seed_Dev_P Parameter: Tissue Value: Embryo vs. Unfert Floret
  misc_feature: MA Experiment ID: 20000626 Result: Up-regulated in Transcription
  misc_feature: MA Experiment 20000626 PARAMETER Experiment Name: Zm_Herbicide-Treatments_P Parameter: Timepoint (hr) Value: 12
  misc_feature: MA Experiment 20000626 PARAMETER Experiment Name: Zm_Herbicide-Treatments_P Parameter: Tissue Value: Aerial
  misc_feature: MA Experiment 20000626 PARAMETER Experiment Name: Zm_Herbicide-Treatments_P Parameter: Treatment Value: Roundup vs. No Treatment
atttttccgtctcgccccaactgccgaccgccgccctcgccccggctcctccctttccctctagctagcaccaatcgttcatccagtctcacaaccgagctccccgaccaccagcacgcctcgcgcgtccctcccaacagcgtgctccagttccttcaatggcatctcgggcgcgcctgccgggcaccccggcctcgatcgccgtcctcatcctctccttcttccaaggtacgtacgtggtggctctgatccacttgcccgccgtggactgacgggctgcttgggtttgtgggtggtggtggatggaacccggtgcggcaccacgttcaccttcagcaaccgctgcggcgacacggtgtggccgggcctgctcgccggctcggggacgccgccgctggagaccacgggcttcgcgctggcgccggggcagtcgcgcgcgctgtacgcgccgcaggggtggtcgggccgcttctggggccgctccggctgcgacttcgacgccgcctccgccaagggctcctgcgccacgggcgactgcggctccggcgaggtcgagtgccgcggcgcgggggcgtccccgcccgccacgctcgccgagttcacgctcgacggcgccggcggcaaggacttctacgacgtcagcctcgtcgacggctacaacctgcccatgctcgtgcgggccaccgcgcccgaatgccccgacacggggtgcctcgtcgacctcaacgggctctgccccgacgagctccgcgccgcccacggccgcgcctgccgcagcgcctgcgaggcgttcggcagccccgagtactgctgcaacggcgcctacggcaaccccaacacctgccacccgtcacagtactcccagctcttcaagtcggcgtgccccaactcctacagctacgcctacgacgacgccacctccaccttcacctgcaaccacaccgattacaccatcaccttctgccccaaatccactccaaccagcgacaaatccgaacattcgtctcggaggccaagccacgagcaactggaagattcggtgtggcttgcatccttgaaggcaagtgacgccagtgctctggcaacaacgtcatggtcggcgtccattgtgctccgatctgccttggcaattgcagtggcgaccttgcttgctgcacaacttgcaccagatcatcctatggtcagcttgctatgattcatcatggttgcggttcttgatcggtaggagtcatctaagttattttctgacaagaagaggattagagcagtagcagtgatcagcaatgggaagagaatattgtgtaggctttttgtttgtggataggtgctagagaaggaatgatgtgttacaagttggcaactggaatttcatgaacgcattgcaaggcgattcaggttgctctgttgtcatcggcccctttttctatttttgcagtaaagcgcataaaaaacatctcgaatggatactgtaaccatttgatgtgcagaggttcacagagtaatgtgattttggttagaactcc

SEQ ID NO: 4501 - protein, 251 aa, Zea mays subsp. mays
  peptide (1)..(251): Ceres Seq. ID no. 12363352
  misc_feature (55)..(229): Pfam Name: Equine herpesvirus glycoprotein gp2 Pfam Description: Equine herpesvirus glycoprotein gp2
  misc_feature (3)..(231): Homolog of NCBI NO: 27375632 NR Description: blr0521 [Bradyrhizobium japonicum]
  misc_feature (61)..(232): Homolog of NCBI NO: 188864 NR Description: mucin
  misc_feature (1)..(229): Homolog of NCBI NO: 11360494 NR Description: antifreeze glycopeptide AFGP polyprotein
  misc_feature (8)..(231): Homolog of NCBI NO: 25989119 NR Description: unknown [Streptomyces aureofaciens]
  misc_feature (61)..(219): Homolog of NCBI NO: 9630030 NR Description: unknown [Orgyia pseudotsugata multicapsid
  misc_feature (66)..(231): Homolog of NCBI NO: 9630030 NR Description: unknown [Orgyia pseudotsugata multicapsid
  misc_feature (1)..(229): Homolog of NCBI NO: 11360494 NR Description: antifreeze glycopeptide AFGP polyprotein
  misc_feature (1)..(229): Homolog of NCBI NO: 11360494 NR Description: antifreeze glycopeptide AFGP polyprotein
  misc_feature (1)..(251): Homolog of NCBI NO: 11360494 NR Description: antifreeze glycopeptide AFGP polyprotein
  misc_feature (59)..(92): Homolog of NCBI NO: 18568262 NR Description: glycyl-tRNA synthetase [Zea mays]
MEPGAAPRSPSATAAATRCGRACSPARGRRRWRPRASRWRRGSRARCTRRRGGRAASGAAPAATSTPPPPRAPAPRATAAPARSSAAARGRPRPPRSPSSRSTAPAARTSTTSASSTATTCPCSCGPPRPNAPTRGASSTSTGSAPTSSAPPTAAPAAAPARRSAAPSTAATAPTATPTPATRHSTPSSSSRRAPTPTATPTTTPPPPSPATTPITPSPSAPNPLQPATNPNIRLGGQATSNWKIRCGLHP

SEQ ID NO: 4502 - protein, 175 aa, Zea mays subsp. mays
  peptide (1)..(175): Ceres Seq. ID no. 12363353
  misc_feature (1)..(100): Pfam Name: Thaumatin family Pfam Description: Thaumatin family
  misc_feature (1)..(153): Homolog of NCBI NO: 15222875 NR Description: thaumatin, putative
  misc_feature (1)..(163): Homolog of NCBI NO: 30686652 NR Description: thaumatin family [Arabidopsis thaliana]
  misc_feature (1)..(163): Homolog of NCBI NO: 25296204 NR Description: hypothetical protein T20H2.19 [imported] -
  misc_feature (1)..(149): Homolog of NCBI NO: 15233437 NR Description: thaumatin-like protein
  misc_feature (1)..(104): Homolog of NCBI NO: 15233738 NR Description: thaumatin-like protein; protein id: At4g24180.1
  misc_feature (1)..(104): Homolog of NCBI NO: 2262099 NR Description: thaumatin isolog [Arabidopsis thaliana]
  misc_feature (1)..(112): Homolog of NCBI NO: 18420282 NR Description: putative thaumatin-like protein
  misc_feature (1)..(112): Homolog of NCBI NO: 7442168 NR Description: pathogenesis-related protein F20M13.220 -
  misc_feature (1)..(112): Homolog of NCBI NO: 21592749 NR Description: putative thaumatin-like protein [Arabidopsis
  misc_feature (1)..(165): Homolog of NCBI NO: 37531042 NR Description: putative thaumatin-like protein
MLVRATAPECPDTGCLVDLNGLCPDELRAAHGRACRSACEAFGSPEYCCNGAYGNPNTCHPSQYSQLFKSACPNSYSYAYDDATSTFTCNHTDYTITFCPKSTPTSDKSEHSSRRPSHEQLEDSVWLASLKASDASALATTSWSASIVLRSALAIAVATLLAAQLAPDHPMVSLL

SEQ ID NO: 4503 - DNA, 1679 bp, Zea mays subsp. mays
  misc_feature (1)..(1679): Ceres Seq. ID no. 12435060
  misc_feature: MA Experiment ID: 108523 Result: Down-regulated in Transcription
  misc_feature: MA Experiment 108523 PARAMETER Experiment Name: Zm_42deg_Heat_P Parameter: Age (day) Value: 8
  misc_feature: MA Experiment 108523 PARAMETER Experiment Name: Zm_42deg_Heat_P Parameter: Organism Value: Zea mays
  misc_feature: MA Experiment 108523 PARAMETER Experiment Name: Zm_42deg_Heat_P Parameter: Plant Line Value: 35A19
  misc_feature: MA Experiment 108523 PARAMETER Experiment Name: Zm_42deg_Heat_P Parameter: Temperature (deg C) Value: 42 vs. 22
  misc_feature: MA Experiment 108523 PARAMETER Experiment Name: Zm_42deg_Heat_P Parameter: Timepoint (hr) Value: 6
  misc_feature: MA Experiment 108523 PARAMETER Experiment Name: Zm_42deg_Heat_P Parameter: Tissue Value: Aerial
  misc_feature: MA Experiment ID: 108527 Result: Down-regulated in Transcription
  misc_feature: MA Experiment 108527 PARAMETER Experiment Name: Zm_5mM_NO_P Parameter: Age (day) Value: 8
  misc_feature: MA Experiment 108527 PARAMETER Experiment Name: Zm_5mM_NO_P Parameter: Organism Value: Zea mays
  misc_feature: MA Experiment 108527 PARAMETER Experiment Name: Zm_5mM_NO_P Parameter: Plant Line Value: 35A19
  misc_feature: MA Experiment 108527 PARAMETER Experiment Name: Zm_5mM_NO_P Parameter: Timepoint (hr) Value: 6
  misc_feature: MA Experiment 108527 PARAMETER Experiment Name: Zm_5mM_NO_P Parameter: Tissue Value: Aerial
  misc_feature: MA Experiment 108527 PARAMETER Experiment Name: Zm_5mM_NO_P Parameter: Treatment Value: 5mM NO vs. No Treatment
  misc_feature: MA Experiment ID: 108529 Result: Up-regulated in Transcription
  misc_feature: MA Experiment 108529 PARAMETER Experiment Name: Zm_Imbibed_Seeds_P Parameter: Age (day) Value: 5 vs. 2
  misc_feature: MA Experiment 108529 PARAMETER Experiment Name: Zm_Imbibed_Seeds_P Parameter: Organism Value: Zea mays
  misc_feature: MA Experiment 108529 PARAMETER Experiment Name: Zm_Imbibed_Seeds_P Parameter: Plant Line Value: 35A19
  misc_feature: MA Experiment 108529 PARAMETER Experiment Name: Zm_Imbibed_Seeds_P Parameter: Tissue Value: Roots vs. Embryo
  misc_feature: MA Experiment ID: 108535 Result: Down-regulated in Transcription
  misc_feature: MA Experiment 108535 PARAMETER Experiment Name: Zm_Meristem_P Parameter: Age (day) Value: 8
  misc_feature: MA Experiment 108535 PARAMETER Experiment Name: Zm_Meristem_P Parameter: Organism Value: Zea mays
  misc_feature: MA Experiment 108535 PARAMETER Experiment Name: Zm_Meristem_P Parameter: Plant Line Value: 35A19
  misc_feature: MA Experiment 108535 PARAMETER Experiment Name: Zm_Meristem_P Parameter: Tissue Value: Root Meristem vs. Above Root Meristem
  misc_feature: MA Experiment ID: 108536 Result: Up-regulated in Transcription
  misc_feature: MA Experiment 108536 PARAMETER Experiment Name: Zm_Meristem_P Parameter: Age (day) Value: 8
  misc_feature: MA Experiment 108536 PARAMETER Experiment Name: Zm_Meristem_P Parameter: Organism Value: Zea mays
  misc_feature: MA Experiment 108536 PARAMETER Experiment Name: Zm_Meristem_P Parameter: Plant Line Value: 35A19
  misc_feature: MA Experiment 108536 PARAMETER Experiment Name: Zm_Meristem_P Parameter: Tissue Value: Shoot Meristem vs. Above Shoot Meristem
  misc_feature: MA Experiment ID: 108543 Result: Up-regulated in Transcription
  misc_feature: MA Experiment ID: 108544 Result: Up-regulated in Transcription
  misc_feature: MA Experiment ID: 108545 Result: Down-regulated in Transcription
  misc_feature: MA Experiment 108545 PARAMETER Experiment Name: Zm_Imbibed_Seeds_P Parameter: Age (day) Value: 3 vs. 2
  misc_feature: MA Experiment 108545 PARAMETER Experiment Name: Zm_Imbibed_Seeds_P Parameter: Organism Value: Zea mays
  misc_feature: MA Experiment 108545 PARAMETER Experiment Name: Zm_Imbibed_Seeds_P Parameter: Plant Line Value: 35A19
  misc_feature: MA Experiment 108545 PARAMETER Experiment Name: Zm_Imbibed_Seeds_P Parameter: Tissue Value: Aerial vs. Embryo
  misc_feature: MA Experiment ID: 108546 Result: Up-regulated in Transcription
  misc_feature: MA Experiment 108546 PARAMETER Experiment Name: Zm_Imbibed_Seeds_P Parameter: Age (day) Value: 3 vs. 2
  misc_feature: MA Experiment 108546 PARAMETER Experiment Name: Zm_Imbibed_Seeds_P Parameter: Organism Value: Zea mays
  misc_feature: MA Experiment 108546 PARAMETER Experiment Name: Zm_Imbibed_Seeds_P Parameter: Plant Line Value: 35A19
  misc_feature: MA Experiment 108546 PARAMETER Experiment Name: Zm_Imbibed_Seeds_P Parameter: Tissue Value: Roots vs. Embryo
  misc_feature: MA Experiment ID: 108547 Result: Down-regulated in Transcription
  misc_feature: MA Experiment 108547 PARAMETER Experiment Name: Zm_Imbibed_Seeds_P Parameter: Age (day) Value: 4 vs. 2
  misc_feature: MA Experiment 108547 PARAMETER Experiment Name: Zm_Imbibed_Seeds_P Parameter: Organism Value: Zea mays
  misc_feature: MA Experiment 108547 PARAMETER Experiment Name: Zm_Imbibed_Seeds_P Parameter: Plant Line Value: 35A19
  misc_feature: MA Experiment 108547 PARAMETER Experiment Name: Zm_Imbibed_Seeds_P Parameter: Tissue Value: Aerial vs. Embryo
  misc_feature: MA Experiment ID: 108559 Result: Down-regulated in Transcription
  misc_feature: MA Experiment 108559 PARAMETER Experiment Name: Zm_5mM_NO_P Parameter: Age (day) Value: 8
  misc_feature: MA Experiment 108559 PARAMETER Experiment Name: Zm_5mM_NO_P Parameter: Organism Value: Zea mays
  misc_feature: MA Experiment 108559 PARAMETER Experiment Name: Zm_5mM_NO_P Parameter: Plant Line Value: 35A19
  misc_feature: MA Experiment 108559 PARAMETER Experiment Name: Zm_5mM_NO_P Parameter: Timepoint (hr) Value: 12
  misc_feature: MA Experiment 108559 PARAMETER Experiment Name: Zm_5mM_NO_P Parameter: Tissue Value: Aerial
  misc_feature: MA Experiment 108559 PARAMETER Experiment Name: Zm_5mM_NO_P Parameter: Treatment Value: 5mM NO vs. No Treatment
  misc_feature: MA Experiment ID: 108687 Result: Down-regulated in Transcription
  misc_feature: MA Experiment 108687 PARAMETER Experiment Name: Zm_Embryos-Flowers__P Parameter: Tissue Value: Embryo vs. Aerial+
  misc_feature: MA Experiment ID: 20000108 Result: Down-regulated in Transcription
  misc_feature: MA Experiment 20000108 PARAMETER Experiment Name: Zm_Root-Tips_P Parameter: Age (day) Value: 12
  misc_feature: MA Experiment 20000108 PARAMETER Experiment Name: Zm_Root-Tips_P Parameter: Organism Value: Zea mays
  misc_feature: MA Experiment 20000108 PARAMETER Experiment Name: Zm_Root-Tips_P Parameter: Tissue Value: Root tips vs. Root mid region    35
  misc_feature: MA Experiment 20000108 PARAMETER Experiment Name: Zm_Root-Tips_P Parameter: Tissue Value: Root tips vs. Root mid region   Sequence Listing-Misc Features (4)
  misc_feature: MA Experiment ID: 20000477 Result: Down-regulated in Transcription
  misc_feature: MA Experiment 20000477 PARAMETER Experiment Name: Zm_5mM_SA_P Parameter: Age (day) Value: 10
  misc_feature: MA Experiment 20000477 PARAMETER Experiment Name: Zm_5mM_SA_P Parameter: Organism Value: Zea mays
  misc_feature: MA Experiment 20000477 PARAMETER Experiment Name: Zm_5mM_SA_P Parameter: Plant Line Value: 35A19
  misc_feature: MA Experiment 20000477 PARAMETER Experiment Name: Zm_5mM_SA_P Parameter: Timepoint (hr) Value: 48
  misc_feature: MA Experiment 20000477 PARAMETER Experiment Name: Zm_5mM_SA_P Parameter: Tissue Value: Aerial
  misc_feature: MA Experiment 20000477 PARAMETER Experiment Name: Zm_5mM_SA_P Parameter: Treatment Value: 5mM SA vs. No Treatment
  misc_feature: MA Experiment ID: 20000478 Result: Down-regulated in Transcription
  misc_feature: MA Experiment 20000478 PARAMETER Experiment Name: Zm_5mM_SA_P Parameter: Age (day) Value: 11
  misc_feature: MA Experiment 20000478 PARAMETER Experiment Name: Zm_5mM_SA_P Parameter: Organism Value: Zea mays
  misc_feature: MA Experiment 20000478 PARAMETER Experiment Name: Zm_5mM_SA_P Parameter: Plant Line Value: 35A19
  misc_feature: MA Experiment 20000478 PARAMETER Experiment Name: Zm_5mM_SA_P Parameter: Timepoint (hr) Value: 72
  misc_feature: MA Experiment 20000478 PARAMETER Experiment Name: Zm_5mM_SA_P Parameter: Tissue Value: Aerial
  misc_feature: MA Experiment 20000478 PARAMETER Experiment Name: Zm_5mM_SA_P Parameter: Treatment Value: 5mM SA vs. No Treatment
  misc_feature: MA Experiment ID: 20000492 Result: Down-regulated in Transcription
  misc_feature: MA Experiment 20000492 PARAMETER Experiment Name: Zm_Hybrid_Seed_Dev_P Parameter: DAP Value: 12
  misc_feature: MA Experiment 20000492 PARAMETER Experiment Name: Zm_Hybrid_Seed_Dev_P Parameter: Organism Value: Zea mays
  misc_feature: MA Experiment 20000492 PARAMETER Experiment Name: Zm_Hybrid_Seed_Dev_P Parameter: Plant Line Value: 35A19
  misc_feature: MA Experiment 20000492 PARAMETER Experiment Name: Zm_Hybrid_Seed_Dev_P Parameter: Tissue Value: Fert Kernel vs. Unfert Floret
  misc_feature: MA Experiment ID: 20000535 Result: Down-regulated in Transcription
  misc_feature: MA Experiment 20000535 PARAMETER Experiment Name: Zm_Hybrid_Seed_Dev_P Parameter: DAP Value: 30 vs. 12
  misc_feature: MA Experiment 20000535 PARAMETER Experiment Name: Zm_Hybrid_Seed_Dev_P Parameter: Organism Value: Zea mays
  misc_feature: MA Experiment 20000535 PARAMETER Experiment Name: Zm_Hybrid_Seed_Dev_P Parameter: Plant Line Value: 35A19
  misc_feature: MA Experiment 20000535 PARAMETER Experiment Name: Zm_Hybrid_Seed_Dev_P Parameter: Tissue Value: Embryo vs. Unfert Floret
gcacgagaccattacctagaacatcctaatcgaaaaacattccatcggtcgtgaaaagaaaaagggaaacaaaccaagctagctagagaaaagaagaagctggtactagctagctagctagcttagctatgggcaccatcgtggacgctgacgtcgggttcgcggtgaagaggacgagcaggtcgctggtgccgcctgcgtcggcgacgccgcgggagacgctgcggctgtcggtgatcgaccgcgtggcggggctgcgccacctggtgcggtcgctgcacgtgttcgccgcgggcggcgacaagaagcggcagcaggcgacggcggcgacgccggccaaggcgctgcgggaggcgctggggaaggcgctggtggactactacccgttcgcggggcggttcgtggtggtggacgcggagggcggcggggagacgcgggtggcgtgcaccggcgagggcgcctggttcgtggaggccaacgccgcgtgctcgctcgaggaggcccgccacctcgaccaccccatgctcatccccaaggagcagctgctgccggagccctcgccggacgtcaacccgctggacatgccgctcatgatgcaggtgacggagttctcgtgcggcggcttccgtggtggggctcatctccgtgcacacgatcgcggacggcctgggcgcggggcagttcatcaacacggtggcgacgtacgcgcggggcgccacgtccgccacgcccaagcccgtgtggggcgcgcgacgtgatcccggacccgcccaagatgccggcgcctccgccgcgcctggacctgctggacctgcgctacttcacggcggacctgagcccggaccacatcggcaaggtgaaggcgcggtacctggagtcgacggggcagcgctgctcggcgttcgacgtgtgcgtggcgcgcacgtggcaggcccgcgtgcgcgcgctgcggctccccgacccggccgcgcccgtgcacgtctgcttcttcgccaacacccgccacctgcttccggcggcggccacggccgggttctacggcaactgcttctacacggtgaaggcgacgcgggcgagcggggaggtggcggcggccgacgtggtggacgttgtgcgcgccatccgcgacgccaaggcgaggctgggcgccgacttcgcgcgctgggccgcgggcggcttcgaccgcgacccctacgagctcaccttcacctacgactcgctcttcgtctccgactggacgcgcctcggcttcctcgaggcggactacggctggggcaccccgacgcacgtcctgcccttctcctaccacccgttcatggcagtcgccgtcatcggcgccccgcctaagcccaagcccggcgcccgcatcatgaccatgtgcgtccaggagcagcacctgcccgagttccaggagcagatgatgagccagcaggccgcctaggcctagctagctcctgatcacccccatcaccatgttcatctatatcgtcatcgtcatcatgcatgcggcgtgcacgtttggaatatttgttaatcaatcaataacggtgaggtgaggttgctattatatgaagtagtagtaacacctcaacaacaacaacccaatgcaatgggaactcgcgtgtaatttgctccttcttcttcaaatataattccgcctcaattgtatgtatgtatgt

SEQ ID NO: 4504 - protein, 221 aa, Zea mays subsp. mays
  peptide (1)..(221): Ceres Seq. ID no. 12435061
  misc_feature (1)..(215): Pfam Name: Transferase family Pfam Description: Transferase family
  misc_feature (4)..(212): Homolog of NCBI NO: 28558088 NR Description: 3'-N-debenzoyl-2'-deoxytaxol N-benzoyltransferase
  misc_feature (1)..(217): Homolog of NCBI NO: 38346537 NR Description: OSJNBa0040D17.12 [Oryza sativa (japonica
  misc_feature (1)..(215): Homolog of NCBI NO: 38347149 NR Description: OSJNBa0039G19.9 [Oryza sativa (japonica
  misc_feature (86)..(215): Homolog of NCBI NO: 34894340 NR Description: unnamed protein product [Oryza sativa (japonica
  misc_feature (1)..(218): Homolog of NCBI NO: 15228696 NR Description: putative protein; protein id: At3g62160.1
  misc_feature (1)..(215): Homolog of NCBI NO: 34912652 NR Description: putative acetyl transferase
  misc_feature (1)..(216): Homolog of NCBI NO: 34906150 NR Description: putative 0-deacetylbaccatin III-10-O-acetyl
  misc_feature (1)..(215): Homolog of NCBI NO: 18558566 NR Description: putative 0-deacetylbaccatin III-10-O-acetyl
  misc_feature (1)..(215): Homolog of NCBI NO: 34906304 NR Description: unnamed protein product [Oryza sativa (japonica
  misc_feature (1)..(215): Homolog of NCBI NO: 34912654 NR Description: putative acetyl transferase
MPAPPPRLDLLDLRYFTADLSPDHIGKVKARYLESTGQRCSAFDVCVARTWQARVRALRLPDPAAPVHVCFFANTRHLLPAAATAGFYGNCFYTVKATRASGEVAAADVVDVVRAIRDAKARLGADFARWAAGGFDRDPYELTFTYDSLFVSDWTRLGFLEADYGWGTPTHVLPFSYHPFMAVAVIGAPPKPKPGARIMTMCVQEQHLPEFQEQMMSQQAA

SEQ ID NO: 4505 - protein, 209 aa, Zea mays subsp. mays
  peptide (1)..(209): Ceres Seq. ID no. 12435062
  misc_feature (12)..(169): Pfam Name: Transferase family Pfam Description: Transferase family
  misc_feature (11)..(166): Homolog of NCBI NO: 28558099 NR Description: 10-deacetylbaccatin III 10-O-acetyltransferase
  misc_feature (11)..(184): Homolog of NCBI NO: 28558088 NR Description: 3'-N-debenzoyl-2'-deoxytaxol N-benzoyltransferase
  misc_feature (9)..(178): Homolog of NCBI NO: 38346537 NR Description: OSJNBa0040D17.12 [Oryza sativa (japonica
  misc_feature (9)..(158): Homolog of NCBI NO: 34894342 NR Description: unnamed protein product [Oryza sativa (japonica
  misc_feature (23)..(166): Homolog of NCBI NO: 38347149 NR Description: OSJNBa0039G19.9 [Oryza sativa (japonica
  misc_feature (9)..(166): Homolog of NCBI NO: 15228696 NR Description: putative protein; protein id: At3g62160.1
  misc_feature (13)..(169): Homolog of NCBI NO: 34912652 NR Description: putative acetyl transferase
  misc_feature (12)..(195): Homolog of NCBI NO: 34906150 NR Description: putative 0-deacetylbaccatin III-10-O-acetyl
  misc_feature (11)..(195): Homolog of NCBI NO: 34906304 NR Description: unnamed protein product [Oryza sativa (japonica
  misc_feature (12)..(169): Homolog of NCBI NO: 34912654 NR Description: putative acetyl transferase
MGTIVDADVGFAVKRTSRSLVPPASATPRETLRLSVIDRVAGLRHLVRSLHVFAAGGDKKRQQATAATPAKALREALGKALVDYYPFAGRFVVVDAEGGGETRVACTGEGAWFVEANAACSLEEARHLDHPMLIPKEQLLPEPSPDVNPLDMPLMMQVTEFSCGGFRGGAHLRAHDRGRPGRGAVHQHGGDVRAGRHVRHAQARVGRAT

SEQ ID NO: 4506 - DNA, 2059 bp, Zea mays subsp. mays
  misc_feature (1)..(2059): Ceres Seq. ID no. 12593811
  misc_feature: MA Experiment ID: 108528 Result: Down-regulated in Transcription
  misc_feature: MA Experiment 108528 PARAMETER Experiment Name: Zm_Imbibed_Seeds_P Parameter: Age (day) Value: 5 vs. 2
  misc_feature: MA Experiment 108528 PARAMETER Experiment Name: Zm_Imbibed_Seeds_P Parameter: Organism Value: Zea mays
  misc_feature: MA Experiment 108528 PARAMETER Experiment Name: Zm_Imbibed_Seeds_P Parameter: Plant Line Value: 35A19
  misc_feature: MA Experiment 108528 PARAMETER Experiment Name: Zm_Imbibed_Seeds_P Parameter: Tissue Value: Aerial vs. Embryo
  misc_feature: MA Experiment ID: 108530 Result: Down-regulated in Transcription
  misc_feature: MA Experiment 108530 PARAMETER Experiment Name: Zm_Imbibed_Seeds_P Parameter: Age (day) Value: 6 vs. 2
  misc_feature: MA Experiment 108530 PARAMETER Experiment Name: Zm_Imbibed_Seeds_P Parameter: Organism Value: Zea mays
  misc_feature: MA Experiment 108530 PARAMETER Experiment Name: Zm_Imbibed_Seeds_P Parameter: Plant Line Value: 35A19
  misc_feature: MA Experiment 108530 PARAMETER Experiment Name: Zm_Imbibed_Seeds_P Parameter: Tissue Value: Aerial vs. Embryo
  misc_feature: MA Experiment ID: 20000108 Result: Up-regulated in Transcription
  misc_feature: MA Experiment 20000108 PARAMETER Experiment Name: Zm_Root-Tips_P Parameter: Age (day) Value: 12
  misc_feature: MA Experiment 20000108 PARAMETER Experiment Name: Zm_Root-Tips_P Parameter: Organism Value: Zea mays
  misc_feature: MA Experiment 20000108 PARAMETER Experiment Name: Zm_Root-Tips_P Parameter: Tissue Value: Root tips vs. Root mid region    35
  misc_feature: MA Experiment 20000108 PARAMETER Experiment Name: Zm_Root-Tips_P Parameter: Tissue Value: Root tips vs. Root mid region   Sequence Listing-Misc Features (4)
aatttgatcaaccgccatccattctcctcctccgttgcagctgcggcatccatccagtagtccgaccaatccatggcttcagcgttcgggaccgcctccacttgcggcattaaacatgcacctgccggcgttgcgcttgctgcgcccatgaagcacctttccctcgtctcgccctcgctggtttcgcttccgcgcaagatgaggccgcgaaggaagtacaacttcagggtaaacgctgcaaaggagctgcatttcaacaaggatggctcggctatcaggaaaatgcaaaatggggtcaacaagcttgcagatctcgtcggggttactcttggaccaaaggggcgaaatgtagtcctcgaaagcaagtatggctcacctaaaattgtcaatgatggtgtcactgtggcaaaggaggttgaacttgaggaccctgttgaaaatattggtgctaaattggtccgccaagctgctgctaaaacaaatgacttggctggtgatgggacaaccacttcggttgtccttgctcaagggatgattactgagggtgtaaaggttgtagctgctggtgctaatccagtgcagatcacccgtggtattgagaaaacagccaaagcactagtcagtgaactccaaaagatgtccaaggaggttgaggacagtgagcttgctgatgttgctgcagttagtgcgggaaataactatgaaattgggaatatgataactgaggctatgaaaaaggttgggcggcagggagtggtcacacttgaagaaggaaagagtgctgaaaataacctctattctgttgagggaatgcagtttgaccgtggctatatttctccctactttgtgactgacagtgaaaaaatgacagtcgagtatgagaactgcaagcttctccttgtggacaagaaaattaacaatgccagagatcttatcactatcctggaggatgctattagaagtggatatccaattctaatagtggcagaggacattgagcaggaagctcttgcaacccttgtggttaataggcttagaggtgcattgaagattgctgctattaaggcccctggttttggagagcgcaaaagtcaatatcttgatgacattgctactctcactggaggcactgtcatcagagaagaagttggattatccttagacaaggcagacaatgcggtcctaggaactgctgctaaggttgtagttaccaaggattcaacaacaatagtgggagatggcactacacaggaggaagtgaacaaaagggtgacacaaatcaagaaccagattgaggctactgaacaagaatatgagagagaaaaactaaacgagaggatagctaaactctctggtggtgttgctgtcattcaggtaggagcacagacagaaactgagctcaaggaaaagaaattgagggttgaggatgccctgaatgctacaaaggcagcagtcgaggaaggtatcgttgtaggtggtggctgtacccttttgaggcttgcatcaaaatttgatgcaattatagagacccttgagaacgatgaacagaaggttggggctgaaattgtaaggaagtccttgagctatccacttaaattgattgcaaaaaatgcaggcgttaatggcagtgtggttactgagaaggttcttgccaatgagaacttcaggtatgggtacaatgcggctacaggggagtatgaggacttgatggctgctggtatcattgatcccaccaaggttgtgaggtgctgcttggagcatgctgcatcggtggcgaaaaccttcatcacctctgatgccgttgttgttgacgccaaggtggctgagcaagcaccatcatctcctgcaaacccaatggcaatgggtggtggctcaggttttgggttctaaattgttcagctgcccttcgttccatcgcagcgacagaatcttagtttcgagatataataataaattggatgatgttagtttcgagatattagttggatgttgttattgttgtctcaaattataaaaaatcaagtgcaagtaaccaagacagctgaaaaaaatagttttg

SEQ ID NO: 4507 - protein, 605 aa, Zea mays subsp. mays
  peptide (1)..(605): Ceres Seq. ID no. 12593812
  misc_feature (78)..(582): Pfam Name: TCP-1/cpn60 chaperonin family Pfam Description: TCP-1/cpn60 chaperonin family
  misc_feature (50)..(594): Homolog of NCBI NO: 15222666 NR Description: chaperonin precursor, putative; protein id:
  misc_feature (102)..(605): Homolog of NCBI NO: 2493650 NR Description: RUBISCO SUBUNIT BINDING-PROTEIN BETA SUBUNIT (60
  misc_feature (1)..(588): Homolog of NCBI NO: 134104 NR Description: RuBisCO subunit binding-protein beta subunit,
  misc_feature (1)..(605): Homolog of NCBI NO: 30696748 NR Description: chaperonin, putative [Arabidopsis thaliana]
  misc_feature (1)..(605): Homolog of NCBI NO: 81601 NR Description: chaperonin 60 beta precursor - Arabidopsis
  misc_feature (1)..(605): Homolog of NCBI NO: 7443855 NR Description: probable chaperonin 60 beta chain precursor,
  misc_feature (1)..(605): Homolog of NCBI NO: 15222729 NR Description: Rubisco subunit binding-protein beta subunit
  misc_feature (1)..(605): Homolog of NCBI NO: 15231255 NR Description: chaperonin 60 beta, putative; protein id:
  misc_feature (1)..(604): Homolog of NCBI NO: 2506277 NR Description: RuBisCO subunit binding-protein beta subunit,
  misc_feature (1)..(605): Homolog of NCBI NO: 34897924 NR Description: ESTs C99033(E4350),C99032(E4350),D46006(S10372), correspond to a region of the predicted gene.~Similar to
MASAFGTASTCGIKHAPAGVALAAPMKHLSLVSPSLVSLPRKMRPRRKYNFRVNAAKELHFNKDGSAIRKMQNGVNKLADLVGVTLGPKGRNVVLESKYGSPKIVNDGVTVAKEVELEDPVENIGAKLVRQAAAKTNDLAGDGTTTSVVLAQGMITEGVKVVAAGANPVQITRGIEKTAKALVSELQKMSKEVEDSELADVAAVSAGNNYEIGNMITEAMKKVGRQGVVTLEEGKSAENNLYSVEGMQFDRGYISPYFVTDSEKMTVEYENCKLLLVDKKINNARDLITILEDAIRSGYPILIVAEDIEQEALATLVVNRLRGALKIAAIKAPGFGERKSQYLDDIATLTGGTVIREEVGLSLDKADNAVLGTAAKVVVTKDSTTIVGDGTTQEEVNKRVTQIKNQIEATEQEYEREKLNERIAKLSGGVAVIQVGAQTETELKEKKLRVEDALNATKAAVEEGIVVGGGCTLLRLASKFDAIIETLENDEQKVGAEIVRKSLSYPLKLIAKNAGVNGSVVTEKVLANENFRYGYNAATGEYEDLMAAGIIDPTKVVRCCLEHAASVAKTFITSDAVVVDAKVAEQAPSSPANPMAMGGGSGFGF

SEQ ID NO: 4508 - protein, 580 aa, Zea mays subsp. mays
  peptide (1)..(580): Ceres Seq. ID no. 12593813
  misc_feature (53)..(557): Pfam Name: TCP-1/cpn60 chaperonin family Pfam Description: TCP-1/cpn60 chaperonin family
  misc_feature (1)..(579): Homolog of NCBI NO: 2506277 NR Description: RuBisCO subunit binding-protein beta subunit,
  misc_feature (1)..(580): Homolog of NCBI NO: 15222729 NR Description: Rubisco subunit binding-protein beta subunit
  misc_feature (25)..(569): Homolog of NCBI NO: 15222666 NR Description: chaperonin precursor, putative; protein id:
  misc_feature (1)..(563): Homolog of NCBI NO: 134104 NR Description: RuBisCO subunit binding-protein beta subunit,
  misc_feature (1)..(580): Homolog of NCBI NO: 81601 NR Description: chaperonin 60 beta precursor - Arabidopsis
  misc_feature (1)..(580): Homolog of NCBI NO: 7443855 NR Description: probable chaperonin 60 beta chain precursor,
  misc_feature (1)..(580): Homolog of NCBI NO: 30696748 NR Description: chaperonin, putative [Arabidopsis thaliana]
  misc_feature (77)..(580): Homolog of NCBI NO: 2493650 NR Description: RUBISCO SUBUNIT BINDING-PROTEIN BETA SUBUNIT (60
  misc_feature (1)..(580): Homolog of NCBI NO: 15231255 NR Description: chaperonin 60 beta, putative; protein id:
  misc_feature (1)..(580): Homolog of NCBI NO: 34897924 NR Description: ESTs C99033(E4350),C99032(E4350),D46006(S10372), correspond to a region of the predicted gene.~Similar to
MKHLSLVSPSLVSLPRKMRPRRKYNFRVNAAKELHFNKDGSAIRKMQNGVNKLADLVGVTLGPKGRNVVLESKYGSPKIVNDGVTVAKEVELEDPVENIGAKLVRQAAAKTNDLAGDGTTTSVVLAQGMITEGVKVVAAGANPVQITRGIEKTAKALVSELQKMSKEVEDSELADVAAVSAGNNYEIGNMITEAMKKVGRQGVVTLEEGKSAENNLYSVEGMQFDRGYISPYFVTDSEKMTVEYENCKLLLVDKKINNARDLITILEDAIRSGYPILIVAEDIEQEALATLVVNRLRGALKIAAIKAPGFGERKSQYLDDIATLTGGTVIREEVGLSLDKADNAVLGTAAKVVVTKDSTTIVGDGTTQEEVNKRVTQIKNQIEATEQEYEREKLNERIAKLSGGVAVIQVGAQTETELKEKKLRVEDALNATKAAVEEGIVVGGGCTLLRLASKFDAIIETLENDEQKVGAEIVRKSLSYPLKLIAKNAGVNGSVVTEKVLANENFRYGYNAATGEYEDLMAAGIIDPTKVVRCCLEHAASVAKTFITSDAVVVDAKVAEQAPSSPANPMAMGGGSGFGF

SEQ ID NO: 4509 - protein, 563 aa, Zea mays subsp. mays
  peptide (1)..(563): Ceres Seq. ID no. 12593814
  misc_feature (36)..(540): Pfam Name: TCP-1/cpn60 chaperonin family Pfam Description: TCP-1/cpn60 chaperonin family
  misc_feature (8)..(552): Homolog of NCBI NO: 15222666 NR Description: chaperonin precursor, putative; protein id:
  misc_feature (60)..(563): Homolog of NCBI NO: 2493650 NR Description: RUBISCO SUBUNIT BINDING-PROTEIN BETA SUBUNIT (60
  misc_feature (1)..(546): Homolog of NCBI NO: 134104 NR Description: RuBisCO subunit binding-protein beta subunit,
  misc_feature (1)..(563): Homolog of NCBI NO: 30696748 NR Description: chaperonin, putative [Arabidopsis thaliana]
  misc_feature (1)..(563): Homolog of NCBI NO: 81601 NR Description: chaperonin 60 beta precursor - Arabidopsis
  misc_feature (1)..(563): Homolog of NCBI NO: 7443855 NR Description: probable chaperonin 60 beta chain precursor,
  misc_feature (1)..(563): Homolog of NCBI NO: 15222729 NR Description: Rubisco subunit binding-protein beta subunit
  misc_feature (1)..(563): Homolog of NCBI NO: 15231255 NR Description: chaperonin 60 beta, putative; protein id:
  misc_feature (1)..(562): Homolog of NCBI NO: 2506277 NR Description: RuBisCO subunit binding-protein beta subunit,
  misc_feature (1)..(563): Homolog of NCBI NO: 34897924 NR Description: ESTs C99033(E4350),C99032(E4350),D46006(S10372), correspond to a region of the predicted gene.~Similar to
MRPRRKYNFRVNAAKELHFNKDGSAIRKMQNGVNKLADLVGVTLGPKGRNVVLESKYGSPKIVNDGVTVAKEVELEDPVENIGAKLVRQAAAKTNDLAGDGTTTSVVLAQGMITEGVKVVAAGANPVQITRGIEKTAKALVSELQKMSKEVEDSELADVAAVSAGNNYEIGNMITEAMKKVGRQGVVTLEEGKSAENNLYSVEGMQFDRGYISPYFVTDSEKMTVEYENCKLLLVDKKINNARDLITILEDAIRSGYPILIVAEDIEQEALATLVVNRLRGALKIAAIKAPGFGERKSQYLDDIATLTGGTVIREEVGLSLDKADNAVLGTAAKVVVTKDSTTIVGDGTTQEEVNKRVTQIKNQIEATEQEYEREKLNERIAKLSGGVAVIQVGAQTETELKEKKLRVEDALNATKAAVEEGIVVGGGCTLLRLASKFDAIIETLENDEQKVGAEIVRKSLSYPLKLIAKNAGVNGSVVTEKVLANENFRYGYNAATGEYEDLMAAGIIDPTKVVRCCLEHAASVAKTFITSDAVVVDAKVAEQAPSSPANPMAMGGGSGFGF

SEQ ID NO: 4510 - DNA, 1464 bp, Zea mays subsp. mays
  misc_feature (1)..(1464): Ceres Seq. ID no. 12376480
  misc_feature: MA Experiment ID: 20000492 Result: Up-regulated in Transcription
  misc_feature: MA Experiment 20000492 PARAMETER Experiment Name: Zm_Hybrid_Seed_Dev_P Parameter: DAP Value: 12
  misc_feature: MA Experiment 20000492 PARAMETER Experiment Name: Zm_Hybrid_Seed_Dev_P Parameter: Organism Value: Zea mays
  misc_feature: MA Experiment 20000492 PARAMETER Experiment Name: Zm_Hybrid_Seed_Dev_P Parameter: Plant Line Value: 35A19
  misc_feature: MA Experiment 20000492 PARAMETER Experiment Name: Zm_Hybrid_Seed_Dev_P Parameter: Tissue Value: Fert Kernel vs. Unfert Floret
aaagctcaaaccgagcaatagcagtccttgctcctccaacttccctcctggcttctgcccctttgtctgcgctcctcacgccgccccccgccccagccccacacccgcattccccagatctccatggactcgaactcgacccctcccacggacccggcggcctcctgcttggcctccgcctctgcggcggtggcatcgggggacgtcgccgcgatgctgccggactcgccgccgcggcgtggggcgggccaccgccgcgcacagtcggagatcctcctcggcggcgccgcgctccccgacgacctcaccttcgacgcggacctcggcgttgtcggggaggcctgcgtggccggcgacgaggatgaggaggatgacgacgacgacgaggaaggggtcggcggcgctggcggcagccggatgttcgagatgttcctcgagaacggtggcaagctcccgggaccgccggagccgtcggcgcatccgcattcgacgccgccgcggccacggcaccatcacagcatgtctatggatgggtccacgtctttgtttggttccgccgccgccgggatgcctgggaggtcgggcactgatgccaagaaggctatttctgacgctaagctcgccgagctcgcgcttgttgaccccaagcgtgccaagaggattttggcaaaccgccagtcagctgctaggtcgaaagaaagaaagatgcgctacattgcggagcttgaaaggaaagtacagactctccaattagaagcaactacactatcagctcagctggccatgttgcagcgagatacgactggtatgacaagcgagaatagtgatctgaagatacgtgtgcagacaatggagcagcaggttcagctgcaggacgctctgaacgacaggctaagagacgagattcagcagctgaaggttgcaacaggacaggtaaacgccagcattggaaaaacaggaaactctggtatgtcatcatttggaggtaatccacaaagttaccagcgtagccatatacagtctcttctgactgctcagcacctgcagcggctccggatccactcccaacatcagcaacagcagacgcattttcagcagcagcagcagcagccgcagccgcagctgctgctgcaggaggcgcatccatttccggtggacctaaagatgagaggattttctctgtcatcacatgctcagaacgcaggtgcatcagacagccatgctgccaagagcgaaccctgagatttagcatgtattcatgtgggttgttagaaataataatgtcgctctgttagcgtggtgtctaggtgaacttcaaattgtttgaggtgcttagattttgtgcagcctggagctcccatttggttgtaagcttcagtgctgactgaccggtcatttaccttgcctaatgcttgtacctgggtcctggccatgactttgtgcctggaggatggagccgttcgc

SEQ ID NO: 4511 - protein, 372 aa, Zea mays subsp. mays
  peptide (1)..(372): Ceres Seq. ID no. 12376481
  misc_feature (173)..(235): Pfam Name: bZIP transcription factor Pfam Description: bZIP transcription factor
  misc_feature (112)..(332): Homolog of NCBI NO: 2921823 NR Description: shoot-forming PKSF1 [Paulownia kawakamii]
  misc_feature (109)..(353): Homolog of NCBI NO: 34394739 NR Description: putative transcription activator RF2a
  misc_feature (34)..(283): Homolog of NCBI NO: 39579226 NR Description: bZIP transcription factor RF2b
  misc_feature (30)..(340): Homolog of NCBI NO: 25453519 NR Description: b-Zip DNA binding protein [imported] -
  misc_feature (30)..(340): Homolog of NCBI NO: 15226727 NR Description: bZip DNA binding protein
  misc_feature (25)..(342): Homolog of NCBI NO: 15224665 NR Description: bZIP transcription factor (POSF21)
  misc_feature (19)..(349): Homolog of NCBI NO: 7489564 NR Description: probable transcription activator RF2a - rice
  misc_feature (4)..(372): Homolog of NCBI NO: 21553831 NR Description: transcriptional activator RF2a, putative
  misc_feature (4)..(372): Homolog of NCBI NO: 15221391 NR Description: bZIP protein; protein id: At1g06070.1, supported
  misc_feature (1)..(372): Homolog of NCBI NO: 21740783 NR Description: OSJNBa0067K08.24 [Oryza sativa (japonica
MDSNSTPPTDPAASCLASASAAVASGDVAAMLPDSPPRRGAGHRRAQSEILLGGAALPDDLTFDADLGVVGEACVAGDEDEEDDDDDEEGVGGAGGSRMFEMFLENGGKLPGPPEPSAHPHSTPPRPRHHHSMSMDGSTSLFGSAAAGMPGRSGTDAKKAISDAKLAELALVDPKRAKRILANRQSAARSKERKMRYIAELERKVQTLQLEATTLSAQLAMLQRDTTGMTSENSDLKIRVQTMEQQVQLQDALNDRLRDEIQQLKVATGQVNASIGKTGNSGMSSFGGNPQSYQRSHIQSLLTAQHLQRLRIHSQHQQQQTHFQQQQQQPQPQLLLQEAHPFPVDLKMRGFSLSSHAQNAGASDSHAAKSEP

SEQ ID NO: 4512 - protein, 342 aa, Zea mays subsp. mays
  peptide (1)..(342): Ceres Seq. ID no. 12376482
  misc_feature (143)..(205): Pfam Name: bZIP transcription factor Pfam Description: bZIP transcription factor
  misc_feature (82)..(302): Homolog of NCBI NO: 2921823 NR Description: shoot-forming PKSF1 [Paulownia kawakamii]
  misc_feature (79)..(323): Homolog of NCBI NO: 34394739 NR Description: putative transcription activator RF2a
  misc_feature (4)..(253): Homolog of NCBI NO: 39579226 NR Description: bZIP transcription factor RF2b
  misc_feature (1)..(310): Homolog of NCBI NO: 25453519 NR Description: b-Zip DNA binding protein [imported] -
  misc_feature (1)..(310): Homolog of NCBI NO: 15226727 NR Description: bZip DNA binding protein
  misc_feature (1)..(312): Homolog of NCBI NO: 15224665 NR Description: bZIP transcription factor (POSF21)
  misc_feature (1)..(319): Homolog of NCBI NO: 7489564 NR Description: probable transcription activator RF2a - rice
  misc_feature (1)..(342): Homolog of NCBI NO: 21553831 NR Description: transcriptional activator RF2a, putative
  misc_feature (1)..(342): Homolog of NCBI NO: 15221391 NR Description: bZIP protein; protein id: At1g06070.1, supported
  misc_feature (1)..(342): Homolog of NCBI NO: 21740783 NR Description: OSJNBa0067K08.24 [Oryza sativa (japonica
MLPDSPPRRGAGHRRAQSEILLGGAALPDDLTFDADLGVVGEACVAGDEDEEDDDDDEEGVGGAGGSRMFEMFLENGGKLPGPPEPSAHPHSTPPRPRHHHSMSMDGSTSLFGSAAAGMPGRSGTDAKKAISDAKLAELALVDPKRAKRILANRQSAARSKERKMRYIAELERKVQTLQLEATTLSAQLAMLQRDTTGMTSENSDLKIRVQTMEQQVQLQDALNDRLRDEIQQLKVATGQVNASIGKTGNSGMSSFGGNPQSYQRSHIQSLLTAQHLQRLRIHSQHQQQQTHFQQQQQQPQPQLLLQEAHPFPVDLKMRGFSLSSHAQNAGASDSHAAKSEP

SEQ ID NO: 4513 - protein, 274 aa, Zea mays subsp. mays
  peptide (1)..(274): Ceres Seq. ID no. 12376483
  misc_feature (75)..(137): Pfam Name: bZIP transcription factor Pfam Description: bZIP transcription factor
  misc_feature (14)..(234): Homolog of NCBI NO: 2921823 NR Description: shoot-forming PKSF1 [Paulownia kawakamii]
  misc_feature (11)..(255): Homolog of NCBI NO: 34394739 NR Description: putative transcription activator RF2a
  misc_feature (1)..(185): Homolog of NCBI NO: 39579226 NR Description: bZIP transcription factor RF2b
  misc_feature (1)..(242): Homolog of NCBI NO: 25453519 NR Description: b-Zip DNA binding protein [imported] -
  misc_feature (1)..(242): Homolog of NCBI NO: 15226727 NR Description: bZip DNA binding protein
  misc_feature (1)..(244): Homolog of NCBI NO: 15224665 NR Description: bZIP transcription factor (POSF21)
  misc_feature (1)..(251): Homolog of NCBI NO: 7489564 NR Description: probable transcription activator RF2a - rice
  misc_feature (1)..(274): Homolog of NCBI NO: 21553831 NR Description: transcriptional activator RF2a, putative
  misc_feature (1)..(274): Homolog of NCBI NO: 15221391 NR Description: bZIP protein; protein id: At1g06070.1, supported
  misc_feature (1)..(274): Homolog of NCBI NO: 21740783 NR Description: OSJNBa0067K08.24 [Oryza sativa (japonica
MFEMFLENGGKLPGPPEPSAHPHSTPPRPRHHHSMSMDGSTSLFGSAAAGMPGRSGTDAKKAISDAKLAELALVDPKRAKRILANRQSAARSKERKMRYIAELERKVQTLQLEATTLSAQLAMLQRDTTGMTSENSDLKIRVQTMEQQVQLQDALNDRLRDEIQQLKVATGQVNASIGKTGNSGMSSFGGNPQSYQRSHIQSLLTAQHLQRLRIHSQHQQQQTHFQQQQQQPQPQLLLQEAHPFPVDLKMRGFSLSSHAQNAGASDSHAAKSEP

SEQ ID NO: 4514 - DNA, 1481 bp, Zea mays subsp. mays
  misc_feature (1)..(1481): Ceres Seq. ID no. 12373728
  misc_feature: MA Experiment ID: 108522 Result: Up-regulated in Transcription
  misc_feature: MA Experiment 108522 PARAMETER Experiment Name: Zm_42deg_Heat_P Parameter: Age (day) Value: 8
  misc_feature: MA Experiment 108522 PARAMETER Experiment Name: Zm_42deg_Heat_P Parameter: Organism Value: Zea mays
  misc_feature: MA Experiment 108522 PARAMETER Experiment Name: Zm_42deg_Heat_P Parameter: Plant Line Value: 35A19
  misc_feature: MA Experiment 108522 PARAMETER Experiment Name: Zm_42deg_Heat_P Parameter: Temperature (deg C) Value: 42 vs. 22
  misc_feature: MA Experiment 108522 PARAMETER Experiment Name: Zm_42deg_Heat_P Parameter: Timepoint (hr) Value: 1
  misc_feature: MA Experiment 108522 PARAMETER Experiment Name: Zm_42deg_Heat_P Parameter: Tissue Value: Aerial
  misc_feature: MA Experiment ID: 108523 Result: Up-regulated in Transcription
  misc_feature: MA Experiment 108523 PARAMETER Experiment Name: Zm_42deg_Heat_P Parameter: Age (day) Value: 8
  misc_feature: MA Experiment 108523 PARAMETER Experiment Name: Zm_42deg_Heat_P Parameter: Organism Value: Zea mays
  misc_feature: MA Experiment 108523 PARAMETER Experiment Name: Zm_42deg_Heat_P Parameter: Plant Line Value: 35A19
  misc_feature: MA Experiment 108523 PARAMETER Experiment Name: Zm_42deg_Heat_P Parameter: Temperature (deg C) Value: 42 vs. 22
  misc_feature: MA Experiment 108523 PARAMETER Experiment Name: Zm_42deg_Heat_P Parameter: Timepoint (hr) Value: 6
  misc_feature: MA Experiment 108523 PARAMETER Experiment Name: Zm_42deg_Heat_P Parameter: Tissue Value: Aerial
  misc_feature: MA Experiment ID: 108527 Result: Up-regulated in Transcription
  misc_feature: MA Experiment 108527 PARAMETER Experiment Name: Zm_5mM_NO_P Parameter: Age (day) Value: 8
  misc_feature: MA Experiment 108527 PARAMETER Experiment Name: Zm_5mM_NO_P Parameter: Organism Value: Zea mays
  misc_feature: MA Experiment 108527 PARAMETER Experiment Name: Zm_5mM_NO_P Parameter: Plant Line Value: 35A19
  misc_feature: MA Experiment 108527 PARAMETER Experiment Name: Zm_5mM_NO_P Parameter: Timepoint (hr) Value: 6
  misc_feature: MA Experiment 108527 PARAMETER Experiment Name: Zm_5mM_NO_P Parameter: Tissue Value: Aerial
  misc_feature: MA Experiment 108527 PARAMETER Experiment Name: Zm_5mM_NO_P Parameter: Treatment Value: 5mM NO vs. No Treatment
  misc_feature: MA Experiment ID: 108535 Result: Up-regulated in Transcription
  misc_feature: MA Experiment 108535 PARAMETER Experiment Name: Zm_Meristem_P Parameter: Age (day) Value: 8
  misc_feature: MA Experiment 108535 PARAMETER Experiment Name: Zm_Meristem_P Parameter: Organism Value: Zea mays
  misc_feature: MA Experiment 108535 PARAMETER Experiment Name: Zm_Meristem_P Parameter: Plant Line Value: 35A19
  misc_feature: MA Experiment 108535 PARAMETER Experiment Name: Zm_Meristem_P Parameter: Tissue Value: Root Meristem vs. Above Root Meristem
  misc_feature: MA Experiment ID: 108559 Result: Up-regulated in Transcription
  misc_feature: MA Experiment 108559 PARAMETER Experiment Name: Zm_5mM_NO_P Parameter: Age (day) Value: 8
  misc_feature: MA Experiment 108559 PARAMETER Experiment Name: Zm_5mM_NO_P Parameter: Organism Value: Zea mays
  misc_feature: MA Experiment 108559 PARAMETER Experiment Name: Zm_5mM_NO_P Parameter: Plant Line Value: 35A19
  misc_feature: MA Experiment 108559 PARAMETER Experiment Name: Zm_5mM_NO_P Parameter: Timepoint (hr) Value: 12
  misc_feature: MA Experiment 108559 PARAMETER Experiment Name: Zm_5mM_NO_P Parameter: Tissue Value: Aerial
  misc_feature: MA Experiment 108559 PARAMETER Experiment Name: Zm_5mM_NO_P Parameter: Treatment Value: 5mM NO vs. No Treatment
  misc_feature: MA Experiment ID: 108689 Result: Up-regulated in Transcription
  misc_feature: MA Experiment 108689 PARAMETER Experiment Name: Zm_Drought_Roots_P Parameter: Age (day) Value: 9
  misc_feature: MA Experiment 108689 PARAMETER Experiment Name: Zm_Drought_Roots_P Parameter: Organism Value: Zea mays
  misc_feature: MA Experiment 108689 PARAMETER Experiment Name: Zm_Drought_Roots_P Parameter: Plant Line Value: 35A19
  misc_feature: MA Experiment 108689 PARAMETER Experiment Name: Zm_Drought_Roots_P Parameter: Timepoint (hr) Value: 24
  misc_feature: MA Experiment 108689 PARAMETER Experiment Name: Zm_Drought_Roots_P Parameter: Tissue Value: Roots
  misc_feature: MA Experiment 108689 PARAMETER Experiment Name: Zm_Drought_Roots_P Parameter: Treatment Value: Drought vs. No Drought
  misc_feature: MA Experiment ID: 20000492 Result: Up-regulated in Transcription
  misc_feature: MA Experiment 20000492 PARAMETER Experiment Name: Zm_Hybrid_Seed_Dev_P Parameter: DAP Value: 12
  misc_feature: MA Experiment 20000492 PARAMETER Experiment Name: Zm_Hybrid_Seed_Dev_P Parameter: Organism Value: Zea mays
  misc_feature: MA Experiment 20000492 PARAMETER Experiment Name: Zm_Hybrid_Seed_Dev_P Parameter: Plant Line Value: 35A19
  misc_feature: MA Experiment 20000492 PARAMETER Experiment Name: Zm_Hybrid_Seed_Dev_P Parameter: Tissue Value: Fert Kernel vs. Unfert Floret
aaaaagcgtgtgcgacagaggaagtccatgtgcccggctcggccctgccacggccacgcacagcagaggagcccgcaagcccgcgcgctccccgccaagatttgccaccaataccccggtcctccactcctcctctcctccgcgagctccgtctccccccctcgcgcgaacgccgggcgcacgcagccaggccaggtatccccccggccccaaccaaaccatcgcatgggagccgcgactggcccgacgaagcggagccgcgtccccagcaagaggcagcaggaggaggaggccatggcgcgcgctgcgggcgtggaggcgcaggcgcaggcgcggcggcggccacggctggtggggtacgaggagctgccggagtacctcaaggacaacgagtacatccgcgggcactaccgcgccgagtggcccgtccgcgacgcgctcctcagcgccttcgcctggcacaacgagactctcaacgtgtggacgcatctcggcgggttcctgtttttcctggcgctcgcggtcgccggagggtggacggaggccgccgacgaagccgctccggggatcatgaggttcgtggtgacaccaccagctaacgcttcgtgggacgtgctgcattcgggtctgccaagccacgacggcagggcgtcgcagtccggcgtgccgcggtggccgcggacggtgttcctggtgggcgccatgtcgtgcctggccatcagcgcgacggcccacctgctggcgtgccactcgcggcgcgccagcgtggtgttctggcagctcgactacgcgggcatctccgtgatgatcgtcgcctccttcgtgccgccggtgtactacgccttcctctgccacccgccggcgcgggcggccatacctgtccgccatcgcggcgctgggcgcgctcgtggtggccgcgctgctctccccgtcctgctcgtccccgcgctaccgccgcctccgcgcggcgctgttcctggccatgggcctgtcgggcgtcgtcccggcgctgcacgcgctgtggctcaactggggccacgccgcctgctacctggcgctcggcctcgaggtcgccatgggtctcgcctacgccacgggcgcatggttctacgtcagccgcgtgccggagaagtggaggcccggggtgttcgacgtcgtgggccacagccaccagatcttccacgtgctcgtgctcgtcggcgccgtcacgcactacgtcgccgtcgccgtgctcatccactggcgggagaaggtggctgccgcctgtggcgcggcgtcgtaggcgggcttgctgctcctggcttctgcagcaagccagctgaggtgtttgatcatccagagcttcaatgtgccagtgcgatggattcaacaagcgttcgaatcggcgaacgaagtagttgcagttgcagttgcagcatagatcggctctagagttcgacgatttgtaatttaattgatgggatgattgagtatggtggtcc

SEQ ID NO: 4515 - protein, 476 aa, Zea mays subsp. mays
  peptide (1)..(476): Ceres Seq. ID no. 12373729
  misc_feature (204)..(285): Pfam Name: Uncharacterised protein family (Hly-III / UPF0073) Pfam Description: Uncharacterised protein family (Hly-III /
  misc_feature (91)..(175): Homolog of NCBI NO: 15235657 NR Description: expressed protein
  misc_feature (94)..(285): Homolog of NCBI NO: 25407688 NR Description: hypothetical protein AT4g30850 [imported] -
  misc_feature (189)..(286): Homolog of NCBI NO: 15241302 NR Description: putative protein
  misc_feature (76)..(176): Homolog of NCBI NO: 15241302 NR Description: putative protein
  misc_feature (94)..(175): Homolog of NCBI NO: 30688829 NR Description: expressed protein [Arabidopsis thaliana]
  misc_feature (204)..(285): Homolog of NCBI NO: 30688829 NR Description: expressed protein [Arabidopsis thaliana]
  misc_feature (94)..(175): Homolog of NCBI NO: 18377749 NR Description: unknown protein [Arabidopsis thaliana]
  misc_feature (204)..(285): Homolog of NCBI NO: 18377749 NR Description: unknown protein [Arabidopsis thaliana]
  misc_feature (104)..(320): Homolog of NCBI NO: 13272399 NR Description: hypothetical protein [Arabidopsis thaliana]
  misc_feature (84)..(320): Homolog of NCBI NO: 18400468 NR Description: expressed protein
KKRVRQRKSMCPARPCHGHAQQRSPQARALPAKICHQYPGPPLLLSSASSVSPPRANAGRTQPGQVSPRPQPNHRMGAATGPTKRSRVPSKRQQEEEAMARAAGVEAQAQARRRPRLVGYEELPEYLKDNEYIRGHYRAEWPVRDALLSAFAWHNETLNVWTHLGGFLFFLALAVAGGWTEAADEAAPGIMRFVVTPPANASWDVLHSGLPSHDGRASQSGVPRWPRTVFLVGAMSCLAISATAHLLACHSRRASVVFWQLDYAGISVMIVASFVPPVYYAFLCHPPARAAIPVRHRGAGRARGGRAALPVLLVPALPPPPRGAVPGHGPVGRRPGAARAVAQLGPRRLLPGARPRGRHGSRLRHGRMVLRQPRAGEVEARGVRRRGPQPPDLPRARARRRRHALRRRRRAHPLAGEGGCRLWRGVVGGLAAPGFCSKPAEVFDHPELQCASAMDSTSVRIGERSSCSCSCSIDRL

SEQ ID NO: 4516 - protein, 467 aa, Zea mays subsp. mays
  peptide (1)..(467): Ceres Seq. ID no. 12373730
  misc_feature (195)..(276): Pfam Name: Uncharacterised protein family (Hly-III / UPF0073) Pfam Description: Uncharacterised protein family (Hly-III /
  misc_feature (82)..(166): Homolog of NCBI NO: 15235657 NR Description: expressed protein
  misc_feature (85)..(276): Homolog of NCBI NO: 25407688 NR Description: hypothetical protein AT4g30850 [imported] -
  misc_feature (180)..(277): Homolog of NCBI NO: 15241302 NR Description: putative protein
  misc_feature (67)..(167): Homolog of NCBI NO: 15241302 NR Description: putative protein
  misc_feature (85)..(166): Homolog of NCBI NO: 30688829 NR Description: expressed protein [Arabidopsis thaliana]
  misc_feature (195)..(276): Homolog of NCBI NO: 30688829 NR Description: expressed protein [Arabidopsis thaliana]
  misc_feature (85)..(166): Homolog of NCBI NO: 18377749 NR Description: unknown protein [Arabidopsis thaliana]
  misc_feature (195)..(276): Homolog of NCBI NO: 18377749 NR Description: unknown protein [Arabidopsis thaliana]
  misc_feature (95)..(311): Homolog of NCBI NO: 13272399 NR Description: hypothetical protein [Arabidopsis thaliana]
  misc_feature (75)..(311): Homolog of NCBI NO: 18400468 NR Description: expressed protein
MCPARPCHGHAQQRSPQARALPAKICHQYPGPPLLLSSASSVSPPRANAGRTQPGQVSPRPQPNHRMGAATGPTKRSRVPSKRQQEEEAMARAAGVEAQAQARRRPRLVGYEELPEYLKDNEYIRGHYRAEWPVRDALLSAFAWHNETLNVWTHLGGFLFFLALAVAGGWTEAADEAAPGIMRFVVTPPANASWDVLHSGLPSHDGRASQSGVPRWPRTVFLVGAMSCLAISATAHLLACHSRRASVVFWQLDYAGISVMIVASFVPPVYYAFLCHPPARAAIPVRHRGAGRARGGRAALPVLLVPALPPPPRGAVPGHGPVGRRPGAARAVAQLGPRRLLPGARPRGRHGSRLRHGRMVLRQPRAGEVEARGVRRRGPQPPDLPRARARRRRHALRRRRRAHPLAGEGGCRLWRGVVGGLAAPGFCSKPAEVFDHPELQCASAMDSTSVRIGERSSCSCSCSIDRL

SEQ ID NO: 4517 - protein, 401 aa, Zea mays subsp. mays
  peptide (1)..(401): Ceres Seq. ID no. 12373731
  misc_feature (129)..(210): Pfam Name: Uncharacterised protein family (Hly-III / UPF0073) Pfam Description: Uncharacterised protein family (Hly-III /
  misc_feature (19)..(210): Homolog of NCBI NO: 25407688 NR Description: hypothetical protein AT4g30850 [imported] -
  misc_feature (114)..(211): Homolog of NCBI NO: 15241302 NR Description: putative protein
  misc_feature (1)..(101): Homolog of NCBI NO: 15241302 NR Description: putative protein
  misc_feature (19)..(100): Homolog of NCBI NO: 30688829 NR Description: expressed protein [Arabidopsis thaliana]
  misc_feature (129)..(210): Homolog of NCBI NO: 30688829 NR Description: expressed protein [Arabidopsis thaliana]
  misc_feature (16)..(100): Homolog of NCBI NO: 15235657 NR Description: expressed protein
  misc_feature (19)..(100): Homolog of NCBI NO: 18377749 NR Description: unknown protein [Arabidopsis thaliana]
  misc_feature (129)..(210): Homolog of NCBI NO: 18377749 NR Description: unknown protein [Arabidopsis thaliana]
  misc_feature (29)..(245): Homolog of NCBI NO: 13272399 NR Description: hypothetical protein [Arabidopsis thaliana]
  misc_feature (9)..(245): Homolog of NCBI NO: 18400468 NR Description: expressed protein
MGAATGPTKRSRVPSKRQQEEEAMARAAGVEAQAQARRRPRLVGYEELPEYLKDNEYIRGHYRAEWPVRDALLSAFAWHNETLNVWTHLGGFLFFLALAVAGGWTEAADEAAPGIMRFVVTPPANASWDVLHSGLPSHDGRASQSGVPRWPRTVFLVGAMSCLAISATAHLLACHSRRASVVFWQLDYAGISVMIVASFVPPVYYAFLCHPPARAAIPVRHRGAGRARGGRAALPVLLVPALPPPPRGAVPGHGPVGRRPGAARAVAQLGPRRLLPGARPRGRHGSRLRHGRMVLRQPRAGEVEARGVRRRGPQPPDLPRARARRRRHALRRRRRAHPLAGEGGCRLWRGVVGGLAAPGFCSKPAEVFDHPELQCASAMDSTSVRIGERSSCSCSCSIDRL

SEQ ID NO: 4518 - DNA, 1054 bp, Zea mays subsp. mays
  misc_feature (1)..(1054): Ceres Seq. ID no. 12373289
  misc_feature: MA Experiment ID: 108528 Result: Up-regulated in Transcription
  misc_feature: MA Experiment 108528 PARAMETER Experiment Name: Zm_Imbibed_Seeds_P Parameter: Age (day) Value: 5 vs. 2
  misc_feature: MA Experiment 108528 PARAMETER Experiment Name: Zm_Imbibed_Seeds_P Parameter: Organism Value: Zea mays
  misc_feature: MA Experiment 108528 PARAMETER Experiment Name: Zm_Imbibed_Seeds_P Parameter: Plant Line Value: 35A19
  misc_feature: MA Experiment 108528 PARAMETER Experiment Name: Zm_Imbibed_Seeds_P Parameter: Tissue Value: Aerial vs. Embryo
  misc_feature: MA Experiment ID: 108530 Result: Up-regulated in Transcription
  misc_feature: MA Experiment 108530 PARAMETER Experiment Name: Zm_Imbibed_Seeds_P Parameter: Age (day) Value: 6 vs. 2
  misc_feature: MA Experiment 108530 PARAMETER Experiment Name: Zm_Imbibed_Seeds_P Parameter: Organism Value: Zea mays
  misc_feature: MA Experiment 108530 PARAMETER Experiment Name: Zm_Imbibed_Seeds_P Parameter: Plant Line Value: 35A19
  misc_feature: MA Experiment 108530 PARAMETER Experiment Name: Zm_Imbibed_Seeds_P Parameter: Tissue Value: Aerial vs. Embryo
  misc_feature: MA Experiment ID: 108534 Result: Down-regulated in Transcription
  misc_feature: MA Experiment 108534 PARAMETER Experiment Name: Zm_4deg_Cold_P Parameter: Age (hr) Value: 8
  misc_feature: MA Experiment 108534 PARAMETER Experiment Name: Zm_4deg_Cold_P Parameter: Organism Value: Zea mays
  misc_feature: MA Experiment 108534 PARAMETER Experiment Name: Zm_4deg_Cold_P Parameter: Plant Line Value: 35A19
  misc_feature: MA Experiment 108534 PARAMETER Experiment Name: Zm_4deg_Cold_P Parameter: Temperature (deg C) Value: 4 vs. 22
  misc_feature: MA Experiment 108534 PARAMETER Experiment Name: Zm_4deg_Cold_P Parameter: Timepoint (hr) Value: 6
  misc_feature: MA Experiment 108534 PARAMETER Experiment Name: Zm_4deg_Cold_P Parameter: Tissue Value: Aerial
  misc_feature: MA Experiment ID: 108544 Result: Down-regulated in Transcription
  misc_feature: MA Experiment ID: 108545 Result: Up-regulated in Transcription
  misc_feature: MA Experiment 108545 PARAMETER Experiment Name: Zm_Imbibed_Seeds_P Parameter: Age (day) Value: 3 vs. 2
  misc_feature: MA Experiment 108545 PARAMETER Experiment Name: Zm_Imbibed_Seeds_P Parameter: Organism Value: Zea mays
  misc_feature: MA Experiment 108545 PARAMETER Experiment Name: Zm_Imbibed_Seeds_P Parameter: Plant Line Value: 35A19
  misc_feature: MA Experiment 108545 PARAMETER Experiment Name: Zm_Imbibed_Seeds_P Parameter: Tissue Value: Aerial vs. Embryo
  misc_feature: MA Experiment ID: 108547 Result: Up-regulated in Transcription
  misc_feature: MA Experiment 108547 PARAMETER Experiment Name: Zm_Imbibed_Seeds_P Parameter: Age (day) Value: 4 vs. 2
  misc_feature: MA Experiment 108547 PARAMETER Experiment Name: Zm_Imbibed_Seeds_P Parameter: Organism Value: Zea mays
  misc_feature: MA Experiment 108547 PARAMETER Experiment Name: Zm_Imbibed_Seeds_P Parameter: Plant Line Value: 35A19
  misc_feature: MA Experiment 108547 PARAMETER Experiment Name: Zm_Imbibed_Seeds_P Parameter: Tissue Value: Aerial vs. Embryo
  misc_feature: MA Experiment ID: 20000478 Result: Up-regulated in Transcription
  misc_feature: MA Experiment 20000478 PARAMETER Experiment Name: Zm_5mM_SA_P Parameter: Age (day) Value: 11
  misc_feature: MA Experiment 20000478 PARAMETER Experiment Name: Zm_5mM_SA_P Parameter: Organism Value: Zea mays
  misc_feature: MA Experiment 20000478 PARAMETER Experiment Name: Zm_5mM_SA_P Parameter: Plant Line Value: 35A19
  misc_feature: MA Experiment 20000478 PARAMETER Experiment Name: Zm_5mM_SA_P Parameter: Timepoint (hr) Value: 72
  misc_feature: MA Experiment 20000478 PARAMETER Experiment Name: Zm_5mM_SA_P Parameter: Tissue Value: Aerial
  misc_feature: MA Experiment 20000478 PARAMETER Experiment Name: Zm_5mM_SA_P Parameter: Treatment Value: 5mM SA vs. No Treatment
  misc_feature: MA Experiment ID: 20000532 Result: Up-regulated in Transcription
  misc_feature: MA Experiment 20000532 PARAMETER Experiment Name: Zm_0.001percent_MeJA_P Parameter: Age (day) Value: 10
  misc_feature: MA Experiment 20000532 PARAMETER Experiment Name: Zm_0.001percent_MeJA_P Parameter: Organism Value: Zea mays
  misc_feature: MA Experiment 20000532 PARAMETER Experiment Name: Zm_0.001percent_MeJA_P Parameter: Plant Line Value: 35A19
  misc_feature: MA Experiment 20000532 PARAMETER Experiment Name: Zm_0.001percent_MeJA_P Parameter: Timepoint (hr) Value: 48
  misc_feature: MA Experiment 20000532 PARAMETER Experiment Name: Zm_0.001percent_MeJA_P Parameter: Tissue Value: Aerial
  misc_feature: MA Experiment 20000532 PARAMETER Experiment Name: Zm_0.001percent_MeJA_P Parameter: Treatment Value: 0.001percent MeJA vs. No Treatment
  misc_feature: MA Experiment ID: 20000533 Result: Up-regulated in Transcription
  misc_feature: MA Experiment 20000533 PARAMETER Experiment Name: Zm_0.001percent_MeJA_P Parameter: Age (day) Value: 11
  misc_feature: MA Experiment 20000533 PARAMETER Experiment Name: Zm_0.001percent_MeJA_P Parameter: Organism Value: Zea mays
  misc_feature: MA Experiment 20000533 PARAMETER Experiment Name: Zm_0.001percent_MeJA_P Parameter: Plant Line Value: 35A19
  misc_feature: MA Experiment 20000533 PARAMETER Experiment Name: Zm_0.001percent_MeJA_P Parameter: Timepoint (hr) Value: 72
  misc_feature: MA Experiment 20000533 PARAMETER Experiment Name: Zm_0.001percent_MeJA_P Parameter: Tissue Value: Aerial
  misc_feature: MA Experiment 20000533 PARAMETER Experiment Name: Zm_0.001percent_MeJA_P Parameter: Treatment Value: 0.001percent MeJA vs. No Treatment
  misc_feature: MA Experiment ID: 20000535 Result: Down-regulated in Transcription
  misc_feature: MA Experiment 20000535 PARAMETER Experiment Name: Zm_Hybrid_Seed_Dev_P Parameter: DAP Value: 30 vs. 12
  misc_feature: MA Experiment 20000535 PARAMETER Experiment Name: Zm_Hybrid_Seed_Dev_P Parameter: Organism Value: Zea mays
  misc_feature: MA Experiment 20000535 PARAMETER Experiment Name: Zm_Hybrid_Seed_Dev_P Parameter: Plant Line Value: 35A19
  misc_feature: MA Experiment 20000535 PARAMETER Experiment Name: Zm_Hybrid_Seed_Dev_P Parameter: Tissue Value: Embryo vs. Unfert Floret
  misc_feature: MA Experiment ID: 20001612 Result: Up-regulated in Transcription
  misc_feature: MA Experiment 20001612 PARAMETER Experiment Name: Zm_50ppm_KNO3_L-to-H_P Parameter: Age (day) Value: 19
  misc_feature: MA Experiment 20001612 PARAMETER Experiment Name: Zm_50ppm_KNO3_L-to-H_P Parameter: Organism Value: Zea mays
  misc_feature: MA Experiment 20001612 PARAMETER Experiment Name: Zm_50ppm_KNO3_L-to-H_P Parameter: Plant Line Value: 35A19
  misc_feature: MA Experiment 20001612 PARAMETER Experiment Name: Zm_50ppm_KNO3_L-to-H_P Parameter: Timepoint (hr) Value: 8
  misc_feature: MA Experiment 20001612 PARAMETER Experiment Name: Zm_50ppm_KNO3_L-to-H_P Parameter: Tissue Value: Roots
  misc_feature: MA Experiment 20001612 PARAMETER Experiment Name: Zm_50ppm_KNO3_L-to-H_P Parameter: Treatment Value: 50ppm KNO3 vs. 50ppm KCl
aagatcgccgcctcgcagtcgcacagtcgcactcgctccacttccattcccagcgaccccgcccgcccggaggcgtcgcacctgcacgctgcggcagcgggcagccgccaagcctctctcgtgcggcaagcaccacacagacacccgatggcgctgctgctgctgcgcggctgcgccgcgccgccagccgtccacgcggccccggcggggtcccggctgctccctccggcgctgccgcggcggcggctcgtggccgtcgcctcttcggcctcctccgcgccgtccggcgaggtggcgtcgtcgtcccaggacggccgcggctacgggatcgtgggcgggcccaacggccacgccatcgctcccgccacagacaccaagtccaccgccgtcgagaccaccgtcgagagggtgatcttcgacttccggttcctggcactcctcgccgtcgccgggtcgctcgccggctccgtcctgtgcttcctcaatggctgtgtcttcatcaaagaggcgtaccaggtttactggtcgagctgtgtcaagggggttcattcggggcagatggtcctcaaggtcgtcgaggccatcgatgtgtatcttgctggaacagtcatgctgatatttgggatgggtctctacggcctcttcatcagcaacgctcccgccggtgttcctcctgaatccgaccgtgccctcagcggctcgtcgctgttcggaatgttcgctttgaaggaacgcccgaagtggatgaacatcacctcgcttgacgagctcaagacaaaagtggggcacgtcatcgtgatgattctacttgtgaagatgttcgagaagagcaagatggtgacgatagccacggggctggacctcctcagctactcgatctgcatcttcttgtcatcagcttctctctacatcctgcacaatcttcacaagggcgaccatgaggagtgacgagagtgaaatgccgaatttgtagcctattcgagagagagagttgacggtcttgtccaataatcaatactggatttttaagactctcttcaacggtgttctcttc

SEQ ID NO: 4519 - protein, 315 aa, Zea mays subsp. mays
  peptide (1)..(315): Ceres Seq. ID no. 12373290
  misc_feature (126)..(291): Homolog of NCBI NO: 33864647 NR Description: conserved hypothetical protein [Synechococcus sp.
  misc_feature (116)..(308): Homolog of NCBI NO: 31126772 NR Description: unknown protein [Oryza sativa (japonica
  misc_feature (78)..(313): Homolog of NCBI NO: 7487716 NR Description: hypothetical protein T5K18.170 - Arabidopsis
  misc_feature (78)..(313): Homolog of NCBI NO: 15810053 NR Description: AT4g19390/T5K18_170 [Arabidopsis thaliana]
  misc_feature (78)..(313): Homolog of NCBI NO: 18415304 NR Description: putative protein
  misc_feature (129)..(314): Homolog of NCBI NO: 34899024 NR Description: hypothetical protein~similar to Arabidopsis
  misc_feature (51)..(314): Homolog of NCBI NO: 34395260 NR Description: unknown protein [Oryza sativa (japonica
  misc_feature (78)..(312): Homolog of NCBI NO: 20465418 NR Description: unknown protein [Arabidopsis thaliana]
  misc_feature (78)..(312): Homolog of NCBI NO: 15240692 NR Description: unknown protein
  misc_feature (51)..(315): Homolog of NCBI NO: 34899026 NR Description: contains ESTs
KIAASQSHSRTRSTSIPSDPARPEASHLHAAAAGSRQASLVRQAPHRHPMALLLLRGCAAPPAVHAAPAGSRLLPPALPRRRLVAVASSASSAPSGEVASSSQDGRGYGIVGGPNGHAIAPATDTKSTAVETTVERVIFDFRFLALLAVAGSLAGSVLCFLNGCVFIKEAYQVYWSSCVKGVHSGQMVLKVVEAIDVYLAGTVMLIFGMGLYGLFISNAPAGVPPESDRALSGSSLFGMFALKERPKWMNITSLDELKTKVGHVIVMILLVKMFEKSKMVTIATGLDLLSYSICIFLSSASLYILHNLHKGDHEE

SEQ ID NO: 4520 - protein, 266 aa, Zea mays subsp. mays
  peptide (1)..(266): Ceres Seq. ID no. 12373291
  misc_feature (77)..(242): Homolog of NCBI NO: 33864647 NR Description: conserved hypothetical protein [Synechococcus sp.
  misc_feature (67)..(259): Homolog of NCBI NO: 31126772 NR Description: unknown protein [Oryza sativa (japonica
  misc_feature (29)..(264): Homolog of NCBI NO: 7487716 NR Description: hypothetical protein T5K18.170 - Arabidopsis
  misc_feature (29)..(264): Homolog of NCBI NO: 15810053 NR Description: AT4g19390/T5K18_170 [Arabidopsis thaliana]
  misc_feature (29)..(264): Homolog of NCBI NO: 18415304 NR Description: putative protein
  misc_feature (80)..(265): Homolog of NCBI NO: 34899024 NR Description: hypothetical protein~similar to Arabidopsis
  misc_feature (2)..(265): Homolog of NCBI NO: 34395260 NR Description: unknown protein [Oryza sativa (japonica
  misc_feature (29)..(263): Homolog of NCBI NO: 20465418 NR Description: unknown protein [Arabidopsis thaliana]
  misc_feature (29)..(263): Homolog of NCBI NO: 15240692 NR Description: unknown protein
  misc_feature (2)..(266): Homolog of NCBI NO: 34899026 NR Description: contains ESTs
MALLLLRGCAAPPAVHAAPAGSRLLPPALPRRRLVAVASSASSAPSGEVASSSQDGRGYGIVGGPNGHAIAPATDTKSTAVETTVERVIFDFRFLALLAVAGSLAGSVLCFLNGCVFIKEAYQVYWSSCVKGVHSGQMVLKVVEAIDVYLAGTVMLIFGMGLYGLFISNAPAGVPPESDRALSGSSLFGMFALKERPKWMNITSLDELKTKVGHVIVMILLVKMFEKSKMVTIATGLDLLSYSICIFLSSASLYILHNLHKGDHEE

SEQ ID NO: 4521 - protein, 224 aa, Zea mays subsp. mays
  peptide (1)..(224): Ceres Seq. ID no. 12373292
DRRLAVAQSHSLHFHSQRPRPPGGVAPARCGSGQPPSLSRAASTTQTPDGAAAAARLRRAASRPRGPGGVPAAPSGAAAAAARGRRLFGLLRAVRRGGVVVPGRPRLRDRGRAQRPRHRSRHRHQVHRRRDHRREGDLRLPVPGTPRRRRVARRLRPVLPQWLCLHQRGVPGLLVELCQGGSFGADGPQGRRGHRCVSCWNSHADIWDGSLRPLHQQRSRRCSS

SEQ ID NO: 4522 - DNA, 1380 bp, Zea mays subsp. mays
  misc_feature (1)..(1380): Ceres Seq. ID no. 12353756
  misc_feature: MA Experiment ID: 108504 Result: Down-regulated in Transcription
  misc_feature: MA Experiment 108504 PARAMETER Experiment Name: Zm_Drought_P Parameter: Age (day) Value: 8
  misc_feature: MA Experiment 108504 PARAMETER Experiment Name: Zm_Drought_P Parameter: Organism Value: Zea mays
  misc_feature: MA Experiment 108504 PARAMETER Experiment Name: Zm_Drought_P Parameter: Plant Line Value: 35A19
  misc_feature: MA Experiment 108504 PARAMETER Experiment Name: Zm_Drought_P Parameter: Timepoint (hr) Value: 12
  misc_feature: MA Experiment 108504 PARAMETER Experiment Name: Zm_Drought_P Parameter: Tissue Value: Aerial
  misc_feature: MA Experiment 108504 PARAMETER Experiment Name: Zm_Drought_P Parameter: Treatment Value: Drought vs. No Drought
  misc_feature: MA Experiment ID: 108535 Result: Up-regulated in Transcription
  misc_feature: MA Experiment 108535 PARAMETER Experiment Name: Zm_Meristem_P Parameter: Age (day) Value: 8
  misc_feature: MA Experiment 108535 PARAMETER Experiment Name: Zm_Meristem_P Parameter: Organism Value: Zea mays
  misc_feature: MA Experiment 108535 PARAMETER Experiment Name: Zm_Meristem_P Parameter: Plant Line Value: 35A19
  misc_feature: MA Experiment 108535 PARAMETER Experiment Name: Zm_Meristem_P Parameter: Tissue Value: Root Meristem vs. Above Root Meristem
  misc_feature: MA Experiment ID: 108536 Result: Down-regulated in Transcription
  misc_feature: MA Experiment 108536 PARAMETER Experiment Name: Zm_Meristem_P Parameter: Age (day) Value: 8
  misc_feature: MA Experiment 108536 PARAMETER Experiment Name: Zm_Meristem_P Parameter: Organism Value: Zea mays
  misc_feature: MA Experiment 108536 PARAMETER Experiment Name: Zm_Meristem_P Parameter: Plant Line Value: 35A19
  misc_feature: MA Experiment 108536 PARAMETER Experiment Name: Zm_Meristem_P Parameter: Tissue Value: Shoot Meristem vs. Above Shoot Meristem
  misc_feature: MA Experiment ID: 108556 Result: Down-regulated in Transcription
  misc_feature: MA Experiment 108556 PARAMETER Experiment Name: Zm_Drought_P Parameter: Age (day) Value: 9
  misc_feature: MA Experiment 108556 PARAMETER Experiment Name: Zm_Drought_P Parameter: Organism Value: Zea mays
  misc_feature: MA Experiment 108556 PARAMETER Experiment Name: Zm_Drought_P Parameter: Plant Line Value: 35A19
  misc_feature: MA Experiment 108556 PARAMETER Experiment Name: Zm_Drought_P Parameter: Timepoint (hr) Value: 24
  misc_feature: MA Experiment 108556 PARAMETER Experiment Name: Zm_Drought_P Parameter: Tissue Value: Aerial
  misc_feature: MA Experiment 108556 PARAMETER Experiment Name: Zm_Drought_P Parameter: Treatment Value: Drought vs. No Drought
  misc_feature: MA Experiment ID: 20000108 Result: Up-regulated in Transcription
  misc_feature: MA Experiment 20000108 PARAMETER Experiment Name: Zm_Root-Tips_P Parameter: Age (day) Value: 12
  misc_feature: MA Experiment 20000108 PARAMETER Experiment Name: Zm_Root-Tips_P Parameter: Organism Value: Zea mays
  misc_feature: MA Experiment 20000108 PARAMETER Experiment Name: Zm_Root-Tips_P Parameter: Tissue Value: Root tips vs. Root mid region    35
  misc_feature: MA Experiment 20000108 PARAMETER Experiment Name: Zm_Root-Tips_P Parameter: Tissue Value: Root tips vs. Root mid region   Sequence Listing-Misc Features (4)
  misc_feature: MA Experiment ID: 20000479 Result: Down-regulated in Transcription
  misc_feature: MA Experiment 20000479 PARAMETER Experiment Name: Zm_Drought_P Parameter: Age (day) Value: 10
  misc_feature: MA Experiment 20000479 PARAMETER Experiment Name: Zm_Drought_P Parameter: Organism Value: Zea mays
  misc_feature: MA Experiment 20000479 PARAMETER Experiment Name: Zm_Drought_P Parameter: Plant Line Value: 35A19
  misc_feature: MA Experiment 20000479 PARAMETER Experiment Name: Zm_Drought_P Parameter: Timepoint (hr) Value: 48
  misc_feature: MA Experiment 20000479 PARAMETER Experiment Name: Zm_Drought_P Parameter: Tissue Value: Aerial
  misc_feature: MA Experiment 20000479 PARAMETER Experiment Name: Zm_Drought_P Parameter: Treatment Value: Drought vs. No Drought
  misc_feature: MA Experiment ID: 20000480 Result: Down-regulated in Transcription
  misc_feature: MA Experiment 20000480 PARAMETER Experiment Name: Zm_Drought_P Parameter: Age (day) Value: 11
  misc_feature: MA Experiment 20000480 PARAMETER Experiment Name: Zm_Drought_P Parameter: Organism Value: Zea mays
  misc_feature: MA Experiment 20000480 PARAMETER Experiment Name: Zm_Drought_P Parameter: Plant Line Value: 35A19
  misc_feature: MA Experiment 20000480 PARAMETER Experiment Name: Zm_Drought_P Parameter: Timepoint (hr) Value: 72
  misc_feature: MA Experiment 20000480 PARAMETER Experiment Name: Zm_Drought_P Parameter: Tissue Value: Aerial
  misc_feature: MA Experiment 20000480 PARAMETER Experiment Name: Zm_Drought_P Parameter: Treatment Value: Drought vs. No Drought
  misc_feature: MA Experiment ID: 20000492 Result: Up-regulated in Transcription
  misc_feature: MA Experiment 20000492 PARAMETER Experiment Name: Zm_Hybrid_Seed_Dev_P Parameter: DAP Value: 12
  misc_feature: MA Experiment 20000492 PARAMETER Experiment Name: Zm_Hybrid_Seed_Dev_P Parameter: Organism Value: Zea mays
  misc_feature: MA Experiment 20000492 PARAMETER Experiment Name: Zm_Hybrid_Seed_Dev_P Parameter: Plant Line Value: 35A19
  misc_feature: MA Experiment 20000492 PARAMETER Experiment Name: Zm_Hybrid_Seed_Dev_P Parameter: Tissue Value: Fert Kernel vs. Unfert Floret
aaccatttcttcttcctttttctatatcgcgttacgtccctacccagcgatctaggccgccgcctctcctactgcatctccctcgctctcgtcgcctcgttcgcttcgcctccgccccgccccgccccgagcagagcgcagccctatccggagctgggatggcggacgcgaagcagcagcagcagcagcagcagccacagcaggcggcagcggcagccaccggcgtgtggaagacggtcaagcccttcgttaacggcggggcctctgggatgctcgcgacctgcgtcatccagcctatcgacatggtcaaggtgaggatccagttgggtgagggctctgctggtcaggtcacaaggaacatgcttgcaaatgagggtgtccgttctttctacaagggtttgtccgccggattgctgaggcaagcgacgtacacgactgctcgtcttggatcctttagggttctaactaacaaagcagttgaaaagaatgaagggaagccattgcctctatttcagaaagcttttattggtctgactgctggtgcaattggtgcttgtgttggtagtcctgctgatctggcactcattagaatgcaagccgattcgaccctgccagttgcacaacgacgcaactataaatgctttccatgcactctaccgtatcagtggtgatgagggagtccttgcgctttggaagggtgcaggtccaactgtggtgagagctatggcactcaatatgggtatgcttgcttcctatgaccagagtgtcgagctatttagggacaaatttggcgcaggagaaatttctactgttgttggagccagcgctgtttctggattctttgcctcagcatgcagtttgccctttgactatgtgaagacacagattcagaagatgcaacctgatgcgaatggcaagtacccatacacagggtctttggactgtgctgtgaagaccttcaagagcggtggcccattcaagttctacactggtttcccggtgtactgcgtcaggattgcaccccatgtcatgatgacctggatattcttgaatcagatccagaagtttgagaagaagatcggcatataggattcccatgggacggatacagggttgacagttctatgctattactgcttgactctgtaataacattccagctgctttcgcaccatggtagttggttttggtagagacaagtctgttacaattttttaccttagctttccaattattgtgttgcaataatcgaattaattgttgctgggggatttttttggggggttgggagggtggcatgcttttgttggctgggatgtagccataaggagagggggatactgcctagttatgtcattgaatggaattggaccatatttt

SEQ ID NO: 4523 - protein, 222 aa, Zea mays subsp. mays
  peptide (1)..(222): Ceres Seq. ID no. 12353757
  misc_feature (145)..(212): Homolog of NCBI NO: 2331139 NR Description: 2-oxoglutarate/malate translocator [Oryza sativa]
  misc_feature (138)..(211): Homolog of NCBI NO: 19913111 NR Description: dicarboxylate/tricarboxylate carrier [Nicotiana
  misc_feature (74)..(211): Homolog of NCBI NO: 19913107 NR Description: dicarboxylate/tricarboxylate carrier [Nicotiana
  misc_feature (74)..(211): Homolog of NCBI NO: 19913105 NR Description: dicarboxylate/tricarboxylate carrier [Nicotiana
  misc_feature (74)..(211): Homolog of NCBI NO: 10798640 NR Description: mitochondrial 2-oxoglutarate/malate carrier
  misc_feature (71)..(211): Homolog of NCBI NO: 15241167 NR Description: mitochondrial 2-oxoglutarate/malate translocator,
  misc_feature (74)..(211): Homolog of NCBI NO: 7489246 NR Description: oxoglutarate/malate translocator - potato
  misc_feature (69)..(211): Homolog of NCBI NO: 19913109 NR Description: dicarboxylate/tricarboxylate carrier [Nicotiana
  misc_feature (53)..(212): Homolog of NCBI NO: 2130090 NR Description: 2-oxoglutarate/malate translocator (clones OMT134
  misc_feature (53)..(212): Homolog of NCBI NO: 2130089 NR Description: 2-oxoglutarate/malate translocator (clone
PFLLPFSISRYVPTQRSRPPPLLLHLPRSRRLVRFASAPPRPEQSAALSGAGMADAKQQQQQQQPQQAAAAATGVWKTVKPFVNGGASGMLATCVIQPIDMVKVRIQLGEGSAGQVTRNMLANEGVRSFYKGLSAGLLRQATYTTARLGSFRVLTNKAVEKNEGKPLPLFQKAFIGLTAGAIGACVGSPADLALIRMQADSTLPVAQRRNYKCFPCTLPYQW

SEQ ID NO: 4524 - protein, 170 aa, Zea mays subsp. mays
  peptide (1)..(170): Ceres Seq. ID no. 12353758
  misc_feature (93)..(160): Homolog of NCBI NO: 2331139 NR Description: 2-oxoglutarate/malate translocator [Oryza sativa]
  misc_feature (86)..(159): Homolog of NCBI NO: 19913111 NR Description: dicarboxylate/tricarboxylate carrier [Nicotiana
  misc_feature (22)..(159): Homolog of NCBI NO: 19913105 NR Description: dicarboxylate/tricarboxylate carrier [Nicotiana
  misc_feature (22)..(159): Homolog of NCBI NO: 19913107 NR Description: dicarboxylate/tricarboxylate carrier [Nicotiana
  misc_feature (22)..(159): Homolog of NCBI NO: 10798640 NR Description: mitochondrial 2-oxoglutarate/malate carrier
  misc_feature (19)..(159): Homolog of NCBI NO: 15241167 NR Description: mitochondrial 2-oxoglutarate/malate translocator,
  misc_feature (22)..(159): Homolog of NCBI NO: 7489246 NR Description: oxoglutarate/malate translocator - potato
  misc_feature (17)..(159): Homolog of NCBI NO: 19913109 NR Description: dicarboxylate/tricarboxylate carrier [Nicotiana
  misc_feature (1)..(160): Homolog of NCBI NO: 2130090 NR Description: 2-oxoglutarate/malate translocator (clones OMT134
  misc_feature (1)..(160): Homolog of NCBI NO: 2130089 NR Description: 2-oxoglutarate/malate translocator (clone
MADAKQQQQQQQPQQAAAAATGVWKTVKPFVNGGASGMLATCVIQPIDMVKVRIQLGEGSAGQVTRNMLANEGVRSFYKGLSAGLLRQATYTTARLGSFRVLTNKAVEKNEGKPLPLFQKAFIGLTAGAIGACVGSPADLALIRMQADSTLPVAQRRNYKCFPCTLPYQW

SEQ ID NO: 4525 - protein, 133 aa, Zea mays subsp. mays
  peptide (1)..(133): Ceres Seq. ID no. 12353759
  misc_feature (56)..(123): Homolog of NCBI NO: 2331139 NR Description: 2-oxoglutarate/malate translocator [Oryza sativa]
  misc_feature (49)..(122): Homolog of NCBI NO: 19913111 NR Description: dicarboxylate/tricarboxylate carrier [Nicotiana
  misc_feature (1)..(122): Homolog of NCBI NO: 19913105 NR Description: dicarboxylate/tricarboxylate carrier [Nicotiana
  misc_feature (1)..(122): Homolog of NCBI NO: 19913107 NR Description: dicarboxylate/tricarboxylate carrier [Nicotiana
  misc_feature (1)..(122): Homolog of NCBI NO: 10798640 NR Description: mitochondrial 2-oxoglutarate/malate carrier
  misc_feature (1)..(122): Homolog of NCBI NO: 15241167 NR Description: mitochondrial 2-oxoglutarate/malate translocator,
  misc_feature (1)..(122): Homolog of NCBI NO: 7489246 NR Description: oxoglutarate/malate translocator - potato
  misc_feature (1)..(122): Homolog of NCBI NO: 19913109 NR Description: dicarboxylate/tricarboxylate carrier [Nicotiana
  misc_feature (1)..(123): Homolog of NCBI NO: 2130090 NR Description: 2-oxoglutarate/malate translocator (clones OMT134
  misc_feature (1)..(123): Homolog of NCBI NO: 2130089 NR Description: 2-oxoglutarate/malate translocator (clone
MLATCVIQPIDMVKVRIQLGEGSAGQVTRNMLANEGVRSFYKGLSAGLLRQATYTTARLGSFRVLTNKAVEKNEGKPLPLFQKAFIGLTAGAIGACVGSPADLALIRMQADSTLPVAQRRNYKCFPCTLPYQW

SEQ ID NO: 4526 - DNA, 1447 bp, Zea mays subsp. mays
  misc_feature (1)..(1447): Ceres Seq. ID no. 12344474
  misc_feature: MA Experiment ID: 108535 Result: Down-regulated in Transcription
  misc_feature: MA Experiment 108535 PARAMETER Experiment Name: Zm_Meristem_P Parameter: Age (day) Value: 8
  misc_feature: MA Experiment 108535 PARAMETER Experiment Name: Zm_Meristem_P Parameter: Organism Value: Zea mays
  misc_feature: MA Experiment 108535 PARAMETER Experiment Name: Zm_Meristem_P Parameter: Plant Line Value: 35A19
  misc_feature: MA Experiment 108535 PARAMETER Experiment Name: Zm_Meristem_P Parameter: Tissue Value: Root Meristem vs. Above Root Meristem
accaaaccaggaaactgcaaacctacccccggtcgccgactcgccggcctcgactctccggtctccgcccagactacaaatggagctctgcacctgcgtggcccgcagttctgcgcccccctcttctagctgccgcgcggtgccattcccgcgagttctctcccatcgcatttggagccgatcgggatactgcactgtctgctttaccccgtcaagccctgttgctaggagtcgattctctactctaatgacgactgcacacaacacagggaccccagatctagttgacttcaattgggatgatcttgggtttcaactgatcccaacggacttcatgtatttaatgagctgttcttcagatggggtgtttatgaatggtaaattagtgccatatgggtcaattgagctgaatccagcagccgccgtgctgaattatggtcagggattgcttgaaggtctacgagcacatagaaaagaggatggatcaatccttctttttcgtccacatgaaaatgcacggcggatggaaattggtgcagaccggttatgcatgcctgcaccaagtgtagagcaattcctagaagctgtgaaactaactgttctggcaaacaagcattgggtgcctccttttggtaaaggttctttgtatatcagaccgcagctaattggaagtggggctatccttggtgtggcacctgccccacagtacacattcattgtgtttgtttgcccagttgggcattatttcaagggtggtctagctccaatcagcttgttaactgaggaagaataccaccgtgctgcacctggtggaactggtgaaataaaaactattgggaactatgcttcggttgtcagtgctcagagaagagccaaggaaaaaggccattctgatgttttatacttagatccagtccataataagtttgttgaggaagtttcttcttgtaatatattcatggtgaagggcaatattatttctactccactgttaacggggacaattcttcctggaatcacaaggagaagtgtgattgaaatttctcagaatcttggatttcaggttgaggagcgtcttatcacaatagatgaactgcttggggctgatgaagtcttttgtacaggaacagctgttgtattgtcacctgttgggagcatcacttaccgtggaagaagagtggagtatgggaagaaccaggaggccggagtcgtgtcccaacaactctatgccgcactcacagctatccagaaaggtctcacggaggacagcatgggatggacgttgcagctaacttagcagctttttttcacatgatcgagctctacaactcttatttccgttttctcgataagtctcacttctatcaacttgttcttctgttgaaacagagtactttaaaaggaatccccaataatgactttccctgtatattgctgatatgttggc

SEQ ID NO: 4527 - protein, 431 aa, Zea mays subsp. mays
  peptide (1)..(431): Ceres Seq. ID no. 12344475
  misc_feature (126)..(413): Pfam Name: Aminotransferase class IV Pfam Description: Aminotransferase class IV
  misc_feature (170)..(431): Homolog of NCBI NO: 37536656 NR Description: putative aminotransferase
  misc_feature (80)..(430): Homolog of NCBI NO: 6319165 NR Description: branched-chain amino acid aminotransferase
  misc_feature (23)..(431): Homolog of NCBI NO: 11280250 NR Description: branched-chain-amino-acid transaminase-like
  misc_feature (23)..(431): Homolog of NCBI NO: 18408919 NR Description: branched-chain-amino-acid transaminase -like
  misc_feature (72)..(431): Homolog of NCBI NO: 15239157 NR Description: branched-chain amino acid aminotransferase
  misc_feature (23)..(431): Homolog of NCBI NO: 21593211 NR Description: branched-chain-amino-acid transaminase-like
  misc_feature (93)..(430): Homolog of NCBI NO: 6319167 NR Description: branched-chain amino acid aminotransferase
  misc_feature (72)..(431): Homolog of NCBI NO: 26391655 NR Description: Branched-chain amino acid aminotransferase 5,
  misc_feature (91)..(430): Homolog of NCBI NO: 34902362 NR Description: Putative aminotransferase
  misc_feature (35)..(430): Homolog of NCBI NO: 38345763 NR Description: OSJNBa0065O17.16 [Oryza sativa (japonica
PNQETANLPPVADSPASTLRSPPRLQMELCTCVARSSAPPSSSCRAVPFPRVLSHRIWSRSGYCTVCFTPSSPVARSRFSTLMTTAHNTGTPDLVDFNWDDLGFQLIPTDFMYLMSCSSDGVFMNGKLVPYGSIELNPAAAVLNYGQGLLEGLRAHRKEDGSILLFRPHENARRMEIGADRLCMPAPSVEQFLEAVKLTVLANKHWVPPFGKGSLYIRPQLIGSGAILGVAPAPQYTFIVFVCPVGHYFKGGLAPISLLTEEEYHRAAPGGTGEIKTIGNYASVVSAQRRAKEKGHSDVLYLDPVHNKFVEEVSSCNIFMVKGNIISTPLLTGTILPGITRRSVIEISQNLGFQVEERLITIDELLGADEVFCTGTAVVLSPVGSITYRGRRVEYGKNQEAGVVSQQLYAALTAIQKGLTEDSMGWTLQLT

SEQ ID NO: 4528 - protein, 405 aa, Zea mays subsp. mays
  peptide (1)..(405): Ceres Seq. ID no. 12344476
  misc_feature (100)..(387): Pfam Name: Aminotransferase class IV Pfam Description: Aminotransferase class IV
  misc_feature (144)..(405): Homolog of NCBI NO: 37536656 NR Description: putative aminotransferase
  misc_feature (54)..(404): Homolog of NCBI NO: 6319165 NR Description: branched-chain amino acid aminotransferase
  misc_feature (1)..(405): Homolog of NCBI NO: 11280250 NR Description: branched-chain-amino-acid transaminase-like
  misc_feature (1)..(405): Homolog of NCBI NO: 18408919 NR Description: branched-chain-amino-acid transaminase -like
  misc_feature (46)..(405): Homolog of NCBI NO: 15239157 NR Description: branched-chain amino acid aminotransferase
  misc_feature (1)..(405): Homolog of NCBI NO: 21593211 NR Description: branched-chain-amino-acid transaminase-like
  misc_feature (67)..(404): Homolog of NCBI NO: 6319167 NR Description: branched-chain amino acid aminotransferase
  misc_feature (46)..(405): Homolog of NCBI NO: 26391655 NR Description: Branched-chain amino acid aminotransferase 5,
  misc_feature (65)..(404): Homolog of NCBI NO: 34902362 NR Description: Putative aminotransferase
  misc_feature (9)..(404): Homolog of NCBI NO: 38345763 NR Description: OSJNBa0065O17.16 [Oryza sativa (japonica
MELCTCVARSSAPPSSSCRAVPFPRVLSHRIWSRSGYCTVCFTPSSPVARSRFSTLMTTAHNTGTPDLVDFNWDDLGFQLIPTDFMYLMSCSSDGVFMNGKLVPYGSIELNPAAAVLNYGQGLLEGLRAHRKEDGSILLFRPHENARRMEIGADRLCMPAPSVEQFLEAVKLTVLANKHWVPPFGKGSLYIRPQLIGSGAILGVAPAPQYTFIVFVCPVGHYFKGGLAPISLLTEEEYHRAAPGGTGEIKTIGNYASVVSAQRRAKEKGHSDVLYLDPVHNKFVEEVSSCNIFMVKGNIISTPLLTGTILPGITRRSVIEISQNLGFQVEERLITIDELLGADEVFCTGTAVVLSPVGSITYRGRRVEYGKNQEAGVVSQQLYAALTAIQKGLTEDSMGWTLQLT

SEQ ID NO: 4529 - protein, 349 aa, Zea mays subsp. mays
  peptide (1)..(349): Ceres Seq. ID no. 12344477
  misc_feature (44)..(331): Pfam Name: Aminotransferase class IV Pfam Description: Aminotransferase class IV
  misc_feature (88)..(349): Homolog of NCBI NO: 37536656 NR Description: putative aminotransferase
  misc_feature (1)..(348): Homolog of NCBI NO: 6319165 NR Description: branched-chain amino acid aminotransferase
  misc_feature (1)..(349): Homolog of NCBI NO: 11280250 NR Description: branched-chain-amino-acid transaminase-like
  misc_feature (1)..(349): Homolog of NCBI NO: 18408919 NR Description: branched-chain-amino-acid transaminase -like
  misc_feature (1)..(349): Homolog of NCBI NO: 15239157 NR Description: branched-chain amino acid aminotransferase
  misc_feature (1)..(349): Homolog of NCBI NO: 21593211 NR Description: branched-chain-amino-acid transaminase-like
  misc_feature (11)..(348): Homolog of NCBI NO: 6319167 NR Description: branched-chain amino acid aminotransferase
  misc_feature (1)..(349): Homolog of NCBI NO: 26391655 NR Description: Branched-chain amino acid aminotransferase 5,
  misc_feature (9)..(348): Homolog of NCBI NO: 34902362 NR Description: Putative aminotransferase
  misc_feature (1)..(348): Homolog of NCBI NO: 38345763 NR Description: OSJNBa0065O17.16 [Oryza sativa (japonica
MTTAHNTGTPDLVDFNWDDLGFQLIPTDFMYLMSCSSDGVFMNGKLVPYGSIELNPAAAVLNYGQGLLEGLRAHRKEDGSILLFRPHENARRMEIGADRLCMPAPSVEQFLEAVKLTVLANKHWVPPFGKGSLYIRPQLIGSGAILGVAPAPQYTFIVFVCPVGHYFKGGLAPISLLTEEEYHRAAPGGTGEIKTIGNYASVVSAQRRAKEKGHSDVLYLDPVHNKFVEEVSSCNIFMVKGNIISTPLLTGTILPGITRRSVIEISQNLGFQVEERLITIDELLGADEVFCTGTAVVLSPVGSITYRGRRVEYGKNQEAGVVSQQLYAALTAIQKGLTEDSMGWTLQLT

SEQ ID NO: 4530 - DNA, 1569 bp, Zea mays subsp. mays
  misc_feature (1)..(1569): Ceres Seq. ID no. 13493453
  misc_feature: MA Experiment ID: 108528 Result: Up-regulated in Transcription
  misc_feature: MA Experiment 108528 PARAMETER Experiment Name: Zm_Imbibed_Seeds_P Parameter: Age (day) Value: 5 vs. 2
  misc_feature: MA Experiment 108528 PARAMETER Experiment Name: Zm_Imbibed_Seeds_P Parameter: Organism Value: Zea mays
  misc_feature: MA Experiment 108528 PARAMETER Experiment Name: Zm_Imbibed_Seeds_P Parameter: Plant Line Value: 35A19
  misc_feature: MA Experiment 108528 PARAMETER Experiment Name: Zm_Imbibed_Seeds_P Parameter: Tissue Value: Aerial vs. Embryo
  misc_feature: MA Experiment ID: 108530 Result: Up-regulated in Transcription
  misc_feature: MA Experiment 108530 PARAMETER Experiment Name: Zm_Imbibed_Seeds_P Parameter: Age (day) Value: 6 vs. 2
  misc_feature: MA Experiment 108530 PARAMETER Experiment Name: Zm_Imbibed_Seeds_P Parameter: Organism Value: Zea mays
  misc_feature: MA Experiment 108530 PARAMETER Experiment Name: Zm_Imbibed_Seeds_P Parameter: Plant Line Value: 35A19
  misc_feature: MA Experiment 108530 PARAMETER Experiment Name: Zm_Imbibed_Seeds_P Parameter: Tissue Value: Aerial vs. Embryo
  misc_feature: MA Experiment ID: 108543 Result: Down-regulated in Transcription
  misc_feature: MA Experiment ID: 108689 Result: Up-regulated in Transcription
  misc_feature: MA Experiment 108689 PARAMETER Experiment Name: Zm_Drought_Roots_P Parameter: Age (day) Value: 9
  misc_feature: MA Experiment 108689 PARAMETER Experiment Name: Zm_Drought_Roots_P Parameter: Organism Value: Zea mays
  misc_feature: MA Experiment 108689 PARAMETER Experiment Name: Zm_Drought_Roots_P Parameter: Plant Line Value: 35A19
  misc_feature: MA Experiment 108689 PARAMETER Experiment Name: Zm_Drought_Roots_P Parameter: Timepoint (hr) Value: 24
  misc_feature: MA Experiment 108689 PARAMETER Experiment Name: Zm_Drought_Roots_P Parameter: Tissue Value: Roots
  misc_feature: MA Experiment 108689 PARAMETER Experiment Name: Zm_Drought_Roots_P Parameter: Treatment Value: Drought vs. No Drought
  misc_feature: MA Experiment ID: 20000492 Result: Down-regulated in Transcription
  misc_feature: MA Experiment 20000492 PARAMETER Experiment Name: Zm_Hybrid_Seed_Dev_P Parameter: DAP Value: 12
  misc_feature: MA Experiment 20000492 PARAMETER Experiment Name: Zm_Hybrid_Seed_Dev_P Parameter: Organism Value: Zea mays
  misc_feature: MA Experiment 20000492 PARAMETER Experiment Name: Zm_Hybrid_Seed_Dev_P Parameter: Plant Line Value: 35A19
  misc_feature: MA Experiment 20000492 PARAMETER Experiment Name: Zm_Hybrid_Seed_Dev_P Parameter: Tissue Value: Fert Kernel vs. Unfert Floret
atcctaatcgaaaaatcaaaagaaaaaaaagatcgcagccgaaaggaaggggaaaaaaggaccaaataaacaatccactgtctcctacctccgcggaagcatcaaacaaatcaccctgccgatcgccatggacgaacagcaggcggaggagggcgaaagcgcgcgcgtcaagaggacgccggaggaggggtcgtcgccgctgtccgctctggcggatgacgtgctgctacagatcctgggacggctcgaggcggacccgcgggactgggcgcgggcctcctgcgcgtccccgcgcctcgccgctctgctccgggcggcctgcctcccgccgcgactgtcgcgggcgctccccgccgagctcctccccgcgccgtcaccggacggggcgcccgcggcctgggcggcgctccacaagctctccgtctgttgcccggggctcctccgcgccggggtgctcctcgagcccaccgacgatttcgggctcgatctcgacatcgggcctgacgtccccatctacgcccgcaccgacgcctcctccgccgaggggttcgaggccacggccacctcccgccacagcggaaccatcgtcgcggccgggagcgcgccccgcgccggcgaatctgccaacgtcgccgcgtggtcgctctacgacgacctgtacctggacgcggcatacgactgctcgtccgagctgcagatcccgcctgccgctgcggctgtggaacccgccccgcccgcgcccttggcggcgatccgcgacgtggaggaagcaacgaccacaaatgctgtctcatgcggcgtcgcccggcgcggcgtggtggccgggagccgactgcatccgcggcggtggctgggcaccgtcggcgcgcacctggcatcggggtcctggacgctgagccgtgagcaggggaacaagctccttgccagccgcttccgcggcgaccggctatacctctgcgactggcccgggtgcgtgcacaaggaggagcgacgcaagtacatggtcttccgcggcgtgttccacaacttcgcccggtctcaggtccggcgcgcgctcagggacacgcgccgccccaccgtcgccatcgagtgcgccttctgcggctgcaaagagacctgggacctctactcggctttctgcctccgcagtttctacggctaccacgacgacggcgagcctgtggtgcgcgcctacgtctgcgagaacggccacgtcgcgggcgcctggaccgaccgcccactctactcctgatcttggagtggacactccgactgacatggtattgcatcaaagactgcaccctgccattgccagatgctcgctcctaccacttgagctgtttctagacataattatgcgtgcctgcatatagcaatccggattttcgtcatgttctgatacacgtgggatgtgtattctttatttctttcttcttgctgttgctgttgtttgtgagaatggttgagtagaataaggatgccggttgatttgcagcataggatataaagagatttgcttaaaattgtaaacctgatgctacgagaaattggaaccgctgttttattgcc

SEQ ID NO: 4531 - protein, 374 aa, Zea mays subsp. mays
  peptide (1)..(374): Ceres Seq. ID no. 13493454
  misc_feature (66)..(180): Homolog of NCBI NO: 15235367 NR Description: F-box protein family [Arabidopsis thaliana]
  misc_feature (200)..(374): Homolog of NCBI NO: 15235367 NR Description: F-box protein family [Arabidopsis thaliana]
  misc_feature (66)..(180): Homolog of NCBI NO: 21553661 NR Description: unknown [Arabidopsis thaliana]
  misc_feature (200)..(374): Homolog of NCBI NO: 21553661 NR Description: unknown [Arabidopsis thaliana]
MDEQQAEEGESARVKRTPEEGSSPLSALADDVLLQILGRLEADPRDWARASCASPRLAALLRAACLPPRLSRALPAELLPAPSPDGAPAAWAALHKLSVCCPGLLRAGVLLEPTDDFGLDLDIGPDVPIYARTDASSAEGFEATATSRHSGTIVAAGSAPRAGESANVAAWSLYDDLYLDAAYDCSSELQIPPAAAAVEPAPPAPLAAIRDVEEATTTNAVSCGVARRGVVAGSRLHPRRWLGTVGAHLASGSWTLSREQGNKLLASRFRGDRLYLCDWPGCVHKEERRKYMVFRGVFHNFARSQVRRALRDTRRPTVAIECAFCGCKETWDLYSAFCLRSFYGYHDDGEPVVRAYVCENGHVAGAWTDRPLYS

SEQ ID NO: 4532 - protein, 297 aa, Zea mays subsp. mays
  peptide (1)..(297): Ceres Seq. ID no. 13493455
  misc_feature (103)..(297): Pfam Name: Equine herpesvirus glycoprotein gp2 Pfam Description: Equine herpesvirus glycoprotein gp2
  misc_feature (82)..(223): Homolog of NCBI NO: 17384256 NR Description: mucin 5 [Homo sapiens]
  misc_feature (287)..(297): Homolog of NCBI NO: 17384256 NR Description: mucin 5 [Homo sapiens]
  misc_feature (82)..(229): Homolog of NCBI NO: 17384256 NR Description: mucin 5 [Homo sapiens]
  misc_feature (85)..(297): Homolog of NCBI NO: 13592175 NR Description: ppg3 [Leishmania major]
  misc_feature (1)..(297): Homolog of NCBI NO: 18376167 NR Description: hypothetical protein [Neurospora crassa]
  misc_feature (82)..(297): Homolog of NCBI NO: 30313663 NR Description: sublingual apomucin [Mus musculus]
  misc_feature (78)..(297): Homolog of NCBI NO: 13592175 NR Description: ppg3 [Leishmania major]
  misc_feature (82)..(297): Homolog of NCBI NO: 17221106 NR Description: glycoprotein gp2 [Equine herpesvirus 1]
  misc_feature (103)..(297): Homolog of NCBI NO: 17221114 NR Description: glycoprotein gp2 [Equine herpesvirus 1]
  misc_feature (78)..(297): Homolog of NCBI NO: 13592175 NR Description: ppg3 [Leishmania major]
PNRKIKRKKRSQPKGRGKKDQINNPLSPTSAEASNKSPCRSPWTNSRRRRAKARASRGRRRRGRRRCPLWRMTCCYRSWDGSRRTRGTGRGPPARPRASPLCSGRPASRRDCRGRSPPSSSPRRHRTGRPRPGRRSTSSPSVARGSSAPGCSSSPPTISGSISTSGLTSPSTPAPTPPPPRGSRPRPPPATAEPSSRPGARPAPANLPTSPRGRSTTTCTWTRHTTARPSCRSRLPLRLWNPPRPRPWRRSATWRKQRPQMLSHAASPGAAWWPGADCIRGGGWAPSARTWHRGPGR

SEQ ID NO: 4533 - protein, 226 aa, Zea mays subsp. mays
  peptide (1)..(226): Ceres Seq. ID no. 13493456
  misc_feature (32)..(226): Pfam Name: Equine herpesvirus glycoprotein gp2 Pfam Description: Equine herpesvirus glycoprotein gp2
  misc_feature (11)..(152): Homolog of NCBI NO: 17384256 NR Description: mucin 5 [Homo sapiens]
  misc_feature (216)..(226): Homolog of NCBI NO: 17384256 NR Description: mucin 5 [Homo sapiens]
  misc_feature (11)..(158): Homolog of NCBI NO: 17384256 NR Description: mucin 5 [Homo sapiens]
  misc_feature (14)..(226): Homolog of NCBI NO: 13592175 NR Description: ppg3 [Leishmania major]
  misc_feature (1)..(226): Homolog of NCBI NO: 18376167 NR Description: hypothetical protein [Neurospora crassa]
  misc_feature (11)..(226): Homolog of NCBI NO: 30313663 NR Description: sublingual apomucin [Mus musculus]
  misc_feature (7)..(226): Homolog of NCBI NO: 13592175 NR Description: ppg3 [Leishmania major]
  misc_feature (11)..(226): Homolog of NCBI NO: 17221106 NR Description: glycoprotein gp2 [Equine herpesvirus 1]
  misc_feature (32)..(226): Homolog of NCBI NO: 17221114 NR Description: glycoprotein gp2 [Equine herpesvirus 1]
  misc_feature (7)..(226): Homolog of NCBI NO: 13592175 NR Description: ppg3 [Leishmania major]
MTCCYRSWDGSRRTRGTGRGPPARPRASPLCSGRPASRRDCRGRSPPSSSPRRHRTGRPRPGRRSTSSPSVARGSSAPGCSSSPPTISGSISTSGLTSPSTPAPTPPPPRGSRPRPPPATAEPSSRPGARPAPANLPTSPRGRSTTTCTWTRHTTARPSCRSRLPLRLWNPPRPRPWRRSATWRKQRPQMLSHAASPGAAWWPGADCIRGGGWAPSARTWHRGPGR

SEQ ID NO: 4534 - DNA, 1240 bp, Zea mays subsp. mays
  misc_feature (1)..(1240): Ceres Seq. ID no. 12376591
  misc_feature: MA Experiment ID: 108504 Result: Up-regulated in Transcription
  misc_feature: MA Experiment 108504 PARAMETER Experiment Name: Zm_Drought_P Parameter: Age (day) Value: 8
  misc_feature: MA Experiment 108504 PARAMETER Experiment Name: Zm_Drought_P Parameter: Organism Value: Zea mays
  misc_feature: MA Experiment 108504 PARAMETER Experiment Name: Zm_Drought_P Parameter: Plant Line Value: 35A19
  misc_feature: MA Experiment 108504 PARAMETER Experiment Name: Zm_Drought_P Parameter: Timepoint (hr) Value: 12
  misc_feature: MA Experiment 108504 PARAMETER Experiment Name: Zm_Drought_P Parameter: Tissue Value: Aerial
  misc_feature: MA Experiment 108504 PARAMETER Experiment Name: Zm_Drought_P Parameter: Treatment Value: Drought vs. No Drought
  misc_feature: MA Experiment ID: 108522 Result: Down-regulated in Transcription
  misc_feature: MA Experiment 108522 PARAMETER Experiment Name: Zm_42deg_Heat_P Parameter: Age (day) Value: 8
  misc_feature: MA Experiment 108522 PARAMETER Experiment Name: Zm_42deg_Heat_P Parameter: Organism Value: Zea mays
  misc_feature: MA Experiment 108522 PARAMETER Experiment Name: Zm_42deg_Heat_P Parameter: Plant Line Value: 35A19
  misc_feature: MA Experiment 108522 PARAMETER Experiment Name: Zm_42deg_Heat_P Parameter: Temperature (deg C) Value: 42 vs. 22
  misc_feature: MA Experiment 108522 PARAMETER Experiment Name: Zm_42deg_Heat_P Parameter: Timepoint (hr) Value: 1
  misc_feature: MA Experiment 108522 PARAMETER Experiment Name: Zm_42deg_Heat_P Parameter: Tissue Value: Aerial
  misc_feature: MA Experiment ID: 108523 Result: Down-regulated in Transcription
  misc_feature: MA Experiment 108523 PARAMETER Experiment Name: Zm_42deg_Heat_P Parameter: Age (day) Value: 8
  misc_feature: MA Experiment 108523 PARAMETER Experiment Name: Zm_42deg_Heat_P Parameter: Organism Value: Zea mays
  misc_feature: MA Experiment 108523 PARAMETER Experiment Name: Zm_42deg_Heat_P Parameter: Plant Line Value: 35A19
  misc_feature: MA Experiment 108523 PARAMETER Experiment Name: Zm_42deg_Heat_P Parameter: Temperature (deg C) Value: 42 vs. 22
  misc_feature: MA Experiment 108523 PARAMETER Experiment Name: Zm_42deg_Heat_P Parameter: Timepoint (hr) Value: 6
  misc_feature: MA Experiment 108523 PARAMETER Experiment Name: Zm_42deg_Heat_P Parameter: Tissue Value: Aerial
  misc_feature: MA Experiment ID: 108526 Result: Up-regulated in Transcription
  misc_feature: MA Experiment 108526 PARAMETER Experiment Name: Zm_5mM_NO_P Parameter: Age (day) Value: 8
  misc_feature: MA Experiment 108526 PARAMETER Experiment Name: Zm_5mM_NO_P Parameter: Organism Value: Zea mays
  misc_feature: MA Experiment 108526 PARAMETER Experiment Name: Zm_5mM_NO_P Parameter: Plant Line Value: 35A19
  misc_feature: MA Experiment 108526 PARAMETER Experiment Name: Zm_5mM_NO_P Parameter: Timepoint (hr) Value: 1
  misc_feature: MA Experiment 108526 PARAMETER Experiment Name: Zm_5mM_NO_P Parameter: Tissue Value: Aerial
  misc_feature: MA Experiment 108526 PARAMETER Experiment Name: Zm_5mM_NO_P Parameter: Treatment Value: 5mM NO vs. No Treatment
  misc_feature: MA Experiment ID: 108527 Result: Up-regulated in Transcription
  misc_feature: MA Experiment 108527 PARAMETER Experiment Name: Zm_5mM_NO_P Parameter: Age (day) Value: 8
  misc_feature: MA Experiment 108527 PARAMETER Experiment Name: Zm_5mM_NO_P Parameter: Organism Value: Zea mays
  misc_feature: MA Experiment 108527 PARAMETER Experiment Name: Zm_5mM_NO_P Parameter: Plant Line Value: 35A19
  misc_feature: MA Experiment 108527 PARAMETER Experiment Name: Zm_5mM_NO_P Parameter: Timepoint (hr) Value: 6
  misc_feature: MA Experiment 108527 PARAMETER Experiment Name: Zm_5mM_NO_P Parameter: Tissue Value: Aerial
  misc_feature: MA Experiment 108527 PARAMETER Experiment Name: Zm_5mM_NO_P Parameter: Treatment Value: 5mM NO vs. No Treatment
  misc_feature: MA Experiment ID: 108535 Result: Up-regulated in Transcription
  misc_feature: MA Experiment 108535 PARAMETER Experiment Name: Zm_Meristem_P Parameter: Age (day) Value: 8
  misc_feature: MA Experiment 108535 PARAMETER Experiment Name: Zm_Meristem_P Parameter: Organism Value: Zea mays
  misc_feature: MA Experiment 108535 PARAMETER Experiment Name: Zm_Meristem_P Parameter: Plant Line Value: 35A19
  misc_feature: MA Experiment 108535 PARAMETER Experiment Name: Zm_Meristem_P Parameter: Tissue Value: Root Meristem vs. Above Root Meristem
  misc_feature: MA Experiment ID: 108556 Result: Up-regulated in Transcription
  misc_feature: MA Experiment 108556 PARAMETER Experiment Name: Zm_Drought_P Parameter: Age (day) Value: 9
  misc_feature: MA Experiment 108556 PARAMETER Experiment Name: Zm_Drought_P Parameter: Organism Value: Zea mays
  misc_feature: MA Experiment 108556 PARAMETER Experiment Name: Zm_Drought_P Parameter: Plant Line Value: 35A19
  misc_feature: MA Experiment 108556 PARAMETER Experiment Name: Zm_Drought_P Parameter: Timepoint (hr) Value: 24
  misc_feature: MA Experiment 108556 PARAMETER Experiment Name: Zm_Drought_P Parameter: Tissue Value: Aerial
  misc_feature: MA Experiment 108556 PARAMETER Experiment Name: Zm_Drought_P Parameter: Treatment Value: Drought vs. No Drought
  misc_feature: MA Experiment ID: 108559 Result: Up-regulated in Transcription
  misc_feature: MA Experiment 108559 PARAMETER Experiment Name: Zm_5mM_NO_P Parameter: Age (day) Value: 8
  misc_feature: MA Experiment 108559 PARAMETER Experiment Name: Zm_5mM_NO_P Parameter: Organism Value: Zea mays
  misc_feature: MA Experiment 108559 PARAMETER Experiment Name: Zm_5mM_NO_P Parameter: Plant Line Value: 35A19
  misc_feature: MA Experiment 108559 PARAMETER Experiment Name: Zm_5mM_NO_P Parameter: Timepoint (hr) Value: 12
  misc_feature: MA Experiment 108559 PARAMETER Experiment Name: Zm_5mM_NO_P Parameter: Tissue Value: Aerial
  misc_feature: MA Experiment 108559 PARAMETER Experiment Name: Zm_5mM_NO_P Parameter: Treatment Value: 5mM NO vs. No Treatment
  misc_feature: MA Experiment ID: 20000477 Result: Up-regulated in Transcription
  misc_feature: MA Experiment 20000477 PARAMETER Experiment Name: Zm_5mM_SA_P Parameter: Age (day) Value: 10
  misc_feature: MA Experiment 20000477 PARAMETER Experiment Name: Zm_5mM_SA_P Parameter: Organism Value: Zea mays
  misc_feature: MA Experiment 20000477 PARAMETER Experiment Name: Zm_5mM_SA_P Parameter: Plant Line Value: 35A19
  misc_feature: MA Experiment 20000477 PARAMETER Experiment Name: Zm_5mM_SA_P Parameter: Timepoint (hr) Value: 48
  misc_feature: MA Experiment 20000477 PARAMETER Experiment Name: Zm_5mM_SA_P Parameter: Tissue Value: Aerial
  misc_feature: MA Experiment 20000477 PARAMETER Experiment Name: Zm_5mM_SA_P Parameter: Treatment Value: 5mM SA vs. No Treatment
  misc_feature: MA Experiment ID: 20000478 Result: Up-regulated in Transcription
  misc_feature: MA Experiment 20000478 PARAMETER Experiment Name: Zm_5mM_SA_P Parameter: Age (day) Value: 11
  misc_feature: MA Experiment 20000478 PARAMETER Experiment Name: Zm_5mM_SA_P Parameter: Organism Value: Zea mays
  misc_feature: MA Experiment 20000478 PARAMETER Experiment Name: Zm_5mM_SA_P Parameter: Plant Line Value: 35A19
  misc_feature: MA Experiment 20000478 PARAMETER Experiment Name: Zm_5mM_SA_P Parameter: Timepoint (hr) Value: 72
  misc_feature: MA Experiment 20000478 PARAMETER Experiment Name: Zm_5mM_SA_P Parameter: Tissue Value: Aerial
  misc_feature: MA Experiment 20000478 PARAMETER Experiment Name: Zm_5mM_SA_P Parameter: Treatment Value: 5mM SA vs. No Treatment
  misc_feature: MA Experiment ID: 20000487 Result: Up-regulated in Transcription
  misc_feature: MA Experiment 20000487 PARAMETER Experiment Name: Zm_50mM_NH4NO3_L_to_H_P Parameter: Organism Value: Zea mays
  misc_feature: MA Experiment 20000487 PARAMETER Experiment Name: Zm_50mM_NH4NO3_L_to_H_P Parameter: Timepoint (hr) Value: 4
  misc_feature: MA Experiment 20000487 PARAMETER Experiment Name: Zm_50mM_NH4NO3_L_to_H_P Parameter: Tissue Value: Leaves
  misc_feature: MA Experiment 20000487 PARAMETER Experiment Name: Zm_50mM_NH4NO3_L_to_H_P Parameter: Treatment Value: 50mM NH4NO3 vs. 100mM Mannitol
  misc_feature: MA Experiment ID: 20000488 Result: Up-regulated in Transcription
  misc_feature: MA Experiment 20000488 PARAMETER Experiment Name: Zm_50mM_NH4NO3_L_to_H_P Parameter: Organism Value: Zea mays
  misc_feature: MA Experiment 20000488 PARAMETER Experiment Name: Zm_50mM_NH4NO3_L_to_H_P Parameter: Timepoint (hr) Value: 8
  misc_feature: MA Experiment 20000488 PARAMETER Experiment Name: Zm_50mM_NH4NO3_L_to_H_P Parameter: Tissue Value: Leaves
  misc_feature: MA Experiment 20000488 PARAMETER Experiment Name: Zm_50mM_NH4NO3_L_to_H_P Parameter: Treatment Value: 50mM NH4NO3 vs. 100mM Mannitol
  misc_feature: MA Experiment ID: 20000492 Result: Down-regulated in Transcription
  misc_feature: MA Experiment 20000492 PARAMETER Experiment Name: Zm_Hybrid_Seed_Dev_P Parameter: DAP Value: 12
  misc_feature: MA Experiment 20000492 PARAMETER Experiment Name: Zm_Hybrid_Seed_Dev_P Parameter: Organism Value: Zea mays
  misc_feature: MA Experiment 20000492 PARAMETER Experiment Name: Zm_Hybrid_Seed_Dev_P Parameter: Plant Line Value: 35A19
  misc_feature: MA Experiment 20000492 PARAMETER Experiment Name: Zm_Hybrid_Seed_Dev_P Parameter: Tissue Value: Fert Kernel vs. Unfert Floret
  misc_feature: MA Experiment ID: 20000535 Result: Down-regulated in Transcription
  misc_feature: MA Experiment 20000535 PARAMETER Experiment Name: Zm_Hybrid_Seed_Dev_P Parameter: DAP Value: 30 vs. 12
  misc_feature: MA Experiment 20000535 PARAMETER Experiment Name: Zm_Hybrid_Seed_Dev_P Parameter: Organism Value: Zea mays
  misc_feature: MA Experiment 20000535 PARAMETER Experiment Name: Zm_Hybrid_Seed_Dev_P Parameter: Plant Line Value: 35A19
  misc_feature: MA Experiment 20000535 PARAMETER Experiment Name: Zm_Hybrid_Seed_Dev_P Parameter: Tissue Value: Embryo vs. Unfert Floret
  misc_feature: MA Experiment ID: 20001606 Result: Up-regulated in Transcription
  misc_feature: MA Experiment 20001606 PARAMETER Experiment Name: Zm_50ppm_KNO3_L-to-H_P Parameter: Age (day) Value: 19
  misc_feature: MA Experiment 20001606 PARAMETER Experiment Name: Zm_50ppm_KNO3_L-to-H_P Parameter: Organism Value: Zea mays
  misc_feature: MA Experiment 20001606 PARAMETER Experiment Name: Zm_50ppm_KNO3_L-to-H_P Parameter: Plant Line Value: 35A19
  misc_feature: MA Experiment 20001606 PARAMETER Experiment Name: Zm_50ppm_KNO3_L-to-H_P Parameter: Timepoint (hr) Value: 8
  misc_feature: MA Experiment 20001606 PARAMETER Experiment Name: Zm_50ppm_KNO3_L-to-H_P Parameter: Tissue Value: Shoots
  misc_feature: MA Experiment 20001606 PARAMETER Experiment Name: Zm_50ppm_KNO3_L-to-H_P Parameter: Treatment Value: 50ppm KNO3 vs. 50ppm KCl
  misc_feature: MA Experiment ID: 20001608 Result: Up-regulated in Transcription
  misc_feature: MA Experiment 20001608 PARAMETER Experiment Name: Zm_50ppm_KNO3_L-to-H_P Parameter: Age (day) Value: 21
  misc_feature: MA Experiment 20001608 PARAMETER Experiment Name: Zm_50ppm_KNO3_L-to-H_P Parameter: Organism Value: Zea mays
  misc_feature: MA Experiment 20001608 PARAMETER Experiment Name: Zm_50ppm_KNO3_L-to-H_P Parameter: Plant Line Value: 35A19
  misc_feature: MA Experiment 20001608 PARAMETER Experiment Name: Zm_50ppm_KNO3_L-to-H_P Parameter: Timepoint (hr) Value: 48
  misc_feature: MA Experiment 20001608 PARAMETER Experiment Name: Zm_50ppm_KNO3_L-to-H_P Parameter: Tissue Value: Shoots
  misc_feature: MA Experiment 20001608 PARAMETER Experiment Name: Zm_50ppm_KNO3_L-to-H_P Parameter: Treatment Value: 50ppm KNO3 vs. 50ppm KCl
gcacgagaccattacctagaacatcctaatcgaaaaatccgcagtcgcacacccgccattgcattcgcagcaccagcgccgcttctccttcctcgagctcacccctctcttctcttctcctattcgctcgcgtgctctctctctctctctctgctgcctcagccgccctcgctgtcgctgagccgacagattcattcggccggtcatggctgacgcgttgtgcaacggcgtcgtggcgtccccgtgcggccgggacgtcgccggcagggccaggggcgccggcagggccgcgctcgcggagtcccttcaggtcgccgggcacgccagcaagacctccttctccgccgggaggatgtcggtcaaggacagcaagccgaggcccctgtcgcgtagcctcgaggccgccgcgccaggacagatgaacctgtcgttccccaaggccatgcggtggtgggagaaggggctgcaccccaacatgcgcgaggtcgagtccgcgcaggacctcgccgactcgctgctcagcgccggcgacaaactcgtggtcgtcgacttcttctccccaggctgcggcggctgccgcgccctccaccccaagatcgcccagttcgccgagaagaacccgggcgtgcagttcctgcaggtgaactacgagacgcacaagtccatgtgctacagcctccgcgtccacgtcctccctttcttcaggttctaccggggagccgagggccgggtcagcagcttcagctgcaccaacgcaacgatcaacaagttcaaggacgcgctcgccaagcacggggctgagaggtgcagcctcgggcctgcgcgggggctggacgagtcggagctcatggctttggctgagaacagggacctgcacttcacctacgacaagccgggcggcctcgtccccctcgcggaagccattgccaaggaggctgccgcgccgggaggcccgtggcttcctctgcctgcgtccctgctcggccagggatcggccgataactcattgctgccgtctggaagatagaccgtgctccgtgctcggttggtttcattcattggaggtggctcctccgtcttgtacagatttcattcgttcgtagtggtctgatgatgctggagtgacagaaatattcagacgcgggatgcgcagtgactatcgcgggatgcgcagtgactatcgcgtctgtattgttgcatctagacctttgctgaaacatgaaaaaatccattgcttggc

SEQ ID NO: 4535 - protein, 273 aa, Zea mays subsp. mays
  peptide (1)..(273): Ceres Seq. ID no. 12376592
  misc_feature (43)..(196): Homolog of NCBI NO: 15236134 NR Description: putative thioredoxin
  misc_feature (43)..(196): Homolog of NCBI NO: 4973258 NR Description: thioredoxin-like 2 [Arabidopsis thaliana]
  misc_feature (73)..(207): Homolog of NCBI NO: 21554313 NR Description: thioredoxin-like protein [Arabidopsis thaliana]
  misc_feature (73)..(207): Homolog of NCBI NO: 18417441 NR Description: Thioredoxin - like protein
  misc_feature (65)..(233): Homolog of NCBI NO: 19071639 NR Description: putative thioredoxin [Oryza sativa (japonica
  misc_feature (63)..(223): Homolog of NCBI NO: 15240254 NR Description: thioredoxin-like 3
  misc_feature (71)..(250): Homolog of NCBI NO: 15225825 NR Description: putative thioredoxin; protein id: At2g33270.1
  misc_feature (42)..(273): Homolog of NCBI NO: 308906 NR Description: thioredoxin
  misc_feature (54)..(273): Homolog of NCBI NO: 15223262 NR Description: putative thioredoxin
  misc_feature (1)..(273): Homolog of NCBI NO: 34394520 NR Description: putative thioredoxin [Oryza sativa (japonica
MADALCNGVVASPCGRDVAGRARGAGRAALAESLQVAGHASKTSFSAGRMSVKDSKPRPLSRSLEAAAPGQMNLSFPKAMRWWEKGLHPNMREVESAQDLADSLLSAGDKLVVVDFFSPGCGGCRALHPKIAQFAEKNPGVQFLQVNYETHKSMCYSLRVHVLPFFRFYRGAEGRVSSFSCTNATINKFKDALAKHGAERCSLGPARGLDESELMALAENRDLHFTYDKPGGLVPLAEAIAKEAAAPGGPWLPLPASLLGQGSADNSLLPSGR

SEQ ID NO: 4536 - protein, 224 aa, Zea mays subsp. mays
  peptide (1)..(224): Ceres Seq. ID no. 12376593
  misc_feature (1)..(147): Homolog of NCBI NO: 15236134 NR Description: putative thioredoxin
  misc_feature (1)..(147): Homolog of NCBI NO: 4973258 NR Description: thioredoxin-like 2 [Arabidopsis thaliana]
  misc_feature (24)..(158): Homolog of NCBI NO: 21554313 NR Description: thioredoxin-like protein [Arabidopsis thaliana]
  misc_feature (24)..(158): Homolog of NCBI NO: 18417441 NR Description: Thioredoxin - like protein
  misc_feature (16)..(184): Homolog of NCBI NO: 19071639 NR Description: putative thioredoxin [Oryza sativa (japonica
  misc_feature (14)..(174): Homolog of NCBI NO: 15240254 NR Description: thioredoxin-like 3
  misc_feature (22)..(201): Homolog of NCBI NO: 15225825 NR Description: putative thioredoxin; protein id: At2g33270.1
  misc_feature (1)..(224): Homolog of NCBI NO: 308906 NR Description: thioredoxin
  misc_feature (5)..(224): Homolog of NCBI NO: 15223262 NR Description: putative thioredoxin
  misc_feature (1)..(224): Homolog of NCBI NO: 34394520 NR Description: putative thioredoxin [Oryza sativa (japonica
MSVKDSKPRPLSRSLEAAAPGQMNLSFPKAMRWWEKGLHPNMREVESAQDLADSLLSAGDKLVVVDFFSPGCGGCRALHPKIAQFAEKNPGVQFLQVNYETHKSMCYSLRVHVLPFFRFYRGAEGRVSSFSCTNATINKFKDALAKHGAERCSLGPARGLDESELMALAENRDLHFTYDKPGGLVPLAEAIAKEAAAPGGPWLPLPASLLGQGSADNSLLPSGR

SEQ ID NO: 4537 - protein, 202 aa, Zea mays subsp. mays
  peptide (1)..(202): Ceres Seq. ID no. 12376594
  misc_feature (1)..(125): Homolog of NCBI NO: 15236134 NR Description: putative thioredoxin
  misc_feature (1)..(125): Homolog of NCBI NO: 4973258 NR Description: thioredoxin-like 2 [Arabidopsis thaliana]
  misc_feature (2)..(136): Homolog of NCBI NO: 21554313 NR Description: thioredoxin-like protein [Arabidopsis thaliana]
  misc_feature (2)..(136): Homolog of NCBI NO: 18417441 NR Description: Thioredoxin - like protein
  misc_feature (1)..(162): Homolog of NCBI NO: 19071639 NR Description: putative thioredoxin [Oryza sativa (japonica
  misc_feature (1)..(152): Homolog of NCBI NO: 15240254 NR Description: thioredoxin-like 3
  misc_feature (1)..(179): Homolog of NCBI NO: 15225825 NR Description: putative thioredoxin; protein id: At2g33270.1
  misc_feature (1)..(202): Homolog of NCBI NO: 308906 NR Description: thioredoxin
  misc_feature (1)..(202): Homolog of NCBI NO: 15223262 NR Description: putative thioredoxin
  misc_feature (1)..(202): Homolog of NCBI NO: 34394520 NR Description: putative thioredoxin [Oryza sativa (japonica
MNLSFPKAMRWWEKGLHPNMREVESAQDLADSLLSAGDKLVVVDFFSPGCGGCRALHPKIAQFAEKNPGVQFLQVNYETHKSMCYSLRVHVLPFFRFYRGAEGRVSSFSCTNATINKFKDALAKHGAERCSLGPARGLDESELMALAENRDLHFTYDKPGGLVPLAEAIAKEAAAPGGPWLPLPASLLGQGSADNSLLPSGR

SEQ ID NO: 4538 - DNA, 1408 bp, Zea mays subsp. mays
  misc_feature (1)..(1408): Ceres Seq. ID no. 12344038
  misc_feature: MA Experiment ID: 108504 Result: Up-regulated in Transcription
  misc_feature: MA Experiment 108504 PARAMETER Experiment Name: Zm_Drought_P Parameter: Age (day) Value: 8
  misc_feature: MA Experiment 108504 PARAMETER Experiment Name: Zm_Drought_P Parameter: Organism Value: Zea mays
  misc_feature: MA Experiment 108504 PARAMETER Experiment Name: Zm_Drought_P Parameter: Plant Line Value: 35A19
  misc_feature: MA Experiment 108504 PARAMETER Experiment Name: Zm_Drought_P Parameter: Timepoint (hr) Value: 12
  misc_feature: MA Experiment 108504 PARAMETER Experiment Name: Zm_Drought_P Parameter: Tissue Value: Aerial
  misc_feature: MA Experiment 108504 PARAMETER Experiment Name: Zm_Drought_P Parameter: Treatment Value: Drought vs. No Drought
  misc_feature: MA Experiment ID: 108527 Result: Up-regulated in Transcription
  misc_feature: MA Experiment 108527 PARAMETER Experiment Name: Zm_5mM_NO_P Parameter: Age (day) Value: 8
  misc_feature: MA Experiment 108527 PARAMETER Experiment Name: Zm_5mM_NO_P Parameter: Organism Value: Zea mays
  misc_feature: MA Experiment 108527 PARAMETER Experiment Name: Zm_5mM_NO_P Parameter: Plant Line Value: 35A19
  misc_feature: MA Experiment 108527 PARAMETER Experiment Name: Zm_5mM_NO_P Parameter: Timepoint (hr) Value: 6
  misc_feature: MA Experiment 108527 PARAMETER Experiment Name: Zm_5mM_NO_P Parameter: Tissue Value: Aerial
  misc_feature: MA Experiment 108527 PARAMETER Experiment Name: Zm_5mM_NO_P Parameter: Treatment Value: 5mM NO vs. No Treatment
  misc_feature: MA Experiment ID: 108535 Result: Up-regulated in Transcription
  misc_feature: MA Experiment 108535 PARAMETER Experiment Name: Zm_Meristem_P Parameter: Age (day) Value: 8
  misc_feature: MA Experiment 108535 PARAMETER Experiment Name: Zm_Meristem_P Parameter: Organism Value: Zea mays
  misc_feature: MA Experiment 108535 PARAMETER Experiment Name: Zm_Meristem_P Parameter: Plant Line Value: 35A19
  misc_feature: MA Experiment 108535 PARAMETER Experiment Name: Zm_Meristem_P Parameter: Tissue Value: Root Meristem vs. Above Root Meristem
  misc_feature: MA Experiment ID: 108540 Result: Up-regulated in Transcription
  misc_feature: MA Experiment 108540 PARAMETER Experiment Name: Zm_20percent_PEG_P Parameter: Age (day) Value: 8
  misc_feature: MA Experiment 108540 PARAMETER Experiment Name: Zm_20percent_PEG_P Parameter: Organism Value: Zea mays
  misc_feature: MA Experiment 108540 PARAMETER Experiment Name: Zm_20percent_PEG_P Parameter: Plant Line Value: 35A19
  misc_feature: MA Experiment 108540 PARAMETER Experiment Name: Zm_20percent_PEG_P Parameter: Timepoint (hr) Value: 6
  misc_feature: MA Experiment 108540 PARAMETER Experiment Name: Zm_20percent_PEG_P Parameter: Tissue Value: Aerial
  misc_feature: MA Experiment 108540 PARAMETER Experiment Name: Zm_20percent_PEG_P Parameter: Treatment Value: 20percent PEG vs. No Treatment
  misc_feature: MA Experiment ID: 108556 Result: Up-regulated in Transcription
  misc_feature: MA Experiment 108556 PARAMETER Experiment Name: Zm_Drought_P Parameter: Age (day) Value: 9
  misc_feature: MA Experiment 108556 PARAMETER Experiment Name: Zm_Drought_P Parameter: Organism Value: Zea mays
  misc_feature: MA Experiment 108556 PARAMETER Experiment Name: Zm_Drought_P Parameter: Plant Line Value: 35A19
  misc_feature: MA Experiment 108556 PARAMETER Experiment Name: Zm_Drought_P Parameter: Timepoint (hr) Value: 24
  misc_feature: MA Experiment 108556 PARAMETER Experiment Name: Zm_Drought_P Parameter: Tissue Value: Aerial
  misc_feature: MA Experiment 108556 PARAMETER Experiment Name: Zm_Drought_P Parameter: Treatment Value: Drought vs. No Drought
  misc_feature: MA Experiment ID: 108559 Result: Up-regulated in Transcription
  misc_feature: MA Experiment 108559 PARAMETER Experiment Name: Zm_5mM_NO_P Parameter: Age (day) Value: 8
  misc_feature: MA Experiment 108559 PARAMETER Experiment Name: Zm_5mM_NO_P Parameter: Organism Value: Zea mays
  misc_feature: MA Experiment 108559 PARAMETER Experiment Name: Zm_5mM_NO_P Parameter: Plant Line Value: 35A19
  misc_feature: MA Experiment 108559 PARAMETER Experiment Name: Zm_5mM_NO_P Parameter: Timepoint (hr) Value: 12
  misc_feature: MA Experiment 108559 PARAMETER Experiment Name: Zm_5mM_NO_P Parameter: Tissue Value: Aerial
  misc_feature: MA Experiment 108559 PARAMETER Experiment Name: Zm_5mM_NO_P Parameter: Treatment Value: 5mM NO vs. No Treatment
  misc_feature: MA Experiment ID: 108597 Result: Up-regulated in Transcription
  misc_feature: MA Experiment 108597 PARAMETER Experiment Name: Zm_100uM_ABA_P Parameter: Age (day) Value: 9
  misc_feature: MA Experiment 108597 PARAMETER Experiment Name: Zm_100uM_ABA_P Parameter: Organism Value: Zea mays
  misc_feature: MA Experiment 108597 PARAMETER Experiment Name: Zm_100uM_ABA_P Parameter: Plant Line Value: 35A19
  misc_feature: MA Experiment 108597 PARAMETER Experiment Name: Zm_100uM_ABA_P Parameter: Timepoint (hr) Value: 24
  misc_feature: MA Experiment 108597 PARAMETER Experiment Name: Zm_100uM_ABA_P Parameter: Tissue Value: Aerial
  misc_feature: MA Experiment 108597 PARAMETER Experiment Name: Zm_100uM_ABA_P Parameter: Treatment Value: 100uM ABA vs. No Treatment
  misc_feature: MA Experiment ID: 20000477 Result: Up-regulated in Transcription
  misc_feature: MA Experiment 20000477 PARAMETER Experiment Name: Zm_5mM_SA_P Parameter: Age (day) Value: 10
  misc_feature: MA Experiment 20000477 PARAMETER Experiment Name: Zm_5mM_SA_P Parameter: Organism Value: Zea mays
  misc_feature: MA Experiment 20000477 PARAMETER Experiment Name: Zm_5mM_SA_P Parameter: Plant Line Value: 35A19
  misc_feature: MA Experiment 20000477 PARAMETER Experiment Name: Zm_5mM_SA_P Parameter: Timepoint (hr) Value: 48
  misc_feature: MA Experiment 20000477 PARAMETER Experiment Name: Zm_5mM_SA_P Parameter: Tissue Value: Aerial
  misc_feature: MA Experiment 20000477 PARAMETER Experiment Name: Zm_5mM_SA_P Parameter: Treatment Value: 5mM SA vs. No Treatment
  misc_feature: MA Experiment ID: 20000478 Result: Up-regulated in Transcription
  misc_feature: MA Experiment 20000478 PARAMETER Experiment Name: Zm_5mM_SA_P Parameter: Age (day) Value: 11
  misc_feature: MA Experiment 20000478 PARAMETER Experiment Name: Zm_5mM_SA_P Parameter: Organism Value: Zea mays
  misc_feature: MA Experiment 20000478 PARAMETER Experiment Name: Zm_5mM_SA_P Parameter: Plant Line Value: 35A19
  misc_feature: MA Experiment 20000478 PARAMETER Experiment Name: Zm_5mM_SA_P Parameter: Timepoint (hr) Value: 72
  misc_feature: MA Experiment 20000478 PARAMETER Experiment Name: Zm_5mM_SA_P Parameter: Tissue Value: Aerial
  misc_feature: MA Experiment 20000478 PARAMETER Experiment Name: Zm_5mM_SA_P Parameter: Treatment Value: 5mM SA vs. No Treatment
gtctagattcattgcacctgctggtcgtttgaactttgaaccgagcggcacggcaaccctttctccgagccgcccaagtccgtacagcgcccatgcccttctcacgtgcatgcccccctccccaaaaccacacacacgagaggaaaaaaaaagggggctcattttcctacgagatcccgtggaaaacggccgggtgcggcaggagaggccggggtgcctgccagtgccatcacgtgccggtgaccaccgtcctgatcctcatcccctcgctcgctgcgcctggcctgacgtgtccccccggcccccgggtccgtgtgtacgctggcgtccggcgggatataaaagcggtcccgcacccacctcttcttcctccttttttttctctcatccgaattcccaggcaggcaggtcggcgaggagggcaggaagaccgaagaccgagccgtgcgggggctcgggacgggaacgggacaggaccccaaaatctcagatccttcctgcccgcccgcccgtgcccgtcgacgcgtcgttcttgccggccgcgccccacctccgccctctcctcctccagggggatcggatacgccacaggctgcgcgatggtgctgtgggtcttcggctacggctccctcatctggaaccccggcttcgacttcgacgacaaaatcctcggcttcatcaagggctacaagcgcacctttaatctcgcttgcattgaccacagaggcacaccggagcatccggcgaggacctgcacgcttgaaaccgacgacgaggccatatgctggggaattgcatattgtgtcaagggtggtccagaaaaagagctaaaagcaatgcagtacttggagagaagagagtgtgagtacgaccagaaaatatccattgatttctacaaggaaggagatcccttgaaaccagctgtgacgggcgtcttagtgttcgtttccactccagatccaattggcaacaagtactatcttggccctgctcctctgcaggatatggcaaggcaaattgctacagccaatggccctactggctataatagggattacctgttctcaatggagaaggcattagccagcattagccacgaagatgattcgatcatagagcttgcaaacgaggtgaggaaggtgctcaacagaacaaaggagaccaagatcactggtgccaatgcttccctgaaatcacatgcccctcttgtgcacctgtccgcgcttccagaaggcaccgttgtggactcgagatagcgacctctactcggaatttactttcagctcttgcatgtttgtggttgtggccatcatgtactgattttcccttttcaacagttgtcgtgaggctgtatcgtctggagtaaaaaaaaatgctaaaagccggcactaataatgatattaacttg

SEQ ID NO: 4539 - protein, 387 aa, Zea mays subsp. mays
  peptide (1)..(387): Ceres Seq. ID no. 12344039
  misc_feature (172)..(350): Pfam Name: ChaC-like protein Pfam Description: ChaC-like protein
  misc_feature (170)..(365): Homolog of NCBI NO: 18401334 NR Description: expressed protein
  misc_feature (269)..(333): Homolog of NCBI NO: 7486662 NR Description: hypothetical protein F8F16.110 - Arabidopsis
  misc_feature (170)..(250): Homolog of NCBI NO: 7486662 NR Description: hypothetical protein F8F16.110 - Arabidopsis
  misc_feature (249)..(387): Homolog of NCBI NO: 31711499 NR Description: OsCTTP [Oryza sativa (indica cultivar-group)]
  misc_feature (170)..(250): Homolog of NCBI NO: 7486723 NR Description: hypothetical protein F9D12.14 - Arabidopsis
  misc_feature (269)..(358): Homolog of NCBI NO: 7486723 NR Description: hypothetical protein F9D12.14 - Arabidopsis
  misc_feature (170)..(358): Homolog of NCBI NO: 15239626 NR Description: putative protein; protein id: At5g26220.1
  misc_feature (170)..(386): Homolog of NCBI NO: 27525010 NR Description: putative cation transporter [Beta procumbens]
  misc_feature (170)..(368): Homolog of NCBI NO: 21593515 NR Description: unknown [Arabidopsis thaliana]
  misc_feature (170)..(368): Homolog of NCBI NO: 18417778 NR Description: unknown protein
MPFSRACPPPQNHTHERKKKGGSFSYEIPWKTAGCGRRGRGACQCHHVPVTTVLILIPSLAAPGLTCPPGPRVRVYAGVRRDIKAVPHPPLLPPFFSLIRIPRQAGRRGGQEDRRPSRAGARDGNGTGPQNLRSFLPARPCPSTRRSCRPRPTSALSSSRGIGYATGCAMVLWVFGYGSLIWNPGFDFDDKILGFIKGYKRTFNLACIDHRGTPEHPARTCTLETDDEAICWGIAYCVKGGPEKELKAMQYLERRECEYDQKISIDFYKEGDPLKPAVTGVLVFVSTPDPIGNKYYLGPAPLQDMARQIATANGPTGYNRDYLFSMEKALASISHEDDSIIELANEVRKVLNRTKETKITGANASLKSHAPLVHLSALPEGTVVDSR

SEQ ID NO: 4540 - protein, 233 aa, Zea mays subsp. mays
  peptide (1)..(233): Ceres Seq. ID no. 12344040
SRFIAPAGRLNFEPSGTATLSPSRPSPYSAHALLTCMPPSPKPHTREEKKRGLIFLRDPVENGRVRQERPGCLPVPSRAGDHRPDPHPLARCAWPDVSPRPPGPCVRWRPAGYKSGPAPTSSSSFFFSHPNSQAGRSARRAGRPKTEPCGGSGRERDRTPKSQILPARPPVPVDASFLPAAPHLRPLLLQGDRIRHRLRDGAVGLRLRLPHLEPRLRLRRQNPRLHQGLQAHL

SEQ ID NO: 4541 - protein, 218 aa, Zea mays subsp. mays
  peptide (1)..(218): Ceres Seq. ID no. 12344041
  misc_feature (3)..(181): Pfam Name: ChaC-like protein Pfam Description: ChaC-like protein
  misc_feature (1)..(196): Homolog of NCBI NO: 18401334 NR Description: expressed protein
  misc_feature (100)..(164): Homolog of NCBI NO: 7486662 NR Description: hypothetical protein F8F16.110 - Arabidopsis
  misc_feature (1)..(81): Homolog of NCBI NO: 7486662 NR Description: hypothetical protein F8F16.110 - Arabidopsis
  misc_feature (80)..(218): Homolog of NCBI NO: 31711499 NR Description: OsCTTP [Oryza sativa (indica cultivar-group)]
  misc_feature (1)..(81): Homolog of NCBI NO: 7486723 NR Description: hypothetical protein F9D12.14 - Arabidopsis
  misc_feature (100)..(189): Homolog of NCBI NO: 7486723 NR Description: hypothetical protein F9D12.14 - Arabidopsis
  misc_feature (1)..(189): Homolog of NCBI NO: 15239626 NR Description: putative protein; protein id: At5g26220.1
  misc_feature (1)..(217): Homolog of NCBI NO: 27525010 NR Description: putative cation transporter [Beta procumbens]
  misc_feature (1)..(199): Homolog of NCBI NO: 21593515 NR Description: unknown [Arabidopsis thaliana]
  misc_feature (1)..(199): Homolog of NCBI NO: 18417778 NR Description: unknown protein
MVLWVFGYGSLIWNPGFDFDDKILGFIKGYKRTFNLACIDHRGTPEHPARTCTLETDDEAICWGIAYCVKGGPEKELKAMQYLERRECEYDQKISIDFYKEGDPLKPAVTGVLVFVSTPDPIGNKYYLGPAPLQDMARQIATANGPTGYNRDYLFSMEKALASISHEDDSIIELANEVRKVLNRTKETKITGANASLKSHAPLVHLSALPEGTVVDSR

SEQ ID NO: 4542 - DNA, 1389 bp, Zea mays subsp. mays
  misc_feature (1)..(1389): Ceres Seq. ID no. 12352271
  misc_feature: MA Experiment ID: 108689 Result: Up-regulated in Transcription
  misc_feature: MA Experiment 108689 PARAMETER Experiment Name: Zm_Drought_Roots_P Parameter: Age (day) Value: 9
  misc_feature: MA Experiment 108689 PARAMETER Experiment Name: Zm_Drought_Roots_P Parameter: Organism Value: Zea mays
  misc_feature: MA Experiment 108689 PARAMETER Experiment Name: Zm_Drought_Roots_P Parameter: Plant Line Value: 35A19
  misc_feature: MA Experiment 108689 PARAMETER Experiment Name: Zm_Drought_Roots_P Parameter: Timepoint (hr) Value: 24
  misc_feature: MA Experiment 108689 PARAMETER Experiment Name: Zm_Drought_Roots_P Parameter: Tissue Value: Roots
  misc_feature: MA Experiment 108689 PARAMETER Experiment Name: Zm_Drought_Roots_P Parameter: Treatment Value: Drought vs. No Drought
  misc_feature: MA Experiment ID: 20000534 Result: Down-regulated in Transcription
  misc_feature: MA Experiment 20000534 PARAMETER Experiment Name: Zm_Hybrid_Pollen_P Parameter: Age (day) Value: 8
  misc_feature: MA Experiment 20000534 PARAMETER Experiment Name: Zm_Hybrid_Pollen_P Parameter: Organism Value: Zea mays
  misc_feature: MA Experiment 20000534 PARAMETER Experiment Name: Zm_Hybrid_Pollen_P Parameter: Plant Line Value: 35A19
  misc_feature: MA Experiment 20000534 PARAMETER Experiment Name: Zm_Hybrid_Pollen_P Parameter: Tissue Value: Pollen vs. Aerial
gaagtaagcgtggatgttgcccacgtggcccccggctcctccagaagtagccatacggattcagatcgcggccgcggcgactccccgagcagaagaacccgatcgaacgcggccgcggcggcgactccccgatctcagatccctgctgcgagcgaagtgttcgattcgagcagagatggcggcggcatgggcggtgctggctttgttcctcgtcgcggcgcaggtggcggcggcggcgccggtcacggcgccagcgttcctgtgggcgcccaaaaactacggattcagctctgatgatgctaaggaggtagtccattaccaaacaatctcaccaaagagcttagctaaatctgttctcgaggaaggtggctggtcaaacttcatgtgctcaagggaggatactcagaataatgttgatgttgccattgtttttattggctcaaagctgcaatcgtcagacatatctaaagataagcaagttgatccagctttagcagacacactgaagctctccttcacacgctcagagttttccatggcattcccctacgtttccaccacagtcgacgagagactagaggactcgttgctatccagctttgccgagaactgcaacaatggtttcggaagaaaccgcgtcacctacacagacacgtgtaccggtcaagatctgaagaaataccacaacatggatgccatcaatgacctggtagtgtcaggggtagcgtcaaggagagtcaaccacccaagtggacagaccgatgtaatcgtcttctgtagcggcgggttcgagaatccaggcactgcgaaatcagaaggagagctgctttcccagcttgtggacttgctggacttgtcgggagccaaatatacggtcctctatgcgtcccaaccgtctggtttgctggagagcccttcgggcctgccgctgggtaggcatctcgcggagaagaagactaacggcacgaaagctgtccagggcgaaaaatgcgatggcgagtgcctcgtcaaatctagtctcctcgaaggaactttcgttgggatagtgcttctcatcatcctgatatcaggactcatgtgcatgatggggatcgatactccctcgaggtttgaagctccccaggagtcttgatctctcccttggactgcagaatccgcgggggggttgtgacgagggcacgcggcggcgttgaggggggccggtgttctgttggtctgcactgtggatatatatcgtttagcttcccatttggaagggagtacgccttgtgtatttttttttaccgagccaactgtcactcacaatgtgctagaattttttggtgtaatatttggctatttgcgtttcgcgtctacggacaactaataagctgaggcctgaggcattgc

SEQ ID NO: 4543 - protein, 372 aa, Zea mays subsp. mays
  peptide (1)..(372): Ceres Seq. ID no. 12352272
  misc_feature (105)..(165): Homolog of NCBI NO: 25405838 NR Description: hypothetical protein T5A14.4 [imported] -
  misc_feature (168)..(372): Homolog of NCBI NO: 21618303 NR Description: unknown [Arabidopsis thaliana]
  misc_feature (60)..(372): Homolog of NCBI NO: 24417230 NR Description: unknown [Arabidopsis thaliana]
  misc_feature (58)..(372): Homolog of NCBI NO: 30682651 NR Description: expressed protein [Arabidopsis thaliana]
MLPTWPPAPPEVAIRIQIAAAATPRAEEPDRTRPRRRLPDLRSLLRAKCSIRAEMAAAWAVLALFLVAAQVAAAAPVTAPAFLWAPKNYGFSSDDAKEVVHYQTISPKSLAKSVLEEGGWSNFMCSREDTQNNVDVAIVFIGSKLQSSDISKDKQVDPALADTLKLSFTRSEFSMAFPYVSTTVDERLEDSLLSSFAENCNNGFGRNRVTYTDTCTGQDLKKYHNMDAINDLVVSGVASRRVNHPSGQTDVIVFCSGGFENPGTAKSEGELLSQLVDLLDLSGAKYTVLYASQPSGLLESPSGLPLGRHLAEKKTNGTKAVQGEKCDGECLVKSSLLEGTFVGIVLLIILISGLMCMMGIDTPSRFEAPQES

SEQ ID NO: 4544 - protein, 318 aa, Zea mays subsp. mays
  peptide (1)..(318): Ceres Seq. ID no. 12352273
  misc_feature (51)..(111): Homolog of NCBI NO: 25405838 NR Description: hypothetical protein T5A14.4 [imported] -
  misc_feature (114)..(318): Homolog of NCBI NO: 21618303 NR Description: unknown [Arabidopsis thaliana]
  misc_feature (6)..(318): Homolog of NCBI NO: 24417230 NR Description: unknown [Arabidopsis thaliana]
  misc_feature (4)..(318): Homolog of NCBI NO: 30682651 NR Description: expressed protein [Arabidopsis thaliana]
MAAAWAVLALFLVAAQVAAAAPVTAPAFLWAPKNYGFSSDDAKEVVHYQTISPKSLAKSVLEEGGWSNFMCSREDTQNNVDVAIVFIGSKLQSSDISKDKQVDPALADTLKLSFTRSEFSMAFPYVSTTVDERLEDSLLSSFAENCNNGFGRNRVTYTDTCTGQDLKKYHNMDAINDLVVSGVASRRVNHPSGQTDVIVFCSGGFENPGTAKSEGELLSQLVDLLDLSGAKYTVLYASQPSGLLESPSGLPLGRHLAEKKTNGTKAVQGEKCDGECLVKSSLLEGTFVGIVLLIILISGLMCMMGIDTPSRFEAPQES

SEQ ID NO: 4545 - protein, 249 aa, Zea mays subsp. mays
  peptide (1)..(249): Ceres Seq. ID no. 12352274
  misc_feature (1)..(42): Homolog of NCBI NO: 25405838 NR Description: hypothetical protein T5A14.4 [imported] -
  misc_feature (45)..(249): Homolog of NCBI NO: 21618303 NR Description: unknown [Arabidopsis thaliana]
  misc_feature (1)..(249): Homolog of NCBI NO: 24417230 NR Description: unknown [Arabidopsis thaliana]
  misc_feature (1)..(249): Homolog of NCBI NO: 30682651 NR Description: expressed protein [Arabidopsis thaliana]
MCSREDTQNNVDVAIVFIGSKLQSSDISKDKQVDPALADTLKLSFTRSEFSMAFPYVSTTVDERLEDSLLSSFAENCNNGFGRNRVTYTDTCTGQDLKKYHNMDAINDLVVSGVASRRVNHPSGQTDVIVFCSGGFENPGTAKSEGELLSQLVDLLDLSGAKYTVLYASQPSGLLESPSGLPLGRHLAEKKTNGTKAVQGEKCDGECLVKSSLLEGTFVGIVLLIILISGLMCMMGIDTPSRFEAPQES

SEQ ID NO: 4546 - DNA, 909 bp, Zea mays subsp. mays; identical to SEQ ID NO: 3686
  misc_feature (1)..(909): Ceres Seq. ID no. 12356120
  misc_feature: MA Experiment ID: 108522 Result: Down-regulated in Transcription
  misc_feature: MA Experiment 108522 PARAMETER Experiment Name: Zm_42deg_Heat_P Parameter: Age (day) Value: 8
  misc_feature: MA Experiment 108522 PARAMETER Experiment Name: Zm_42deg_Heat_P Parameter: Organism Value: Zea mays
  misc_feature: MA Experiment 108522 PARAMETER Experiment Name: Zm_42deg_Heat_P Parameter: Plant Line Value: 35A19
  misc_feature: MA Experiment 108522 PARAMETER Experiment Name: Zm_42deg_Heat_P Parameter: Temperature (deg C) Value: 42 vs. 22
  misc_feature: MA Experiment 108522 PARAMETER Experiment Name: Zm_42deg_Heat_P Parameter: Timepoint (hr) Value: 1
  misc_feature: MA Experiment 108522 PARAMETER Experiment Name: Zm_42deg_Heat_P Parameter: Tissue Value: Aerial
  misc_feature: MA Experiment ID: 108543 Result: Down-regulated in Transcription
  misc_feature: MA Experiment ID: 108689 Result: Up-regulated in Transcription
  misc_feature: MA Experiment 108689 PARAMETER Experiment Name: Zm_Drought_Roots_P Parameter: Age (day) Value: 9
  misc_feature: MA Experiment 108689 PARAMETER Experiment Name: Zm_Drought_Roots_P Parameter: Organism Value: Zea mays
  misc_feature: MA Experiment 108689 PARAMETER Experiment Name: Zm_Drought_Roots_P Parameter: Plant Line Value: 35A19
  misc_feature: MA Experiment 108689 PARAMETER Experiment Name: Zm_Drought_Roots_P Parameter: Timepoint (hr) Value: 24
  misc_feature: MA Experiment 108689 PARAMETER Experiment Name: Zm_Drought_Roots_P Parameter: Tissue Value: Roots
  misc_feature: MA Experiment 108689 PARAMETER Experiment Name: Zm_Drought_Roots_P Parameter: Treatment Value: Drought vs. No Drought
  misc_feature: MA Experiment ID: 20000479 Result: Up-regulated in Transcription
  misc_feature: MA Experiment 20000479 PARAMETER Experiment Name: Zm_Drought_P Parameter: Age (day) Value: 10
  misc_feature: MA Experiment 20000479 PARAMETER Experiment Name: Zm_Drought_P Parameter: Organism Value: Zea mays
  misc_feature: MA Experiment 20000479 PARAMETER Experiment Name: Zm_Drought_P Parameter: Plant Line Value: 35A19
  misc_feature: MA Experiment 20000479 PARAMETER Experiment Name: Zm_Drought_P Parameter: Timepoint (hr) Value: 48
  misc_feature: MA Experiment 20000479 PARAMETER Experiment Name: Zm_Drought_P Parameter: Tissue Value: Aerial
  misc_feature: MA Experiment 20000479 PARAMETER Experiment Name: Zm_Drought_P Parameter: Treatment Value: Drought vs. No Drought
  misc_feature: MA Experiment ID: 20000480 Result: Up-regulated in Transcription
  misc_feature: MA Experiment 20000480 PARAMETER Experiment Name: Zm_Drought_P Parameter: Age (day) Value: 11
  misc_feature: MA Experiment 20000480 PARAMETER Experiment Name: Zm_Drought_P Parameter: Organism Value: Zea mays
  misc_feature: MA Experiment 20000480 PARAMETER Experiment Name: Zm_Drought_P Parameter: Plant Line Value: 35A19
  misc_feature: MA Experiment 20000480 PARAMETER Experiment Name: Zm_Drought_P Parameter: Timepoint (hr) Value: 72
  misc_feature: MA Experiment 20000480 PARAMETER Experiment Name: Zm_Drought_P Parameter: Tissue Value: Aerial
  misc_feature: MA Experiment 20000480 PARAMETER Experiment Name: Zm_Drought_P Parameter: Treatment Value: Drought vs. No Drought
  misc_feature: MA Experiment ID: 20000534 Result: Down-regulated in Transcription
  misc_feature: MA Experiment 20000534 PARAMETER Experiment Name: Zm_Hybrid_Pollen_P Parameter: Age (day) Value: 8
  misc_feature: MA Experiment 20000534 PARAMETER Experiment Name: Zm_Hybrid_Pollen_P Parameter: Organism Value: Zea mays
  misc_feature: MA Experiment 20000534 PARAMETER Experiment Name: Zm_Hybrid_Pollen_P Parameter: Plant Line Value: 35A19
  misc_feature: MA Experiment 20000534 PARAMETER Experiment Name: Zm_Hybrid_Pollen_P Parameter: Tissue Value: Pollen vs. Aerial
  misc_feature: MA Experiment ID: 20000535 Result: Down-regulated in Transcription
  misc_feature: MA Experiment 20000535 PARAMETER Experiment Name: Zm_Hybrid_Seed_Dev_P Parameter: DAP Value: 30 vs. 12
  misc_feature: MA Experiment 20000535 PARAMETER Experiment Name: Zm_Hybrid_Seed_Dev_P Parameter: Organism Value: Zea mays
  misc_feature: MA Experiment 20000535 PARAMETER Experiment Name: Zm_Hybrid_Seed_Dev_P Parameter: Plant Line Value: 35A19
  misc_feature: MA Experiment 20000535 PARAMETER Experiment Name: Zm_Hybrid_Seed_Dev_P Parameter: Tissue Value: Embryo vs. Unfert Floret

SEQ ID NO: 4547 - protein, 198 aa, Zea mays subsp. mays; identical to SEQ ID NO: 3687
  peptide (1)..(198): Ceres Seq. ID no. 12356121
  misc_feature (19)..(178): Pfam Name: Equine herpesvirus glycoprotein gp2 Pfam Description: Equine herpesvirus glycoprotein gp2
  misc_feature (11)..(190): Homolog of NCBI NO: 11359723 NR Description: proteophosphoglycan, membrane-associated - Leishmania major (fragment) >gi|5420389|emb|CAB46680.1|
  misc_feature (19)..(193): Homolog of NCBI NO: 32699068 NR Description: hypothetical protein FLJ35107 [Homo sapiens]
  misc_feature (1)..(193): Homolog of NCBI NO: 2429362 NR Description: proline rich protein [Santalum album]
  misc_feature (13)..(190): Homolog of NCBI NO: 11359723 NR Description: proteophosphoglycan, membrane-associated - Leishmania major (fragment) >gi|5420389|emb|CAB46680.1|
  misc_feature (19)..(193): Homolog of NCBI NO: 32699068 NR Description: hypothetical protein FLJ35107 [Homo sapiens]
  misc_feature (17)..(183): Homolog of NCBI NO: 32699068 NR Description: hypothetical protein FLJ35107 [Homo sapiens]
  misc_feature (11)..(192): Homolog of NCBI NO: 11359723 NR Description: proteophosphoglycan, membrane-associated - Leishmania major (fragment) >gi|5420389|emb|CAB46680.1|
  misc_feature (11)..(193): Homolog of NCBI NO: 13592175 NR Description: ppg3 [Leishmania major]
  misc_feature (11)..(190): Homolog of NCBI NO: 13592175 NR Description: ppg3 [Leishmania major]
  misc_feature (11)..(190): Homolog of NCBI NO: 13592175 NR Description: ppg3 [Leishmania major]

SEQ ID NO: 4548 - protein, 190 aa, Zea mays subsp. mays; identical to SEQ ID NO: 3688
  peptide (1)..(190): Ceres Seq. ID no. 12356122
  misc_feature (29)..(168): Pfam Name: Protein of unknown function, DUF538 Pfam Description: Protein of unknown function, DUF538
  misc_feature (39)..(173): Homolog of NCBI NO: 15235335 NR Description: putative protein; protein id: At4g02360.1
  misc_feature (23)..(168): Homolog of NCBI NO: 18379012 NR Description: Expressed protein; protein id: At1g02813.1,
  misc_feature (13)..(170): Homolog of NCBI NO: 21554037 NR Description: unknown [Arabidopsis thaliana]
  misc_feature (29)..(168): Homolog of NCBI NO: 18379014 NR Description: Expressed protein; protein id: At1g02816.1, by cDNA: 28445., supported by cDNA: gi_14423479, supported by
  misc_feature (13)..(170): Homolog of NCBI NO: 18411923 NR Description: coded for by A. thaliana cDNA R64991; protein id: supported by cDNA: 19543., supported by cDNA: gi_13430841, by cDNA: gi_15810602 [Arabidopsis thaliana]
  misc_feature (23)..(168): Homolog of NCBI NO: 21553750 NR Description: unknown [Arabidopsis thaliana]

SEQ ID NO: 4549 - protein, 173 aa, Zea mays subsp. mays; identical to SEQ ID NO: 3689
  peptide (1)..(173): Ceres Seq. ID no. 12356123
  misc_feature (12)..(151): Pfam Name: Protein of unknown function, DUF538 Pfam Description: Protein of unknown function, DUF538
  misc_feature (1)..(153): Homolog of NCBI NO: 18411923 NR Description: coded for by A. thaliana cDNA R64991; protein id: supported by cDNA: 19543., supported by cDNA: gi_13430841, by cDNA: gi_15810602 [Arabidopsis thaliana]
  misc_feature (1)..(153): Homolog of NCBI NO: 21554037 NR Description: unknown [Arabidopsis thaliana]
  misc_feature (12)..(151): Homolog of NCBI NO: 18379014 NR Description: Expressed protein; protein id: At1g02816.1, by cDNA: 28445., supported by cDNA: gi_14423479, supported by
  misc_feature (22)..(156): Homolog of NCBI NO: 15235335 NR Description: putative protein; protein id: At4g02360.1
  misc_feature (6)..(151): Homolog of NCBI NO: 18379012 NR Description: Expressed protein; protein id: At1g02813.1,
  misc_feature (6)..(151): Homolog of NCBI NO: 21553750 NR Description: unknown [Arabidopsis thaliana]

SEQ ID NO: 4550 - DNA, 1504 bp, Zea mays subsp. mays
  misc_feature (1)..(1504): Ceres Seq. ID no. 12381098
  misc_feature: MA Experiment ID: 108504 Result: Up-regulated in Transcription
  misc_feature: MA Experiment 108504 PARAMETER Experiment Name: Zm_Drought_P Parameter: Age (day) Value: 8
  misc_feature: MA Experiment 108504 PARAMETER Experiment Name: Zm_Drought_P Parameter: Organism Value: Zea mays
  misc_feature: MA Experiment 108504 PARAMETER Experiment Name: Zm_Drought_P Parameter: Plant Line Value: 35A19
  misc_feature: MA Experiment 108504 PARAMETER Experiment Name: Zm_Drought_P Parameter: Timepoint (hr) Value: 12
  misc_feature: MA Experiment 108504 PARAMETER Experiment Name: Zm_Drought_P Parameter: Tissue Value: Aerial
  misc_feature: MA Experiment 108504 PARAMETER Experiment Name: Zm_Drought_P Parameter: Treatment Value: Drought vs. No Drought
  misc_feature: MA Experiment ID: 108522 Result: Up-regulated in Transcription
  misc_feature: MA Experiment 108522 PARAMETER Experiment Name: Zm_42deg_Heat_P Parameter: Age (day) Value: 8
  misc_feature: MA Experiment 108522 PARAMETER Experiment Name: Zm_42deg_Heat_P Parameter: Organism Value: Zea mays
  misc_feature: MA Experiment 108522 PARAMETER Experiment Name: Zm_42deg_Heat_P Parameter: Plant Line Value: 35A19
  misc_feature: MA Experiment 108522 PARAMETER Experiment Name: Zm_42deg_Heat_P Parameter: Temperature (deg C) Value: 42 vs. 22
  misc_feature: MA Experiment 108522 PARAMETER Experiment Name: Zm_42deg_Heat_P Parameter: Timepoint (hr) Value: 1
  misc_feature: MA Experiment 108522 PARAMETER Experiment Name: Zm_42deg_Heat_P Parameter: Tissue Value: Aerial
  misc_feature: MA Experiment ID: 108526 Result: Up-regulated in Transcription
  misc_feature: MA Experiment 108526 PARAMETER Experiment Name: Zm_5mM_NO_P Parameter: Age (day) Value: 8
  misc_feature: MA Experiment 108526 PARAMETER Experiment Name: Zm_5mM_NO_P Parameter: Organism Value: Zea mays
  misc_feature: MA Experiment 108526 PARAMETER Experiment Name: Zm_5mM_NO_P Parameter: Plant Line Value: 35A19
  misc_feature: MA Experiment 108526 PARAMETER Experiment Name: Zm_5mM_NO_P Parameter: Timepoint (hr) Value: 1
  misc_feature: MA Experiment 108526 PARAMETER Experiment Name: Zm_5mM_NO_P Parameter: Tissue Value: Aerial
  misc_feature: MA Experiment 108526 PARAMETER Experiment Name: Zm_5mM_NO_P Parameter: Treatment Value: 5mM NO vs. No Treatment
  misc_feature: MA Experiment ID: 108527 Result: Up-regulated in Transcription
  misc_feature: MA Experiment 108527 PARAMETER Experiment Name: Zm_5mM_NO_P Parameter: Age (day) Value: 8
  misc_feature: MA Experiment 108527 PARAMETER Experiment Name: Zm_5mM_NO_P Parameter: Organism Value: Zea mays
  misc_feature: MA Experiment 108527 PARAMETER Experiment Name: Zm_5mM_NO_P Parameter: Plant Line Value: 35A19
  misc_feature: MA Experiment 108527 PARAMETER Experiment Name: Zm_5mM_NO_P Parameter: Timepoint (hr) Value: 6
  misc_feature: MA Experiment 108527 PARAMETER Experiment Name: Zm_5mM_NO_P Parameter: Tissue Value: Aerial
  misc_feature: MA Experiment 108527 PARAMETER Experiment Name: Zm_5mM_NO_P Parameter: Treatment Value: 5mM NO vs. No Treatment
  misc_feature: MA Experiment ID: 108533 Result: Up-regulated in Transcription
  misc_feature: MA Experiment 108533 PARAMETER Experiment Name: Zm_4deg_Cold_P Parameter: Age (hr) Value: 8
  misc_feature: MA Experiment 108533 PARAMETER Experiment Name: Zm_4deg_Cold_P Parameter: Organism Value: Zea mays
  misc_feature: MA Experiment 108533 PARAMETER Experiment Name: Zm_4deg_Cold_P Parameter: Plant Line Value: 35A19
  misc_feature: MA Experiment 108533 PARAMETER Experiment Name: Zm_4deg_Cold_P Parameter: Temperature (deg C) Value: 4 vs. 22
  misc_feature: MA Experiment 108533 PARAMETER Experiment Name: Zm_4deg_Cold_P Parameter: Timepoint (hr) Value: 1
  misc_feature: MA Experiment 108533 PARAMETER Experiment Name: Zm_4deg_Cold_P Parameter: Tissue Value: Aerial
  misc_feature: MA Experiment ID: 108534 Result: Up-regulated in Transcription
  misc_feature: MA Experiment 108534 PARAMETER Experiment Name: Zm_4deg_Cold_P Parameter: Age (hr) Value: 8
  misc_feature: MA Experiment 108534 PARAMETER Experiment Name: Zm_4deg_Cold_P Parameter: Organism Value: Zea mays
  misc_feature: MA Experiment 108534 PARAMETER Experiment Name: Zm_4deg_Cold_P Parameter: Plant Line Value: 35A19
  misc_feature: MA Experiment 108534 PARAMETER Experiment Name: Zm_4deg_Cold_P Parameter: Temperature (deg C) Value: 4 vs. 22
  misc_feature: MA Experiment 108534 PARAMETER Experiment Name: Zm_4deg_Cold_P Parameter: Timepoint (hr) Value: 6
  misc_feature: MA Experiment 108534 PARAMETER Experiment Name: Zm_4deg_Cold_P Parameter: Tissue Value: Aerial
  misc_feature: MA Experiment ID: 108542 Result: Up-regulated in Transcription
  misc_feature: MA Experiment 108542 PARAMETER Experiment Name: Zm_150mM_NaCl_P Parameter: Age (day) Value: 8
  misc_feature: MA Experiment 108542 PARAMETER Experiment Name: Zm_150mM_NaCl_P Parameter: Organism Value: Zea mays
  misc_feature: MA Experiment 108542 PARAMETER Experiment Name: Zm_150mM_NaCl_P Parameter: Plant Line Value: 35A19
  misc_feature: MA Experiment 108542 PARAMETER Experiment Name: Zm_150mM_NaCl_P Parameter: Timepoint (hr) Value: 6
  misc_feature: MA Experiment 108542 PARAMETER Experiment Name: Zm_150mM_NaCl_P Parameter: Tissue Value: Aerial
  misc_feature: MA Experiment 108542 PARAMETER Experiment Name: Zm_150mM_NaCl_P Parameter: Treatment Value: 150mM NaCl vs. No Treatment
  misc_feature: MA Experiment ID: 108543 Result: Up-regulated in Transcription
  misc_feature: MA Experiment ID: 108544 Result: Up-regulated in Transcription
  misc_feature: MA Experiment ID: 108556 Result: Up-regulated in Transcription
  misc_feature: MA Experiment 108556 PARAMETER Experiment Name: Zm_Drought_P Parameter: Age (day) Value: 9
  misc_feature: MA Experiment 108556 PARAMETER Experiment Name: Zm_Drought_P Parameter: Organism Value: Zea mays
  misc_feature: MA Experiment 108556 PARAMETER Experiment Name: Zm_Drought_P Parameter: Plant Line Value: 35A19
  misc_feature: MA Experiment 108556 PARAMETER Experiment Name: Zm_Drought_P Parameter: Timepoint (hr) Value: 24
  misc_feature: MA Experiment 108556 PARAMETER Experiment Name: Zm_Drought_P Parameter: Tissue Value: Aerial
  misc_feature: MA Experiment 108556 PARAMETER Experiment Name: Zm_Drought_P Parameter: Treatment Value: Drought vs. No Drought
  misc_feature: MA Experiment ID: 108597 Result: Up-regulated in Transcription
  misc_feature: MA Experiment 108597 PARAMETER Experiment Name: Zm_100uM_ABA_P Parameter: Age (day) Value: 9
  misc_feature: MA Experiment 108597 PARAMETER Experiment Name: Zm_100uM_ABA_P Parameter: Organism Value: Zea mays
  misc_feature: MA Experiment 108597 PARAMETER Experiment Name: Zm_100uM_ABA_P Parameter: Plant Line Value: 35A19
  misc_feature: MA Experiment 108597 PARAMETER Experiment Name: Zm_100uM_ABA_P Parameter: Timepoint (hr) Value: 24
  misc_feature: MA Experiment 108597 PARAMETER Experiment Name: Zm_100uM_ABA_P Parameter: Tissue Value: Aerial
  misc_feature: MA Experiment 108597 PARAMETER Experiment Name: Zm_100uM_ABA_P Parameter: Treatment Value: 100uM ABA vs. No Treatment
  misc_feature: MA Experiment ID: 20000478 Result: Up-regulated in Transcription
  misc_feature: MA Experiment 20000478 PARAMETER Experiment Name: Zm_5mM_SA_P Parameter: Age (day) Value: 11
  misc_feature: MA Experiment 20000478 PARAMETER Experiment Name: Zm_5mM_SA_P Parameter: Organism Value: Zea mays
  misc_feature: MA Experiment 20000478 PARAMETER Experiment Name: Zm_5mM_SA_P Parameter: Plant Line Value: 35A19
  misc_feature: MA Experiment 20000478 PARAMETER Experiment Name: Zm_5mM_SA_P Parameter: Timepoint (hr) Value: 72
  misc_feature: MA Experiment 20000478 PARAMETER Experiment Name: Zm_5mM_SA_P Parameter: Tissue Value: Aerial
  misc_feature: MA Experiment 20000478 PARAMETER Experiment Name: Zm_5mM_SA_P Parameter: Treatment Value: 5mM SA vs. No Treatment
  misc_feature: MA Experiment ID: 20000480 Result: Up-regulated in Transcription
  misc_feature: MA Experiment 20000480 PARAMETER Experiment Name: Zm_Drought_P Parameter: Age (day) Value: 11
  misc_feature: MA Experiment 20000480 PARAMETER Experiment Name: Zm_Drought_P Parameter: Organism Value: Zea mays
  misc_feature: MA Experiment 20000480 PARAMETER Experiment Name: Zm_Drought_P Parameter: Plant Line Value: 35A19
  misc_feature: MA Experiment 20000480 PARAMETER Experiment Name: Zm_Drought_P Parameter: Timepoint (hr) Value: 72
  misc_feature: MA Experiment 20000480 PARAMETER Experiment Name: Zm_Drought_P Parameter: Tissue Value: Aerial
  misc_feature: MA Experiment 20000480 PARAMETER Experiment Name: Zm_Drought_P Parameter: Treatment Value: Drought vs. No Drought
  misc_feature: MA Experiment ID: 20000487 Result: Up-regulated in Transcription
  misc_feature: MA Experiment 20000487 PARAMETER Experiment Name: Zm_50mM_NH4NO3_L_to_H_P Parameter: Organism Value: Zea mays
  misc_feature: MA Experiment 20000487 PARAMETER Experiment Name: Zm_50mM_NH4NO3_L_to_H_P Parameter: Timepoint (hr) Value: 4
  misc_feature: MA Experiment 20000487 PARAMETER Experiment Name: Zm_50mM_NH4NO3_L_to_H_P Parameter: Tissue Value: Leaves
  misc_feature: MA Experiment 20000487 PARAMETER Experiment Name: Zm_50mM_NH4NO3_L_to_H_P Parameter: Treatment Value: 50mM NH4NO3 vs. 100mM Mannitol
  misc_feature: MA Experiment ID: 20000488 Result: Up-regulated in Transcription
  misc_feature: MA Experiment 20000488 PARAMETER Experiment Name: Zm_50mM_NH4NO3_L_to_H_P Parameter: Organism Value: Zea mays
  misc_feature: MA Experiment 20000488 PARAMETER Experiment Name: Zm_50mM_NH4NO3_L_to_H_P Parameter: Timepoint (hr) Value: 8
  misc_feature: MA Experiment 20000488 PARAMETER Experiment Name: Zm_50mM_NH4NO3_L_to_H_P Parameter: Tissue Value: Leaves
  misc_feature: MA Experiment 20000488 PARAMETER Experiment Name: Zm_50mM_NH4NO3_L_to_H_P Parameter: Treatment Value: 50mM NH4NO3 vs. 100mM Mannitol
  misc_feature: MA Experiment ID: 20000492 Result: Down-regulated in Transcription
  misc_feature: MA Experiment 20000492 PARAMETER Experiment Name: Zm_Hybrid_Seed_Dev_P Parameter: DAP Value: 12
  misc_feature: MA Experiment 20000492 PARAMETER Experiment Name: Zm_Hybrid_Seed_Dev_P Parameter: Organism Value: Zea mays
  misc_feature: MA Experiment 20000492 PARAMETER Experiment Name: Zm_Hybrid_Seed_Dev_P Parameter: Plant Line Value: 35A19
  misc_feature: MA Experiment 20000492 PARAMETER Experiment Name: Zm_Hybrid_Seed_Dev_P Parameter: Tissue Value: Fert Kernel vs. Unfert Floret
  misc_feature: MA Experiment ID: 20000535 Result: Down-regulated in Transcription
  misc_feature: MA Experiment 20000535 PARAMETER Experiment Name: Zm_Hybrid_Seed_Dev_P Parameter: DAP Value: 30 vs. 12
  misc_feature: MA Experiment 20000535 PARAMETER Experiment Name: Zm_Hybrid_Seed_Dev_P Parameter: Organism Value: Zea mays
  misc_feature: MA Experiment 20000535 PARAMETER Experiment Name: Zm_Hybrid_Seed_Dev_P Parameter: Plant Line Value: 35A19
  misc_feature: MA Experiment 20000535 PARAMETER Experiment Name: Zm_Hybrid_Seed_Dev_P Parameter: Tissue Value: Embryo vs. Unfert Floret
  misc_feature: MA Experiment ID: 20000630 Result: Up-regulated in Transcription
  misc_feature: MA Experiment 20000630 PARAMETER Experiment Name: Zm_Herbicide-Treatments_P Parameter: Timepoint (hr) Value: 4
  misc_feature: MA Experiment 20000630 PARAMETER Experiment Name: Zm_Herbicide-Treatments_P Parameter: Tissue Value: Aerial
  misc_feature: MA Experiment 20000630 PARAMETER Experiment Name: Zm_Herbicide-Treatments_P Parameter: Treatment Value: Roundup vs. No Treatment
aagccaacacggtcacacgactgcataattgtgctcgctcgccgggccccgggacgtgacacatcgcacggccgaagcagcttgccggctgccgcgtttcgcctcccgcctgccgtgccgcccgtgaccgcgagaaggccggcagctttgcatgaggaggaggaggatgggggcactgcacgtcgtcggcgagcccaggatcagcttccgccagcagcctgcagcagtcgtcgcgaagaacggcggccacggcgccgtcgtcgaggagatccacggcctgatccgcgtctacaaggacggacacgtggagcggctcccggcgatcccagccgtgccctgcacgtggggcggcacggcccccggacgcgccgggcggcgtcgtcgcgagggacgtggtggtggaccccgcgacgggggtgtgggcgcggctgtacgcgccgacgtcggcgggggacggagccaggcgccccgtcgtggtgtacttccacggcggcgggttctgcgtcgggtccgcggcctggagctgctaccacgagttcctcgcccagctcgcggcgcgcgcgggctgcgccgtgatgtccgtggactaccggctggcgcccgagcaccgcctgccggccgcgttcgacgacgggctggccgcggtgcggtggctgcggcaccaggccgcagcgtcagcgtcagcgtcagcgtgctgcaacgacgacctgtcgtggtggcgggcccgctgcggctttgaccgcgtgttcctcatgggcgacagcgcgggcgccagcatcgccttgcacgtggccgcgaggctcgggcagggccagcttggcgcgctgccccccttgaccgtcaggggccccgtcctgatccagccattcctgggcggcgaggggcgtaccgcgtccgagaagaacgtggcgcagccgccacggtcggcgctgacgctggccacctccgactgctactggcggctggcgctgccggccggagccagccgcgagcacccctggtgcaacccgctgtcgggccgcgccgcgccgcgcctggagaccactccgctgcccccgctcctggtgtgcgtctcggagacggacatcctgcgggaccgcaacctggagctgtgcagggcgttgcgcgaggcgggcaagcgcgtggagcaggccgtgtacggcggcgtcgggcacgcgttccaggtgctccacaactgccacctgtcccagccgcggacgcaggagatgctcgcgcacatcaaggccttcgtcagcgccaggtagcaggcgccgcagcagcagccgcctcctccattcgtcgttggtccctaacaaacagacactcgccatgttaattaatccactacctaatcctaatccaatcgaagagtagatgccgtgtaagcaaccagaaccagccttgtgcagtactgtatcagtagtgtgtgacttggagcagaaagcgtccaatgcccagcccgggttgttgttgtagcggtgtcggaaagcaaaagcttatcact

SEQ ID NO: 4551 - protein, 229 aa, Zea mays subsp. mays
  peptide (1)..(229): Ceres Seq. ID no. 12381099
  misc_feature (1)..(223): Homolog of NCBI NO: 34904770 NR Description: similar to carboxylesterase
  misc_feature (42)..(226): Homolog of NCBI NO: 18409077 NR Description: expressed protein
  misc_feature (1)..(226): Homolog of NCBI NO: 34895916 NR Description: P0030H07.24 [Oryza sativa (japonica
  misc_feature (1)..(206): Homolog of NCBI NO: 5487873 NR Description: PrMC3 [Pinus radiata]
  misc_feature (1)..(229): Homolog of NCBI NO: 34899932 NR Description: putative cell death associated protein
  misc_feature (1)..(197): Homolog of NCBI NO: 34895936 NR Description: P0030H07.39 [Oryza sativa (japonica
  misc_feature (1)..(202): Homolog of NCBI NO: 27819508 NR Description: putative esterase [Oryza sativa (japonica
  misc_feature (1)..(146): Homolog of NCBI NO: 18409077 NR Description: expressed protein
  misc_feature (1)..(226): Homolog of NCBI NO: 21593215 NR Description: unknown [Arabidopsis thaliana]
  misc_feature (1)..(226): Homolog of NCBI NO: 15237267 NR Description: putative protein
MSVDYRLAPEHRLPAAFDDGLAAVRWLRHQAAASASASACCNDDLSWWRARCGFDRVFLMGDSAGASIALHVAARLGQGQLGALPPLTVRGPVLIQPFLGGEGRTASEKNVAQPPRSALTLATSDCYWRLALPAGASREHPWCNPLSGRAAPRLETTPLPPLLVCVSETDILRDRNLELCRALREAGKRVEQAVYGGVGHAFQVLHNCHLSQPRTQEMLAHIKAFVSAR

SEQ ID NO: 4552 - protein, 195 aa, Zea mays subsp. mays
  peptide (1)..(195): Ceres Seq. ID no. 12381100
  misc_feature (33)..(68): Homolog of NCBI NO: 18409077 NR Description: expressed protein
  misc_feature (17)..(64): Homolog of NCBI NO: 21593215 NR Description: unknown [Arabidopsis thaliana]
  misc_feature (17)..(64): Homolog of NCBI NO: 15237267 NR Description: putative protein
MRRRRMGALHVVGEPRISFRQQPAAVVAKNGGHGAVVEEIHGLIRVYKDGHVERLPAIPAVPCTWGGTAPGRAGRRRREGRGGGPRDGGVGAAVRADVGGGRSQAPRRGVLPRRRVLRRVRGLELLPRVPRPARGARGLRRDVRGLPAGARAPPAGRVRRRAGRGAVAAAPGRSVSVSVSVLQRRPVVVAGPLRL

SEQ ID NO: 4553 - protein, 191 aa, Zea mays subsp. mays
  peptide (1)..(191): Ceres Seq. ID no. 12381101
KPTRSHDCIIVLARRAPGRDTSHGRSSLPAAAFRLPPAVPPVTARRPAALHEEEEDGGTARRRRAQDQLPPAACSSRREERRPRRRRRGDPRPDPRLQGRTRGAAPGDPSRALHVGRHGPRTRRAASSRGTWWWTPRRGCGRGCTRRRRRGTEPGAPSWCTSTAAGSASGPRPGAATTSSSPSSRRARAAP

SEQ ID NO: 4554 - DNA, 1552 bp, Zea mays subsp. mays
  misc_feature (1)..(1552): Ceres Seq. ID no. 12367612
  misc_feature: MA Experiment ID: 108535 Result: Up-regulated in Transcription
  misc_feature: MA Experiment 108535 PARAMETER Experiment Name: Zm_Meristem_P Parameter: Age (day) Value: 8
  misc_feature: MA Experiment 108535 PARAMETER Experiment Name: Zm_Meristem_P Parameter: Organism Value: Zea mays
  misc_feature: MA Experiment 108535 PARAMETER Experiment Name: Zm_Meristem_P Parameter: Plant Line Value: 35A19
  misc_feature: MA Experiment 108535 PARAMETER Experiment Name: Zm_Meristem_P Parameter: Tissue Value: Root Meristem vs. Above Root Meristem
  misc_feature: MA Experiment ID: 20000488 Result: Up-regulated in Transcription
  misc_feature: MA Experiment 20000488 PARAMETER Experiment Name: Zm_50mM_NH4NO3_L_to_H_P Parameter: Organism Value: Zea mays
  misc_feature: MA Experiment 20000488 PARAMETER Experiment Name: Zm_50mM_NH4NO3_L_to_H_P Parameter: Timepoint (hr) Value: 8
  misc_feature: MA Experiment 20000488 PARAMETER Experiment Name: Zm_50mM_NH4NO3_L_to_H_P Parameter: Tissue Value: Leaves
  misc_feature: MA Experiment 20000488 PARAMETER Experiment Name: Zm_50mM_NH4NO3_L_to_H_P Parameter: Treatment Value: 50mM NH4NO3 vs. 100mM Mannitol
  misc_feature: MA Experiment ID: 20000492 Result: Up-regulated in Transcription
  misc_feature: MA Experiment 20000492 PARAMETER Experiment Name: Zm_Hybrid_Seed_Dev_P Parameter: DAP Value: 12
  misc_feature: MA Experiment 20000492 PARAMETER Experiment Name: Zm_Hybrid_Seed_Dev_P Parameter: Organism Value: Zea mays
  misc_feature: MA Experiment 20000492 PARAMETER Experiment Name: Zm_Hybrid_Seed_Dev_P Parameter: Plant Line Value: 35A19
  misc_feature: MA Experiment 20000492 PARAMETER Experiment Name: Zm_Hybrid_Seed_Dev_P Parameter: Tissue Value: Fert Kernel vs. Unfert Floret
  misc_feature: MA Experiment ID: 20000535 Result: Up-regulated in Transcription
  misc_feature: MA Experiment 20000535 PARAMETER Experiment Name: Zm_Hybrid_Seed_Dev_P Parameter: DAP Value: 30 vs. 12
  misc_feature: MA Experiment 20000535 PARAMETER Experiment Name: Zm_Hybrid_Seed_Dev_P Parameter: Organism Value: Zea mays
  misc_feature: MA Experiment 20000535 PARAMETER Experiment Name: Zm_Hybrid_Seed_Dev_P Parameter: Plant Line Value: 35A19
  misc_feature: MA Experiment 20000535 PARAMETER Experiment Name: Zm_Hybrid_Seed_Dev_P Parameter: Tissue Value: Embryo vs. Unfert Floret
agattgcgagactgtacactgtagagagagacgtcgtcggcctgagcgccgtgcaagcaagcaagcggcggcaatggcggcggctcttcaagccacgccgatcaaaaccctagccacctcccgctggcgcgtcgaaggtgcggaggcgcggccgcggccgcggccgattgcggtgagcttccgttgctccgcggcggcgaggagctacaacatcacgctcttacctggggacggcatcggcccggaggtggtcgccgtcgccaaggacgtgctatccttcgccggagccctcgaaggcgtcgagctccggtttcaggagaagctggtgggcggctcggcgctggacgccaccggcgtgccactccctgacgagacgctcgacgaggccaagggttccgacgctgttctcctcggcgccattggaggctataagtgggataccaatgagaagcacctcaagcctgagaccgggctgctgcagctacgtgccggactcggggtctttgccaatctgcgaccagctgcagttttgccgcagttggtagacgcatccactctgaagaaagaggtagctgaaggtgttgacatcatggttgtcagggagcttactggaggcatctactttggcaaacccaggggttttggaacaaatgacaagggagacgatattggcttcaacacagaagtttattcagcttctgagatcgatcgtattgcacgagttgcatttgaggtcgctcgcaagagaagagggaaactatgctcggttgataaagcaaatgtgctggaggcatccatgctttggaggaaaaaggtgactgcactagcctctgaattccctgacattgagctctcacacatgtatgttgacaatgctgcaatgcagcttgtcaggaatcctaagcagtttgatacaattgtcacaaacaatatttttggtgacatattatctgatgaagcatcaatgattacgggaagcattggaatgcttccatctgcgagtgtcggtgaatcgggacctggtctttttgaacctattcatggctctgcccctgatattgctggacaggacaaggccaatccattagctacaattcttagcgcagcgatgctattgcgatatggcctaggagaagaaaatgctgcgaggagaattgaagctgcagttacagaaacactgaaccatgggttccgaactggggacatatattctcctggaacaacactggttggatgcaagcggatgggggaggaagtcttgaagacagtggagtcactgaaggaagtggctgctgtgaactgatgcatgctggtacttgattcattgcattttattagaagtcgagccgagcgtaagagagcatggtgtctgggttattgttgatgttgaattgaaagtttagtggctgaaccgatagccacttcgcatttctgtggtttgtttgtctccctgtagttttttctttggtacaaggaaaggataggcatatgtttgctcaataaaatgggatagtttatgccgctttgaataaaagatggagttctgttttgg

SEQ ID NO: 4555 - protein, 433 aa, Zea mays subsp. mays
  peptide (1)..(433): Ceres Seq. ID no. 12367613
  misc_feature (70)..(419): Pfam Name: Isocitrate/isopropylmalate dehydrogenase Pfam Description: Isocitrate/isopropylmalate dehydrogenase
  misc_feature (110)..(425): Homolog of NCBI NO: 26451517 NR Description: putative 3-isopropylmalate dehydrogenase
  misc_feature (61)..(425): Homolog of NCBI NO: 18377879 NR Description: AT5g14200/MUA22_20 [Arabidopsis thaliana]
  misc_feature (61)..(425): Homolog of NCBI NO: 15241338 NR Description: 3-isopropylmalate dehydrogenase
  misc_feature (61)..(425): Homolog of NCBI NO: 21759267 NR Description: 3-isopropylmalate dehydrogenase 1, chloroplast
  misc_feature (61)..(425): Homolog of NCBI NO: 21592944 NR Description: 3-methyladenine DNA glycosylase, putative
  misc_feature (61)..(425): Homolog of NCBI NO: 15221631 NR Description: 3-methyladenine DNA glycosylase, putative
  misc_feature (25)..(425): Homolog of NCBI NO: 21553584 NR Description: putative 3-isopropylmalate dehydrogenase
  misc_feature (25)..(425): Homolog of NCBI NO: 17064730 NR Description: putative 3-isopropylmalate dehydrogenase
  misc_feature (25)..(425): Homolog of NCBI NO: 15220167 NR Description: putative 3-isopropylmalate dehydrogenase
  misc_feature (25)..(425): Homolog of NCBI NO: 126201 NR Description: 3-isopropylmalate dehydrogenase, chloroplast
DCETVHCRERRRRPERRASKQAAAMAAALQATPIKTLATSRWRVEGAEARPRPRPIAVSFRCSAAARSYNITLLPGDGIGPEVVAVAKDVLSFAGALEGVELRFQEKLVGGSALDATGVPLPDETLDEAKGSDAVLLGAIGGYKWDTNEKHLKPETGLLQLRAGLGVFANLRPAAVLPQLVDASTLKKEVAEGVDIMVVRELTGGIYFGKPRGFGTNDKGDDIGFNTEVYSASEIDRIARVAFEVARKRRGKLCSVDKANVLEASMLWRKKVTALASEFPDIELSHMYVDNAAMQLVRNPKQFDTIVTNNIFGDILSDEASMITGSIGMLPSASVGESGPGLFEPIHGSAPDIAGQDKANPLATILSAAMLLRYGLGEENAARRIEAAVTETLNHGFRTGDIYSPGTTLVGCKRMGEEVLKTVESLKEVAAVN

SEQ ID NO: 4556 - protein, 409 aa, Zea mays subsp. mays
  peptide (1)..(409): Ceres Seq. ID no. 12367614
  misc_feature (46)..(395): Pfam Name: Isocitrate/isopropylmalate dehydrogenase Pfam Description: Isocitrate/isopropylmalate dehydrogenase
  misc_feature (86)..(401): Homolog of NCBI NO: 26451517 NR Description: putative 3-isopropylmalate dehydrogenase
  misc_feature (37)..(401): Homolog of NCBI NO: 18377879 NR Description: AT5g14200/MUA22_20 [Arabidopsis thaliana]
  misc_feature (37)..(401): Homolog of NCBI NO: 15241338 NR Description: 3-isopropylmalate dehydrogenase
  misc_feature (37)..(401): Homolog of NCBI NO: 21759267 NR Description: 3-isopropylmalate dehydrogenase 1, chloroplast
  misc_feature (37)..(401): Homolog of NCBI NO: 21592944 NR Description: 3-methyladenine DNA glycosylase, putative
  misc_feature (37)..(401): Homolog of NCBI NO: 15221631 NR Description: 3-methyladenine DNA glycosylase, putative
  misc_feature (1)..(401): Homolog of NCBI NO: 21553584 NR Description: putative 3-isopropylmalate dehydrogenase
  misc_feature (1)..(401): Homolog of NCBI NO: 17064730 NR Description: putative 3-isopropylmalate dehydrogenase
  misc_feature (1)..(401): Homolog of NCBI NO: 15220167 NR Description: putative 3-isopropylmalate dehydrogenase
  misc_feature (1)..(401): Homolog of NCBI NO: 126201 NR Description: 3-isopropylmalate dehydrogenase, chloroplast
MAAALQATPIKTLATSRWRVEGAEARPRPRPIAVSFRCSAAARSYNITLLPGDGIGPEVVAVAKDVLSFAGALEGVELRFQEKLVGGSALDATGVPLPDETLDEAKGSDAVLLGAIGGYKWDTNEKHLKPETGLLQLRAGLGVFANLRPAAVLPQLVDASTLKKEVAEGVDIMVVRELTGGIYFGKPRGFGTNDKGDDIGFNTEVYSASEIDRIARVAFEVARKRRGKLCSVDKANVLEASMLWRKKVTALASEFPDIELSHMYVDNAAMQLVRNPKQFDTIVTNNIFGDILSDEASMITGSIGMLPSASVGESGPGLFEPIHGSAPDIAGQDKANPLATILSAAMLLRYGLGEENAARRIEAAVTETLNHGFRTGDIYSPGTTLVGCKRMGEEVLKTVESLKEVAAVN

SEQ ID NO: 4557 - protein, 237 aa, Zea mays subsp. mays
  peptide (1)..(237): Ceres Seq. ID no. 12367615
  misc_feature (1)..(223): Pfam Name: Isocitrate/isopropylmalate dehydrogenase Pfam Description: Isocitrate/isopropylmalate dehydrogenase
  misc_feature (1)..(229): Homolog of NCBI NO: 26451517 NR Description: putative 3-isopropylmalate dehydrogenase
  misc_feature (1)..(229): Homolog of NCBI NO: 18377879 NR Description: AT5g14200/MUA22_20 [Arabidopsis thaliana]
  misc_feature (1)..(229): Homolog of NCBI NO: 15241338 NR Description: 3-isopropylmalate dehydrogenase
  misc_feature (1)..(229): Homolog of NCBI NO: 21759267 NR Description: 3-isopropylmalate dehydrogenase 1, chloroplast
  misc_feature (1)..(229): Homolog of NCBI NO: 21592944 NR Description: 3-methyladenine DNA glycosylase, putative
  misc_feature (1)..(229): Homolog of NCBI NO: 15221631 NR Description: 3-methyladenine DNA glycosylase, putative
  misc_feature (1)..(229): Homolog of NCBI NO: 21553584 NR Description: putative 3-isopropylmalate dehydrogenase
  misc_feature (1)..(229): Homolog of NCBI NO: 17064730 NR Description: putative 3-isopropylmalate dehydrogenase
  misc_feature (1)..(229): Homolog of NCBI NO: 15220167 NR Description: putative 3-isopropylmalate dehydrogenase
  misc_feature (1)..(229): Homolog of NCBI NO: 126201 NR Description: 3-isopropylmalate dehydrogenase, chloroplast
MVVRELTGGIYFGKPRGFGTNDKGDDIGFNTEVYSASEIDRIARVAFEVARKRRGKLCSVDKANVLEASMLWRKKVTALASEFPDIELSHMYVDNAAMQLVRNPKQFDTIVTNNIFGDILSDEASMITGSIGMLPSASVGESGPGLFEPIHGSAPDIAGQDKANPLATILSAAMLLRYGLGEENAARRIEAAVTETLNHGFRTGDIYSPGTTLVGCKRMGEEVLKTVESLKEVAAVN

SEQ ID NO: 4558 - DNA, 1585 bp, Zea mays subsp. mays
  misc_feature (1)..(1585): Ceres Seq. ID no. 12381056
  misc_feature: MA Experiment ID: 108530 Result: Down-regulated in Transcription
  misc_feature: MA Experiment 108530 PARAMETER Experiment Name: Zm_Imbibed_Seeds_P Parameter: Age (day) Value: 6 vs. 2
  misc_feature: MA Experiment 108530 PARAMETER Experiment Name: Zm_Imbibed_Seeds_P Parameter: Organism Value: Zea mays
  misc_feature: MA Experiment 108530 PARAMETER Experiment Name: Zm_Imbibed_Seeds_P Parameter: Plant Line Value: 35A19
  misc_feature: MA Experiment 108530 PARAMETER Experiment Name: Zm_Imbibed_Seeds_P Parameter: Tissue Value: Aerial vs. Embryo
  misc_feature: MA Experiment ID: 20000477 Result: Down-regulated in Transcription
  misc_feature: MA Experiment 20000477 PARAMETER Experiment Name: Zm_5mM_SA_P Parameter: Age (day) Value: 10
  misc_feature: MA Experiment 20000477 PARAMETER Experiment Name: Zm_5mM_SA_P Parameter: Organism Value: Zea mays
  misc_feature: MA Experiment 20000477 PARAMETER Experiment Name: Zm_5mM_SA_P Parameter: Plant Line Value: 35A19
  misc_feature: MA Experiment 20000477 PARAMETER Experiment Name: Zm_5mM_SA_P Parameter: Timepoint (hr) Value: 48
  misc_feature: MA Experiment 20000477 PARAMETER Experiment Name: Zm_5mM_SA_P Parameter: Tissue Value: Aerial
  misc_feature: MA Experiment 20000477 PARAMETER Experiment Name: Zm_5mM_SA_P Parameter: Treatment Value: 5mM SA vs. No Treatment
gcacgagaccattacctagaacatcctaatcgaaaaaaaatcacttcaggtaagggcgaagaagagcattccctctcccggtctccccatctcccgaaccgcgtgagccaaaccctcccagctcgcgcgccctcgatggatgcctccgccgccacccccgcccccgggccttccttctctggcgccgagtcctccgcggccgccgcccagccgccggcggaggctccgcagttgcgcgtccacggcgccggcagcggcagcggcgtcgcgcgagcctgccgccaccacgcgtacagccgcaagcagaagtcgctcggccttctctgctccaacttcgtggcgctgtacgaccgggaggacgtggaggtgattgggctggacgacgcggccaagcgtctcggcgtcgagcgacgctgatctacgacatagtcaacgttctcgagagcgtcgggattcttgtgcggagggccaagaatcggtatacatggctcggattcgggggagtccctgctgcgctgaaagaactcaaggagagggcgctaaggaagatgtccggatcaccggtgttactgtcaatggaggactcctctactgccaacttatcagatgatgaggatgatgaaaaattgggcgatgctgatgaagatgctgagagcgagaagctcagccaacctgttgacaatacgtctgataagcctgacgcacccagctgccgccttagatctgatcatcggaaggagaagtcccttgggctcctcactcagaattttgtcaagctcttcctcaacatggaggttgggacaatctcacttgacgaagctgcaaggcttctccttggagagggacatgcagacagcaacatgagaaccaaagttcgtcgattgtatgacattgccaatgtgctgtcttctttgaacctcattgagaagacgcagcaagcagacacaagaaaacctgcattccggtggctaggccaggcaaagcgaaagcaagataacaatgtcatggtttctgtacctccatcgatgaaggcaatgcccaataagagagcatttggtactgatcttacaaacattgacaataagcgaggcaagttagactcagcagcggagaacaaagtcaagctcatgcagggtgctggtaacatagtgaagacttttgagaggcagctggtgcaagggaaaaggagtgactttgtttatgggcccttccaccctgctggtgcaaagaaacacgaaactgatgatcaaactgttaagcagcaggagaggaagaacattcaggactgggaaaaccttgctgtgtccttccgtccacaatatcagaatcaagcactgaatgatctttttggtcattatgtggaagcatggaaatcatggtacgtggatcttacccaggaaacggcatcatgaagcagaatgttggcaggtcagttgtaacttgtaagccgtttccagtagttagatcaactgagttgttgatgcttgcttagggaaccaccctgtacaagatggaataaaaacacgaaggcaattttgtctttcgactgtanntnctcgaatgctagaagtgaggccattttttc

SEQ ID NO: 4559 - protein, 287 aa, Zea mays subsp. mays
  peptide (1)..(287): Ceres Seq. ID no. 12381057
  misc_feature (1)..(284): Homolog of NCBI NO: 22331664 NR Description: DP-E2F-like protein 1; protein id: At3g48160.1,
  misc_feature (1)..(267): Homolog of NCBI NO: 30692988 NR Description: DP-E2F-related protein 1 [Arabidopsis thaliana]
  misc_feature (1)..(267): Homolog of NCBI NO: 7487385 NR Description: hypothetical protein T24C20.40 - Arabidopsis >gi|5541722|emb|CAB51063.1| putative protein [Arabidopsis
  misc_feature (14)..(281): Homolog of NCBI NO: 22330789 NR Description: DP-E2F-like protein 3; protein id: At3g01330.1, by cDNA: gi_20260249, supported by cDNA: gi_20502505 [Arabidopsis >gi|20260250|gb|AAM13023.1| unknown protein [Arabidopsis
  misc_feature (48)..(284): Homolog of NCBI NO: 15242176 NR Description: DP-E2F-like 2; protein id: At5g14960.1, supported cDNA: gi_20502503 [Arabidopsis thaliana] >gi|11289607|pir||T51441
  misc_feature (1)..(49): Homolog of NCBI NO: 15242176 NR Description: DP-E2F-like 2; protein id: At5g14960.1, supported cDNA: gi_20502503 [Arabidopsis thaliana] >gi|11289607|pir||T51441
  misc_feature (14)..(264): Homolog of NCBI NO: 6094551 NR Description: hypothetical protein [Arabidopsis thaliana]
  misc_feature (1)..(142): Homolog of NCBI NO: 26334515 NR Description: unnamed protein product [Mus musculus]
  misc_feature (1)..(170): Homolog of NCBI NO: 40254337 NR Description: E2F transcription factor 7 [Mus musculus]
  misc_feature (1)..(170): Homolog of NCBI NO: 26326999 NR Description: unnamed protein product [Mus musculus]
MSGSPVLLSMEDSSTANLSDDEDDEKLGDADEDAESEKLSQPVDNTSDKPDAPSCRLRSDHRKEKSLGLLTQNFVKLFLNMEVGTISLDEAARLLLGEGHADSNMRTKVRRLYDIANVLSSLNLIEKTQQADTRKPAFRWLGQAKRKQDNNVMVSVPPSMKAMPNKRAFGTDLTNIDNKRGKLDSAAENKVKLMQGAGNIVKTFERQLVQGKRSDFVYGPFHPAGAKKHETDDQTVKQQERKNIQDWENLAVSFRPQYQNQALNDLFGHYVEAWKSWYVDLTQETAS

SEQ ID NO: 4560 - protein, 278 aa, Zea mays subsp. mays
  peptide (1)..(278): Ceres Seq. ID no. 12381058
  misc_feature (1)..(161): Homolog of NCBI NO: 40254337 NR Description: E2F transcription factor 7 [Mus musculus]
  misc_feature (1)..(161): Homolog of NCBI NO: 26326999 NR Description: unnamed protein product [Mus musculus]
  misc_feature (1)..(275): Homolog of NCBI NO: 22331664 NR Description: DP-E2F-like protein 1; protein id: At3g48160.1,
  misc_feature (1)..(258): Homolog of NCBI NO: 30692988 NR Description: DP-E2F-related protein 1 [Arabidopsis thaliana]
  misc_feature (1)..(258): Homolog of NCBI NO: 7487385 NR Description: hypothetical protein T24C20.40 - Arabidopsis >gi|5541722|emb|CAB51063.1| putative protein [Arabidopsis
  misc_feature (5)..(272): Homolog of NCBI NO: 22330789 NR Description: DP-E2F-like protein 3; protein id: At3g01330.1, by cDNA: gi_20260249, supported by cDNA: gi_20502505 [Arabidopsis >gi|20260250|gb|AAM13023.1| unknown protein [Arabidopsis
  misc_feature (39)..(275): Homolog of NCBI NO: 15242176 NR Description: DP-E2F-like 2; protein id: At5g14960.1, supported cDNA: gi_20502503 [Arabidopsis thaliana] >gi|11289607|pir||T51441
  misc_feature (1)..(40): Homolog of NCBI NO: 15242176 NR Description: DP-E2F-like 2; protein id: At5g14960.1, supported cDNA: gi_20502503 [Arabidopsis thaliana] >gi|11289607|pir||T51441
  misc_feature (5)..(255): Homolog of NCBI NO: 6094551 NR Description: hypothetical protein [Arabidopsis thaliana]
  misc_feature (1)..(133): Homolog of NCBI NO: 26334515 NR Description: unnamed protein product [Mus musculus]
MEDSSTANLSDDEDDEKLGDADEDAESEKLSQPVDNTSDKPDAPSCRLRSDHRKEKSLGLLTQNFVKLFLNMEVGTISLDEAARLLLGEGHADSNMRTKVRRLYDIANVLSSLNLIEKTQQADTRKPAFRWLGQAKRKQDNNVMVSVPPSMKAMPNKRAFGTDLTNIDNKRGKLDSAAENKVKLMQGAGNIVKTFERQLVQGKRSDFVYGPFHPAGAKKHETDDQTVKQQERKNIQDWENLAVSFRPQYQNQALNDLFGHYVEAWKSWYVDLTQETAS

SEQ ID NO: 4561 - protein, 207 aa, Zea mays subsp. mays
  peptide (1)..(207): Ceres Seq. ID no. 12381059
  misc_feature (1)..(204): Homolog of NCBI NO: 22331664 NR Description: DP-E2F-like protein 1; protein id: At3g48160.1,
  misc_feature (1)..(187): Homolog of NCBI NO: 30692988 NR Description: DP-E2F-related protein 1 [Arabidopsis thaliana]
  misc_feature (1)..(187): Homolog of NCBI NO: 7487385 NR Description: hypothetical protein T24C20.40 - Arabidopsis >gi|5541722|emb|CAB51063.1| putative protein [Arabidopsis
  misc_feature (1)..(201): Homolog of NCBI NO: 22330789 NR Description: DP-E2F-like protein 3; protein id: At3g01330.1, by cDNA: gi_20260249, supported by cDNA: gi_20502505 [Arabidopsis >gi|20260250|gb|AAM13023.1| unknown protein [Arabidopsis
  misc_feature (1)..(204): Homolog of NCBI NO: 15242176 NR Description: DP-E2F-like 2; protein id: At5g14960.1, supported cDNA: gi_20502503 [Arabidopsis thaliana] >gi|11289607|pir||T51441
  misc_feature (1)..(184): Homolog of NCBI NO: 6094551 NR Description: hypothetical protein [Arabidopsis thaliana]
  misc_feature (1)..(62): Homolog of NCBI NO: 26334515 NR Description: unnamed protein product [Mus musculus]
  misc_feature (1)..(90): Homolog of NCBI NO: 40254337 NR Description: E2F transcription factor 7 [Mus musculus]
  misc_feature (1)..(90): Homolog of NCBI NO: 26326999 NR Description: unnamed protein product [Mus musculus]
  misc_feature (1)..(90): Homolog of NCBI NO: 29741773 NR Description: similar to Transcription factor E2F dimerisation
MEVGTISLDEAARLLLGEGHADSNMRTKVRRLYDIANVLSSLNLIEKTQQADTRKPAFRWLGQAKRKQDNNVMVSVPPSMKAMPNKRAFGTDLTNIDNKRGKLDSAAENKVKLMQGAGNIVKTFERQLVQGKRSDFVYGPFHPAGAKKHETDDQTVKQQERKNIQDWENLAVSFRPQYQNQALNDLFGHYVEAWKSWYVDLTQETAS

SEQ ID NO: 4562 - DNA, 1353 bp, Zea mays subsp. mays
  misc_feature (1)..(1353): Ceres Seq. ID no. 12352275
  misc_feature: MA Experiment ID: 108527 Result: Down-regulated in Transcription
  misc_feature: MA Experiment 108527 PARAMETER Experiment Name: Zm_5mM_NO_P Parameter: Age (day) Value: 8
  misc_feature: MA Experiment 108527 PARAMETER Experiment Name: Zm_5mM_NO_P Parameter: Organism Value: Zea mays
  misc_feature: MA Experiment 108527 PARAMETER Experiment Name: Zm_5mM_NO_P Parameter: Plant Line Value: 35A19
  misc_feature: MA Experiment 108527 PARAMETER Experiment Name: Zm_5mM_NO_P Parameter: Timepoint (hr) Value: 6
  misc_feature: MA Experiment 108527 PARAMETER Experiment Name: Zm_5mM_NO_P Parameter: Tissue Value: Aerial
  misc_feature: MA Experiment 108527 PARAMETER Experiment Name: Zm_5mM_NO_P Parameter: Treatment Value: 5mM NO vs. No Treatment
  misc_feature: MA Experiment ID: 108528 Result: Up-regulated in Transcription
  misc_feature: MA Experiment 108528 PARAMETER Experiment Name: Zm_Imbibed_Seeds_P Parameter: Age (day) Value: 5 vs. 2
  misc_feature: MA Experiment 108528 PARAMETER Experiment Name: Zm_Imbibed_Seeds_P Parameter: Organism Value: Zea mays
  misc_feature: MA Experiment 108528 PARAMETER Experiment Name: Zm_Imbibed_Seeds_P Parameter: Plant Line Value: 35A19
  misc_feature: MA Experiment 108528 PARAMETER Experiment Name: Zm_Imbibed_Seeds_P Parameter: Tissue Value: Aerial vs. Embryo
  misc_feature: MA Experiment ID: 108530 Result: Up-regulated in Transcription
  misc_feature: MA Experiment 108530 PARAMETER Experiment Name: Zm_Imbibed_Seeds_P Parameter: Age (day) Value: 6 vs. 2
  misc_feature: MA Experiment 108530 PARAMETER Experiment Name: Zm_Imbibed_Seeds_P Parameter: Organism Value: Zea mays
  misc_feature: MA Experiment 108530 PARAMETER Experiment Name: Zm_Imbibed_Seeds_P Parameter: Plant Line Value: 35A19
  misc_feature: MA Experiment 108530 PARAMETER Experiment Name: Zm_Imbibed_Seeds_P Parameter: Tissue Value: Aerial vs. Embryo
  misc_feature: MA Experiment ID: 108535 Result: Down-regulated in Transcription
  misc_feature: MA Experiment 108535 PARAMETER Experiment Name: Zm_Meristem_P Parameter: Age (day) Value: 8
  misc_feature: MA Experiment 108535 PARAMETER Experiment Name: Zm_Meristem_P Parameter: Organism Value: Zea mays
  misc_feature: MA Experiment 108535 PARAMETER Experiment Name: Zm_Meristem_P Parameter: Plant Line Value: 35A19
  misc_feature: MA Experiment 108535 PARAMETER Experiment Name: Zm_Meristem_P Parameter: Tissue Value: Root Meristem vs. Above Root Meristem
  misc_feature: MA Experiment ID: 108544 Result: Up-regulated in Transcription
  misc_feature: MA Experiment ID: 108547 Result: Up-regulated in Transcription
  misc_feature: MA Experiment 108547 PARAMETER Experiment Name: Zm_Imbibed_Seeds_P Parameter: Age (day) Value: 4 vs. 2
  misc_feature: MA Experiment 108547 PARAMETER Experiment Name: Zm_Imbibed_Seeds_P Parameter: Organism Value: Zea mays
  misc_feature: MA Experiment 108547 PARAMETER Experiment Name: Zm_Imbibed_Seeds_P Parameter: Plant Line Value: 35A19
  misc_feature: MA Experiment 108547 PARAMETER Experiment Name: Zm_Imbibed_Seeds_P Parameter: Tissue Value: Aerial vs. Embryo
  misc_feature: MA Experiment ID: 108688 Result: Down-regulated in Transcription
  misc_feature: MA Experiment 108688 PARAMETER Experiment Name: Zm_Embryos-Flowers__P Parameter: Tissue Value: Immature Flowers vs. Aerial+
  misc_feature: MA Experiment ID: 20000492 Result: Down-regulated in Transcription
  misc_feature: MA Experiment 20000492 PARAMETER Experiment Name: Zm_Hybrid_Seed_Dev_P Parameter: DAP Value: 12
  misc_feature: MA Experiment 20000492 PARAMETER Experiment Name: Zm_Hybrid_Seed_Dev_P Parameter: Organism Value: Zea mays
  misc_feature: MA Experiment 20000492 PARAMETER Experiment Name: Zm_Hybrid_Seed_Dev_P Parameter: Plant Line Value: 35A19
  misc_feature: MA Experiment 20000492 PARAMETER Experiment Name: Zm_Hybrid_Seed_Dev_P Parameter: Tissue Value: Fert Kernel vs. Unfert Floret
accacgcgtccacgcctcaccatcgcagaagcgcagtaggaactaggaagccggacaaagctacgcaaggagggagaaagcgtgtaaaccatggcgtcctccgcgttcctcaacgctctcgtcctccgatcgccatcaccgtcgctctcgtcctcgtctaacctccgcagcaccggcgccttcgcgttcccgaaaccaccgcgcttcccatgcctgcgttctgcgcgtcgactcgtccttgcgagggcggcggcagcgccggcgccggggcgatggccccgaggacgagtgggggccggagcccgagggcggttccgctgtcacgggggccgcggtggcggaggcgccagaggcgagagaggtcgcggagctcaaggcgcagctaaaggacgcgctgtacggcacggagcggggcctgcgggcgtccagcgagtcgcgagccaaagtgctggagctcatcacgcagctcgagacgcgcaaccccacgccggctcctacggaggcgcttacgctccttaacggcaagtggatcctcgcgtacacatcgttttcccaactattcccactattggggtttggtaatctgcctcagctggtgaaggtggaggaaatatcacaaaccattgattctgagaacttcacagtgcaaaactgtatcaagttttcaggacctttggctacaacctcagttgccactaatgcaaaatttgaaattagaagccccaagcgtgtgcagatcaaatttgatgaagggattgttggtacaccacagttgaccgactccattgtgctaccagagaagtttgagttatttggacagaacatcgacctgagtccactgaaaggcatattttcttccatcgaaaatgcagcatcctaggttgcaaagaccatatctgagcagcctccgctgaaaataccgatcaggacaaacaatgctgaatcgtggttgcttacgacataccttgacgaagagctcaggatctccagaggcgatggcagcagcatctttgtgctgttcaaggagggaagtactcttctatactgagatccaaatcccgagtcgatgatcgttgaagctgaaccgtgaagtagttatactgcttatgctttcctttcttatagtaatatactccgtctcaaaataagtcaatttctagaatcacttaaagtcaaattatcttaagtttgaccaattttataggaaaggcaccatcgtctatgtctctatgacaccaaatgagtacattatgaaaaatatatgggttgtcttgtaaatacagttcttgtcattagagtatatgatgactaggaccggtttaatccgaaatatataaactctatatatcagtc

SEQ ID NO: 4563 - protein, 142 aa, Zea mays subsp. mays
  peptide (1)..(142): Ceres Seq. ID no. 12352276
  misc_feature (1)..(71): Homolog of NCBI NO: 29367475 NR Description: fibrillin-like protein [Oryza sativa (japonica
MASSAFLNALVLRSPSPSLSSSSNLRSTGAFAFPKPPRFPCLRSARRLVLARAAAAPAPGRWPRGRVGAGARGRFRCHGGRGGGGARGERGRGAQGAAKGRAVRHGAGPAGVQRVASQSAGAHHAARDAQPHAGSYGGAYAP

SEQ ID NO: 4564 - DNA, 1193 bp, Zea mays subsp. mays
  misc_feature (1)..(1193): Ceres Seq. ID no. 13492699
  misc_feature: MA Experiment ID: 108535 Result: Up-regulated in Transcription
  misc_feature: MA Experiment 108535 PARAMETER Experiment Name: Zm_Meristem_P Parameter: Age (day) Value: 8
  misc_feature: MA Experiment 108535 PARAMETER Experiment Name: Zm_Meristem_P Parameter: Organism Value: Zea mays
  misc_feature: MA Experiment 108535 PARAMETER Experiment Name: Zm_Meristem_P Parameter: Plant Line Value: 35A19
  misc_feature: MA Experiment 108535 PARAMETER Experiment Name: Zm_Meristem_P Parameter: Tissue Value: Root Meristem vs. Above Root Meristem
agattcctcgcccaaccctaccccaggcgatctcgcatcgcatggccaccggaccgcggtctctccacgccctcctcggcggcggtgcagttgccgacttgctgctgtggcgacggaggaatgcctcggcggcagccgtggtgggcgccaccacggtctggttcgtcttcgagcgcgcggggtacagcttcccctccgtcctctccaacgccctgctcctcctcgtcgccatcctcttcttctgggccaagtctgcgtcgctgctcaacaggcctcttccacctcttcctaatcttgaggtctcagatgcgattgttgaaaaagctgcaaatcatgctcttgtatggatcaataggctgctggctgttggtcatgacatcgccatcaagagagataggaaagtttttataaaggtgatactgattttgtgggtggtttcattcattggaatgctcttcaattttcttacgcttatttacattggtgtaatgctttctctgttggttccaccactctatgagaagtaccaggaccaggttgatgagaaggttggtgtagcgtacagtgtactatcaaggcacatagataccatcattaccagggctgggcaatcagccaagcagaagaagactgagtaaaagaaacgttttgctgtattgtggaacatctctggttgtcaagtgaagttgacagtgggcctttcatctttgaccctctattccactaatatgaaccctcgatatgctgatctgaggttctgatgtgcattatgggaaatgaggcggcttgtgtatttcctttttgaacatggggtttactatgggtgcatatcgcactcggaatgatatcgagaaattgcgactcgtacatgcaattatgcaggctgcttgctctgttagtcatatgatctttccgtcagtgattttaaattttaggctgctccgaggaactttgcaggctgctccgagcaattatgcaggctgcttgctcattcgatgcccatctactggtagctcgttttctgaaatactagtacctaataaggtgtattctacgtagacagttgcatatcatgtgaataaataggtattttctggcggcagttctgtttttgctttacctgtgtttatactcccaccgtttattttgacaatgcgtacaaggtctagataagtcttttttagtgcgcttct

SEQ ID NO: 4565 - protein, 211 aa, Zea mays subsp. mays
  peptide (1)..(211): Ceres Seq. ID no. 13492700
  misc_feature (20)..(183): Homolog of NCBI NO: 21593206 NR Description: unknown [Arabidopsis thaliana]
  misc_feature (20)..(183): Homolog of NCBI NO: 18402246 NR Description: expressed protein [Arabidopsis thaliana]
  misc_feature (16)..(211): Homolog of NCBI NO: 38345298 NR Description: OSJNBa0043A12.26 [Oryza sativa (japonica
  misc_feature (12)..(181): Homolog of NCBI NO: 15222616 NR Description: expressed protein [Arabidopsis thaliana]
  misc_feature (21)..(180): Homolog of NCBI NO: 34904202 NR Description: P0492F05.25 [Oryza sativa (japonica
  misc_feature (29)..(209): Homolog of NCBI NO: 30681541 NR Description: reticulon family [Arabidopsis thaliana]
  misc_feature (20)..(209): Homolog of NCBI NO: 26450318 NR Description: unknown protein [Arabidopsis thaliana]
  misc_feature (11)..(179): Homolog of NCBI NO: 15232423 NR Description: expressed protein [Arabidopsis thaliana]
  misc_feature (35)..(210): Homolog of NCBI NO: 25411624 NR Description: hypothetical protein At2g15280 [imported] -
  misc_feature (20)..(210): Homolog of NCBI NO: 30679374 NR Description: expressed protein [Arabidopsis thaliana]
IPRPTLPQAISHRMATGPRSLHALLGGGAVADLLLWRRRNASAAAVVGATTVWFVFERAGYSFPSVLSNALLLLVAILFFWAKSASLLNRPLPPLPNLEVSDAIVEKAANHALVWINRLLAVGHDIAIKRDRKVFIKVILILWVVSFIGMLFNFLTLIYIGVMLSLLVPPLYEKYQDQVDEKVGVAYSVLSRHIDTIITRAGQSAKQKKTE

SEQ ID NO: 4566 - protein, 198 aa, Zea mays subsp. mays
  peptide (1)..(198): Ceres Seq. ID no. 13492701
  misc_feature (1)..(168): Homolog of NCBI NO: 15222616 NR Description: expressed protein [Arabidopsis thaliana]
  misc_feature (8)..(167): Homolog of NCBI NO: 34904202 NR Description: P0492F05.25 [Oryza sativa (japonica
  misc_feature (16)..(196): Homolog of NCBI NO: 30681541 NR Description: reticulon family [Arabidopsis thaliana]
  misc_feature (7)..(196): Homolog of NCBI NO: 26450318 NR Description: unknown protein [Arabidopsis thaliana]
  misc_feature (1)..(166): Homolog of NCBI NO: 15232423 NR Description: expressed protein [Arabidopsis thaliana]
  misc_feature (22)..(197): Homolog of NCBI NO: 25411624 NR Description: hypothetical protein At2g15280 [imported] -
  misc_feature (7)..(197): Homolog of NCBI NO: 30679374 NR Description: expressed protein [Arabidopsis thaliana]
  misc_feature (7)..(170): Homolog of NCBI NO: 21593206 NR Description: unknown [Arabidopsis thaliana]
  misc_feature (7)..(170): Homolog of NCBI NO: 18402246 NR Description: expressed protein [Arabidopsis thaliana]
  misc_feature (3)..(198): Homolog of NCBI NO: 38345298 NR Description: OSJNBa0043A12.26 [Oryza sativa (japonica
MATGPRSLHALLGGGAVADLLLWRRRNASAAAVVGATTVWFVFERAGYSFPSVLSNALLLLVAILFFWAKSASLLNRPLPPLPNLEVSDAIVEKAANHALVWINRLLAVGHDIAIKRDRKVFIKVILILWVVSFIGMLFNFLTLIYIGVMLSLLVPPLYEKYQDQVDEKVGVAYSVLSRHIDTIITRAGQSAKQKKTE

SEQ ID NO: 4567 - protein, 136 aa, Zea mays subsp. mays
  peptide (1)..(136): Ceres Seq. ID no. 13492702
RFLAQPYPRRSRIAWPPDRGLSTPSSAAVQLPTCCCGDGGMPRRQPWWAPPRSGSSSSARGTASPPSSPTPCSSSSPSSSSGPSLRRCSTGLFHLFLILRSQMRLLKKLQIMLLYGSIGCWLLVMTSPSREIGKFL

SEQ ID NO: 4568 - DNA, 1404 bp, Zea mays subsp. mays
  misc_feature (1)..(1404): Ceres Seq. ID no. 12365409
  misc_feature: MA Experiment ID: 108527 Result: Up-regulated in Transcription
  misc_feature: MA Experiment 108527 PARAMETER Experiment Name: Zm_5mM_NO_P Parameter: Age (day) Value: 8
  misc_feature: MA Experiment 108527 PARAMETER Experiment Name: Zm_5mM_NO_P Parameter: Organism Value: Zea mays
  misc_feature: MA Experiment 108527 PARAMETER Experiment Name: Zm_5mM_NO_P Parameter: Plant Line Value: 35A19
  misc_feature: MA Experiment 108527 PARAMETER Experiment Name: Zm_5mM_NO_P Parameter: Timepoint (hr) Value: 6
  misc_feature: MA Experiment 108527 PARAMETER Experiment Name: Zm_5mM_NO_P Parameter: Tissue Value: Aerial
  misc_feature: MA Experiment 108527 PARAMETER Experiment Name: Zm_5mM_NO_P Parameter: Treatment Value: 5mM NO vs. No Treatment
  misc_feature: MA Experiment ID: 108543 Result: Up-regulated in Transcription
  misc_feature: MA Experiment ID: 20000480 Result: Down-regulated in Transcription
  misc_feature: MA Experiment 20000480 PARAMETER Experiment Name: Zm_Drought_P Parameter: Age (day) Value: 11
  misc_feature: MA Experiment 20000480 PARAMETER Experiment Name: Zm_Drought_P Parameter: Organism Value: Zea mays
  misc_feature: MA Experiment 20000480 PARAMETER Experiment Name: Zm_Drought_P Parameter: Plant Line Value: 35A19
  misc_feature: MA Experiment 20000480 PARAMETER Experiment Name: Zm_Drought_P Parameter: Timepoint (hr) Value: 72
  misc_feature: MA Experiment 20000480 PARAMETER Experiment Name: Zm_Drought_P Parameter: Tissue Value: Aerial
  misc_feature: MA Experiment 20000480 PARAMETER Experiment Name: Zm_Drought_P Parameter: Treatment Value: Drought vs. No Drought
  misc_feature: MA Experiment ID: 20000488 Result: Down-regulated in Transcription
  misc_feature: MA Experiment 20000488 PARAMETER Experiment Name: Zm_50mM_NH4NO3_L_to_H_P Parameter: Organism Value: Zea mays
  misc_feature: MA Experiment 20000488 PARAMETER Experiment Name: Zm_50mM_NH4NO3_L_to_H_P Parameter: Timepoint (hr) Value: 8
  misc_feature: MA Experiment 20000488 PARAMETER Experiment Name: Zm_50mM_NH4NO3_L_to_H_P Parameter: Tissue Value: Leaves
  misc_feature: MA Experiment 20000488 PARAMETER Experiment Name: Zm_50mM_NH4NO3_L_to_H_P Parameter: Treatment Value: 50mM NH4NO3 vs. 100mM Mannitol
  misc_feature: MA Experiment ID: 20000535 Result: Down-regulated in Transcription
  misc_feature: MA Experiment 20000535 PARAMETER Experiment Name: Zm_Hybrid_Seed_Dev_P Parameter: DAP Value: 30 vs. 12
  misc_feature: MA Experiment 20000535 PARAMETER Experiment Name: Zm_Hybrid_Seed_Dev_P Parameter: Organism Value: Zea mays
  misc_feature: MA Experiment 20000535 PARAMETER Experiment Name: Zm_Hybrid_Seed_Dev_P Parameter: Plant Line Value: 35A19
  misc_feature: MA Experiment 20000535 PARAMETER Experiment Name: Zm_Hybrid_Seed_Dev_P Parameter: Tissue Value: Embryo vs. Unfert Floret
aaatctcctggaaattctgatcgaacctcctgcttggagcttcgcagcaacaccgtcctcacccgcgctgaaaaagcacccatcttcctattgcgcctttcttgtagagtcaagtcagctcacttttctcgtttcgatccagatcccgtattcccgttggattcgtttatcccgcgtcccgcaagcaatatcagatccttagcttctgtggttctgcacttattcagcgtctctccagcttggaccccttaaagtgttctccaggtacagctacttgaatcgtcagaaatggccactgacgccagcggaggtggtaagcctagtcttcttctgagtactttaccgaagcaactaccatcggattttctgaaagagattacggatgggttctctgctgacagaaaactgggtcaaggtggatttggaactgtttacaagggattcctgcaagacgggcaagccattgctgtgaagaagctctcagataattccccagtggcaaccgaaaaacagttcaagaatgaggttgggaaccttatggccatccagcatgagaacatagtgaggttgtatggctactgtcatgaactgcagaagaaagtgatagaacacaatggaagatacattcttgtggatgtggttcagagcatgctctgctacgaatacgcccccaaggggagccttgacaagtgtatttttgatatatcttctaggcctaattgggccacatgcttcaaaataattaagggcatttgccagggtttatatttcctacataaggggatggataggcctattgttcatctggatcttcagcctgccaacatactattggatgacaacatggtaccaaaaattgcggattttggcctgtcaaggctctttggtgaagaacaaacccgaataaacacaataaatgttgtgggagccaaagggtatatggctccagaatatctgtacagaggggagatctcaacccggtctgacatatacagcttaggcgtactaatcatggagatcacaactgggcagaagaactctccgaatgacaaagacatgtgtgcaaggaactttataaatcaggtttgccaaacatggacagacgaacacatggcatccaagtactcatcactagatgcagacagcctccagcaagtaaaagcatgcattgaaactgggctaaaatgtgtggatatcgatcagaagaagaggccctctatagttgaaattgttgacaagctcgatggaaggcttgctctctgaatggtagtgtatgctgcgcaaggtaaaactgtgatgcagagttaattctgcctatggtgatatgctctagatgcaatcacggaaacaataattgtatcacttactaatttatgtacttatgaaaaatatgttgcttgtgtc

SEQ ID NO: 4569 - protein, 324 aa, Zea mays subsp. mays
  peptide (1)..(324): Ceres Seq. ID no. 12365410
  misc_feature (152)..(318): Homolog of NCBI NO: 38344522 NR Description: OSJNBa0016N04.15 [Oryza sativa (japonica
  misc_feature (288)..(318): Homolog of NCBI NO: 21929723 NR Description: barley stem rust resistance protein
  misc_feature (288)..(318): Homolog of NCBI NO: 21929729 NR Description: barley stem rust resistance protein
  misc_feature (288)..(318): Homolog of NCBI NO: 21728344 NR Description: stem rust resistance protein Rpg1
  misc_feature (20)..(318): Homolog of NCBI NO: 21929729 NR Description: barley stem rust resistance protein
  misc_feature (20)..(318): Homolog of NCBI NO: 21929723 NR Description: barley stem rust resistance protein
  misc_feature (20)..(318): Homolog of NCBI NO: 21728344 NR Description: stem rust resistance protein Rpg1
  misc_feature (18)..(319): Homolog of NCBI NO: 38344521 NR Description: OSJNBa0016N04.14 [Oryza sativa (japonica
  misc_feature (27)..(110): Homolog of NCBI NO: 37532178 NR Description: putative receptor-like protein kinase
  misc_feature (125)..(318): Homolog of NCBI NO: 37532178 NR Description: putative receptor-like protein kinase
MATDASGGGKPSLLLSTLPKQLPSDFLKEITDGFSADRKLGQGGFGTVYKGFLQDGQAIAVKKLSDNSPVATEKQFKNEVGNLMAIQHENIVRLYGYCHELQKKVIEHNGRYILVDVVQSMLCYEYAPKGSLDKCIFDISSRPNWATCFKIIKGICQGLYFLHKGMDRPIVHLDLQPANILLDDNMVPKIADFGLSRLFGEEQTRINTINVVGAKGYMAPEYLYRGEISTRSDIYSLGVLIMEITTGQKNSPNDKDMCARNFINQVCQTWTDEHMASKYSSLDADSLQQVKACIETGLKCVDIDQKKRPSIVEIVDKLDGRLAL

SEQ ID NO: 4570 - protein, 241 aa, Zea mays subsp. mays
  peptide (1)..(241): Ceres Seq. ID no. 12365411
  misc_feature (69)..(235): Homolog of NCBI NO: 38344522 NR Description: OSJNBa0016N04.15 [Oryza sativa (japonica
  misc_feature (205)..(235): Homolog of NCBI NO: 21929723 NR Description: barley stem rust resistance protein
  misc_feature (205)..(235): Homolog of NCBI NO: 21929729 NR Description: barley stem rust resistance protein
  misc_feature (205)..(235): Homolog of NCBI NO: 21728344 NR Description: stem rust resistance protein Rpg1
  misc_feature (1)..(235): Homolog of NCBI NO: 21929729 NR Description: barley stem rust resistance protein
  misc_feature (1)..(235): Homolog of NCBI NO: 21929723 NR Description: barley stem rust resistance protein
  misc_feature (1)..(235): Homolog of NCBI NO: 21728344 NR Description: stem rust resistance protein Rpg1
  misc_feature (1)..(236): Homolog of NCBI NO: 38344521 NR Description: OSJNBa0016N04.14 [Oryza sativa (japonica
  misc_feature (1)..(27): Homolog of NCBI NO: 37532178 NR Description: putative receptor-like protein kinase
  misc_feature (42)..(235): Homolog of NCBI NO: 37532178 NR Description: putative receptor-like protein kinase
MAIQHENIVRLYGYCHELQKKVIEHNGRYILVDVVQSMLCYEYAPKGSLDKCIFDISSRPNWATCFKIIKGICQGLYFLHKGMDRPIVHLDLQPANILLDDNMVPKIADFGLSRLFGEEQTRINTINVVGAKGYMAPEYLYRGEISTRSDIYSLGVLIMEITTGQKNSPNDKDMCARNFINQVCQTWTDEHMASKYSSLDADSLQQVKACIETGLKCVDIDQKKRPSIVEIVDKLDGRLAL

SEQ ID NO: 4571 - protein, 204 aa, Zea mays subsp. mays
  peptide (1)..(204): Ceres Seq. ID no. 12365412
  misc_feature (1)..(20): Homolog of NCBI NO: 38344522 NR Description: OSJNBa0016N04.15 [Oryza sativa (japonica
  misc_feature (32)..(198): Homolog of NCBI NO: 38344522 NR Description: OSJNBa0016N04.15 [Oryza sativa (japonica
  misc_feature (168)..(198): Homolog of NCBI NO: 21929729 NR Description: barley stem rust resistance protein
  misc_feature (168)..(198): Homolog of NCBI NO: 21929723 NR Description: barley stem rust resistance protein
  misc_feature (168)..(198): Homolog of NCBI NO: 21728344 NR Description: stem rust resistance protein Rpg1
  misc_feature (1)..(198): Homolog of NCBI NO: 21929729 NR Description: barley stem rust resistance protein
  misc_feature (1)..(198): Homolog of NCBI NO: 21929723 NR Description: barley stem rust resistance protein
  misc_feature (1)..(198): Homolog of NCBI NO: 21728344 NR Description: stem rust resistance protein Rpg1
  misc_feature (1)..(199): Homolog of NCBI NO: 38344521 NR Description: OSJNBa0016N04.14 [Oryza sativa (japonica
  misc_feature (5)..(198): Homolog of NCBI NO: 37532178 NR Description: putative receptor-like protein kinase
MLCYEYAPKGSLDKCIFDISSRPNWATCFKIIKGICQGLYFLHKGMDRPIVHLDLQPANILLDDNMVPKIADFGLSRLFGEEQTRINTINVVGAKGYMAPEYLYRGEISTRSDIYSLGVLIMEITTGQKNSPNDKDMCARNFINQVCQTWTDEHMASKYSSLDADSLQQVKACIETGLKCVDIDQKKRPSIVEIVDKLDGRLAL

SEQ ID NO: 4572 - DNA, 1673 bp, Zea mays subsp. mays; identical to SEQ ID NO: 1733
  misc_feature (1)..(1673): Ceres Seq. ID no. 12387134
  misc_feature: MA Experiment ID: 108504 Result: Down-regulated in Transcription
  misc_feature: MA Experiment 108504 PARAMETER Experiment Name: Zm_Drought_P Parameter: Age (day) Value: 8
  misc_feature: MA Experiment 108504 PARAMETER Experiment Name: Zm_Drought_P Parameter: Organism Value: Zea mays
  misc_feature: MA Experiment 108504 PARAMETER Experiment Name: Zm_Drought_P Parameter: Plant Line Value: 35A19
  misc_feature: MA Experiment 108504 PARAMETER Experiment Name: Zm_Drought_P Parameter: Timepoint (hr) Value: 12
  misc_feature: MA Experiment 108504 PARAMETER Experiment Name: Zm_Drought_P Parameter: Tissue Value: Aerial
  misc_feature: MA Experiment 108504 PARAMETER Experiment Name: Zm_Drought_P Parameter: Treatment Value: Drought vs. No Drought
  misc_feature: MA Experiment ID: 108523 Result: Down-regulated in Transcription
  misc_feature: MA Experiment 108523 PARAMETER Experiment Name: Zm_42deg_Heat_P Parameter: Age (day) Value: 8
  misc_feature: MA Experiment 108523 PARAMETER Experiment Name: Zm_42deg_Heat_P Parameter: Organism Value: Zea mays
  misc_feature: MA Experiment 108523 PARAMETER Experiment Name: Zm_42deg_Heat_P Parameter: Plant Line Value: 35A19
  misc_feature: MA Experiment 108523 PARAMETER Experiment Name: Zm_42deg_Heat_P Parameter: Temperature (deg C) Value: 42 vs. 22
  misc_feature: MA Experiment 108523 PARAMETER Experiment Name: Zm_42deg_Heat_P Parameter: Timepoint (hr) Value: 6
  misc_feature: MA Experiment 108523 PARAMETER Experiment Name: Zm_42deg_Heat_P Parameter: Tissue Value: Aerial
  misc_feature: MA Experiment ID: 108527 Result: Down-regulated in Transcription
  misc_feature: MA Experiment 108527 PARAMETER Experiment Name: Zm_5mM_NO_P Parameter: Age (day) Value: 8
  misc_feature: MA Experiment 108527 PARAMETER Experiment Name: Zm_5mM_NO_P Parameter: Organism Value: Zea mays
  misc_feature: MA Experiment 108527 PARAMETER Experiment Name: Zm_5mM_NO_P Parameter: Plant Line Value: 35A19
  misc_feature: MA Experiment 108527 PARAMETER Experiment Name: Zm_5mM_NO_P Parameter: Timepoint (hr) Value: 6
  misc_feature: MA Experiment 108527 PARAMETER Experiment Name: Zm_5mM_NO_P Parameter: Tissue Value: Aerial
  misc_feature: MA Experiment 108527 PARAMETER Experiment Name: Zm_5mM_NO_P Parameter: Treatment Value: 5mM NO vs. No Treatment
  misc_feature: MA Experiment ID: 108528 Result: Up-regulated in Transcription
  misc_feature: MA Experiment 108528 PARAMETER Experiment Name: Zm_Imbibed_Seeds_P Parameter: Age (day) Value: 5 vs. 2
  misc_feature: MA Experiment 108528 PARAMETER Experiment Name: Zm_Imbibed_Seeds_P Parameter: Organism Value: Zea mays
  misc_feature: MA Experiment 108528 PARAMETER Experiment Name: Zm_Imbibed_Seeds_P Parameter: Plant Line Value: 35A19
  misc_feature: MA Experiment 108528 PARAMETER Experiment Name: Zm_Imbibed_Seeds_P Parameter: Tissue Value: Aerial vs. Embryo
  misc_feature: MA Experiment ID: 108535 Result: Up-regulated in Transcription
  misc_feature: MA Experiment 108535 PARAMETER Experiment Name: Zm_Meristem_P Parameter: Age (day) Value: 8
  misc_feature: MA Experiment 108535 PARAMETER Experiment Name: Zm_Meristem_P Parameter: Organism Value: Zea mays
  misc_feature: MA Experiment 108535 PARAMETER Experiment Name: Zm_Meristem_P Parameter: Plant Line Value: 35A19
  misc_feature: MA Experiment 108535 PARAMETER Experiment Name: Zm_Meristem_P Parameter: Tissue Value: Root Meristem vs. Above Root Meristem
  misc_feature: MA Experiment ID: 108536 Result: Down-regulated in Transcription
  misc_feature: MA Experiment 108536 PARAMETER Experiment Name: Zm_Meristem_P Parameter: Age (day) Value: 8
  misc_feature: MA Experiment 108536 PARAMETER Experiment Name: Zm_Meristem_P Parameter: Organism Value: Zea mays
  misc_feature: MA Experiment 108536 PARAMETER Experiment Name: Zm_Meristem_P Parameter: Plant Line Value: 35A19
  misc_feature: MA Experiment 108536 PARAMETER Experiment Name: Zm_Meristem_P Parameter: Tissue Value: Shoot Meristem vs. Above Shoot Meristem
  misc_feature: MA Experiment ID: 108544 Result: Down-regulated in Transcription
  misc_feature: MA Experiment ID: 108545 Result: Up-regulated in Transcription
  misc_feature: MA Experiment 108545 PARAMETER Experiment Name: Zm_Imbibed_Seeds_P Parameter: Age (day) Value: 3 vs. 2
  misc_feature: MA Experiment 108545 PARAMETER Experiment Name: Zm_Imbibed_Seeds_P Parameter: Organism Value: Zea mays
  misc_feature: MA Experiment 108545 PARAMETER Experiment Name: Zm_Imbibed_Seeds_P Parameter: Plant Line Value: 35A19
  misc_feature: MA Experiment 108545 PARAMETER Experiment Name: Zm_Imbibed_Seeds_P Parameter: Tissue Value: Aerial vs. Embryo
  misc_feature: MA Experiment ID: 108556 Result: Down-regulated in Transcription
  misc_feature: MA Experiment 108556 PARAMETER Experiment Name: Zm_Drought_P Parameter: Age (day) Value: 9
  misc_feature: MA Experiment 108556 PARAMETER Experiment Name: Zm_Drought_P Parameter: Organism Value: Zea mays
  misc_feature: MA Experiment 108556 PARAMETER Experiment Name: Zm_Drought_P Parameter: Plant Line Value: 35A19
  misc_feature: MA Experiment 108556 PARAMETER Experiment Name: Zm_Drought_P Parameter: Timepoint (hr) Value: 24
  misc_feature: MA Experiment 108556 PARAMETER Experiment Name: Zm_Drought_P Parameter: Tissue Value: Aerial
  misc_feature: MA Experiment 108556 PARAMETER Experiment Name: Zm_Drought_P Parameter: Treatment Value: Drought vs. No Drought
  misc_feature: MA Experiment ID: 108559 Result: Down-regulated in Transcription
  misc_feature: MA Experiment 108559 PARAMETER Experiment Name: Zm_5mM_NO_P Parameter: Age (day) Value: 8
  misc_feature: MA Experiment 108559 PARAMETER Experiment Name: Zm_5mM_NO_P Parameter: Organism Value: Zea mays
  misc_feature: MA Experiment 108559 PARAMETER Experiment Name: Zm_5mM_NO_P Parameter: Plant Line Value: 35A19
  misc_feature: MA Experiment 108559 PARAMETER Experiment Name: Zm_5mM_NO_P Parameter: Timepoint (hr) Value: 12
  misc_feature: MA Experiment 108559 PARAMETER Experiment Name: Zm_5mM_NO_P Parameter: Tissue Value: Aerial
  misc_feature: MA Experiment 108559 PARAMETER Experiment Name: Zm_5mM_NO_P Parameter: Treatment Value: 5mM NO vs. No Treatment
  misc_feature: MA Experiment ID: 20000477 Result: Down-regulated in Transcription
  misc_feature: MA Experiment 20000477 PARAMETER Experiment Name: Zm_5mM_SA_P Parameter: Age (day) Value: 10
  misc_feature: MA Experiment 20000477 PARAMETER Experiment Name: Zm_5mM_SA_P Parameter: Organism Value: Zea mays
  misc_feature: MA Experiment 20000477 PARAMETER Experiment Name: Zm_5mM_SA_P Parameter: Plant Line Value: 35A19
  misc_feature: MA Experiment 20000477 PARAMETER Experiment Name: Zm_5mM_SA_P Parameter: Timepoint (hr) Value: 48
  misc_feature: MA Experiment 20000477 PARAMETER Experiment Name: Zm_5mM_SA_P Parameter: Tissue Value: Aerial
  misc_feature: MA Experiment 20000477 PARAMETER Experiment Name: Zm_5mM_SA_P Parameter: Treatment Value: 5mM SA vs. No Treatment
  misc_feature: MA Experiment ID: 20000478 Result: Down-regulated in Transcription
  misc_feature: MA Experiment 20000478 PARAMETER Experiment Name: Zm_5mM_SA_P Parameter: Age (day) Value: 11
  misc_feature: MA Experiment 20000478 PARAMETER Experiment Name: Zm_5mM_SA_P Parameter: Organism Value: Zea mays
  misc_feature: MA Experiment 20000478 PARAMETER Experiment Name: Zm_5mM_SA_P Parameter: Plant Line Value: 35A19
  misc_feature: MA Experiment 20000478 PARAMETER Experiment Name: Zm_5mM_SA_P Parameter: Timepoint (hr) Value: 72
  misc_feature: MA Experiment 20000478 PARAMETER Experiment Name: Zm_5mM_SA_P Parameter: Tissue Value: Aerial
  misc_feature: MA Experiment 20000478 PARAMETER Experiment Name: Zm_5mM_SA_P Parameter: Treatment Value: 5mM SA vs. No Treatment
  misc_feature: MA Experiment ID: 20000480 Result: Down-regulated in Transcription
  misc_feature: MA Experiment 20000480 PARAMETER Experiment Name: Zm_Drought_P Parameter: Age (day) Value: 11
  misc_feature: MA Experiment 20000480 PARAMETER Experiment Name: Zm_Drought_P Parameter: Organism Value: Zea mays
  misc_feature: MA Experiment 20000480 PARAMETER Experiment Name: Zm_Drought_P Parameter: Plant Line Value: 35A19
  misc_feature: MA Experiment 20000480 PARAMETER Experiment Name: Zm_Drought_P Parameter: Timepoint (hr) Value: 72
  misc_feature: MA Experiment 20000480 PARAMETER Experiment Name: Zm_Drought_P Parameter: Tissue Value: Aerial
  misc_feature: MA Experiment 20000480 PARAMETER Experiment Name: Zm_Drought_P Parameter: Treatment Value: Drought vs. No Drought
  misc_feature: MA Experiment ID: 20000488 Result: Down-regulated in Transcription
  misc_feature: MA Experiment 20000488 PARAMETER Experiment Name: Zm_50mM_NH4NO3_L_to_H_P Parameter: Organism Value: Zea mays
  misc_feature: MA Experiment 20000488 PARAMETER Experiment Name: Zm_50mM_NH4NO3_L_to_H_P Parameter: Timepoint (hr) Value: 8
  misc_feature: MA Experiment 20000488 PARAMETER Experiment Name: Zm_50mM_NH4NO3_L_to_H_P Parameter: Tissue Value: Leaves
  misc_feature: MA Experiment 20000488 PARAMETER Experiment Name: Zm_50mM_NH4NO3_L_to_H_P Parameter: Treatment Value: 50mM NH4NO3 vs. 100mM Mannitol
  misc_feature: MA Experiment ID: 20000532 Result: Down-regulated in Transcription
  misc_feature: MA Experiment 20000532 PARAMETER Experiment Name: Zm_0.001percent_MeJA_P Parameter: Age (day) Value: 10
  misc_feature: MA Experiment 20000532 PARAMETER Experiment Name: Zm_0.001percent_MeJA_P Parameter: Organism Value: Zea mays
  misc_feature: MA Experiment 20000532 PARAMETER Experiment Name: Zm_0.001percent_MeJA_P Parameter: Plant Line Value: 35A19
  misc_feature: MA Experiment 20000532 PARAMETER Experiment Name: Zm_0.001percent_MeJA_P Parameter: Timepoint (hr) Value: 48
  misc_feature: MA Experiment 20000532 PARAMETER Experiment Name: Zm_0.001percent_MeJA_P Parameter: Tissue Value: Aerial
  misc_feature: MA Experiment 20000532 PARAMETER Experiment Name: Zm_0.001percent_MeJA_P Parameter: Treatment Value: 0.001percent MeJA vs. No Treatment
  misc_feature: MA Experiment ID: 20000533 Result: Down-regulated in Transcription
  misc_feature: MA Experiment 20000533 PARAMETER Experiment Name: Zm_0.001percent_MeJA_P Parameter: Age (day) Value: 11
  misc_feature: MA Experiment 20000533 PARAMETER Experiment Name: Zm_0.001percent_MeJA_P Parameter: Organism Value: Zea mays
  misc_feature: MA Experiment 20000533 PARAMETER Experiment Name: Zm_0.001percent_MeJA_P Parameter: Plant Line Value: 35A19
  misc_feature: MA Experiment 20000533 PARAMETER Experiment Name: Zm_0.001percent_MeJA_P Parameter: Timepoint (hr) Value: 72
  misc_feature: MA Experiment 20000533 PARAMETER Experiment Name: Zm_0.001percent_MeJA_P Parameter: Tissue Value: Aerial
  misc_feature: MA Experiment 20000533 PARAMETER Experiment Name: Zm_0.001percent_MeJA_P Parameter: Treatment Value: 0.001percent MeJA vs. No Treatment
  misc_feature: MA Experiment ID: 20000626 Result: Down-regulated in Transcription
  misc_feature: MA Experiment 20000626 PARAMETER Experiment Name: Zm_Herbicide-Treatments_P Parameter: Timepoint (hr) Value: 12
  misc_feature: MA Experiment 20000626 PARAMETER Experiment Name: Zm_Herbicide-Treatments_P Parameter: Tissue Value: Aerial
  misc_feature: MA Experiment 20000626 PARAMETER Experiment Name: Zm_Herbicide-Treatments_P Parameter: Treatment Value: Roundup vs. No Treatment

SEQ ID NO: 4573 - protein, 425 aa, Zea mays subsp. mays; identical to SEQ ID NO: 1734
  peptide (1)..(425): Ceres Seq. ID no. 12387135
  misc_feature (189)..(384): Pfam Name: Arabidopsis proteins of unknown function Pfam Description: Arabidopsis proteins of unknown function
  misc_feature (189)..(384): Pfam Name: Arabidopsis proteins of unknown function Pfam Description: Arabidopsis proteins of unknown function
  misc_feature (12)..(99): Homolog of NCBI NO: 6573746 NR Description: F20B24.18 [Arabidopsis thaliana]
  misc_feature (132)..(425): Homolog of NCBI NO: 6573746 NR Description: F20B24.18 [Arabidopsis thaliana]
  misc_feature (1)..(425): Homolog of NCBI NO: 25345695 NR Description: protein F26F24.22 [imported] - Arabidopsis
  misc_feature (12)..(425): Homolog of NCBI NO: 15220207 NR Description: putative carboxyl-terminal peptidase; protein id:
  misc_feature (2)..(424): Homolog of NCBI NO: 34913794 NR Description: OSJNBa0026J14.25 [Oryza sativa (japonica
  misc_feature (12)..(99): Homolog of NCBI NO: 6573746 NR Description: F20B24.18 [Arabidopsis thaliana]
  misc_feature (1)..(425): Homolog of NCBI NO: 25345695 NR Description: protein F26F24.22 [imported] - Arabidopsis
  misc_feature (2)..(424): Homolog of NCBI NO: 34913794 NR Description: OSJNBa0026J14.25 [Oryza sativa (japonica
  misc_feature (2)..(425): Homolog of NCBI NO: 21389708 NR Description: putative carboxyl-terminal proteinase [Gossypium
  misc_feature (15)..(425): Homolog of NCBI NO: 15240622 NR Description: putative protein
  misc_feature (13)..(425): Homolog of NCBI NO: 28416687 NR Description: At1g70550 [Arabidopsis thaliana]
  misc_feature (179)..(425): Homolog of NCBI NO: 15528706 NR Description: P0583G08.7 [Oryza sativa (japonica
  misc_feature (12)..(178): Homolog of NCBI NO: 15528706 NR Description: P0583G08.7 [Oryza sativa (japonica
  misc_feature (12)..(425): Homolog of NCBI NO: 15220207 NR Description: putative carboxyl-terminal peptidase; protein id:
  misc_feature (132)..(425): Homolog of NCBI NO: 6573746 NR Description: F20B24.18 [Arabidopsis thaliana]
  misc_feature (12)..(178): Homolog of NCBI NO: 15528706 NR Description: P0583G08.7 [Oryza sativa (japonica
  misc_feature (179)..(425): Homolog of NCBI NO: 15528706 NR Description: P0583G08.7 [Oryza sativa (japonica
  misc_feature (13)..(425): Homolog of NCBI NO: 28416687 NR Description: At1g70550 [Arabidopsis thaliana]
  misc_feature (15)..(425): Homolog of NCBI NO: 15240622 NR Description: putative protein
  misc_feature (2)..(425): Homolog of NCBI NO: 21389708 NR Description: putative carboxyl-terminal proteinase [Gossypium

SEQ ID NO: 4574 - protein, 414 aa, Zea mays subsp. mays; identical to SEQ ID NO: 1735
  peptide (1)..(414): Ceres Seq. ID no. 12387136
  misc_feature (178)..(373): Pfam Name: Arabidopsis proteins of unknown function Pfam Description: Arabidopsis proteins of unknown function
  misc_feature (178)..(373): Pfam Name: Arabidopsis proteins of unknown function Pfam Description: Arabidopsis proteins of unknown function
  misc_feature (1)..(88): Homolog of NCBI NO: 6573746 NR Description: F20B24.18 [Arabidopsis thaliana]
  misc_feature (121)..(414): Homolog of NCBI NO: 6573746 NR Description: F20B24.18 [Arabidopsis thaliana]
  misc_feature (1)..(414): Homolog of NCBI NO: 25345695 NR Description: protein F26F24.22 [imported] - Arabidopsis
  misc_feature (1)..(414): Homolog of NCBI NO: 15220207 NR Description: putative carboxyl-terminal peptidase; protein id:
  misc_feature (1)..(413): Homolog of NCBI NO: 34913794 NR Description: OSJNBa0026J14.25 [Oryza sativa (japonica
  misc_feature (1)..(88): Homolog of NCBI NO: 6573746 NR Description: F20B24.18 [Arabidopsis thaliana]
  misc_feature (1)..(414): Homolog of NCBI NO: 25345695 NR Description: protein F26F24.22 [imported] - Arabidopsis
  misc_feature (1)..(413): Homolog of NCBI NO: 34913794 NR Description: OSJNBa0026J14.25 [Oryza sativa (japonica
  misc_feature (1)..(414): Homolog of NCBI NO: 21389708 NR Description: putative carboxyl-terminal proteinase [Gossypium
  misc_feature (4)..(414): Homolog of NCBI NO: 15240622 NR Description: putative protein
  misc_feature (2)..(414): Homolog of NCBI NO: 28416687 NR Description: At1g70550 [Arabidopsis thaliana]
  misc_feature (168)..(414): Homolog of NCBI NO: 15528706 NR Description: P0583G08.7 [Oryza sativa (japonica
  misc_feature (1)..(167): Homolog of NCBI NO: 15528706 NR Description: P0583G08.7 [Oryza sativa (japonica
  misc_feature (1)..(414): Homolog of NCBI NO: 15220207 NR Description: putative carboxyl-terminal peptidase; protein id:
  misc_feature (121)..(414): Homolog of NCBI NO: 6573746 NR Description: F20B24.18 [Arabidopsis thaliana]
  misc_feature (1)..(167): Homolog of NCBI NO: 15528706 NR Description: P0583G08.7 [Oryza sativa (japonica
  misc_feature (168)..(414): Homolog of NCBI NO: 15528706 NR Description: P0583G08.7 [Oryza sativa (japonica
  misc_feature (2)..(414): Homolog of NCBI NO: 28416687 NR Description: At1g70550 [Arabidopsis thaliana]
  misc_feature (4)..(414): Homolog of NCBI NO: 15240622 NR Description: putative protein
  misc_feature (1)..(414): Homolog of NCBI NO: 21389708 NR Description: putative carboxyl-terminal proteinase [Gossypium

SEQ ID NO: 4575 - protein, 410 aa, Zea mays subsp. mays; identical to SEQ ID NO: 1736
  peptide (1)..(410): Ceres Seq. ID no. 12387137
  misc_feature (174)..(369): Pfam Name: Arabidopsis proteins of unknown function Pfam Description: Arabidopsis proteins of unknown function
  misc_feature (174)..(369): Pfam Name: Arabidopsis proteins of unknown function Pfam Description: Arabidopsis proteins of unknown function
  misc_feature (1)..(163): Homolog of NCBI NO: 15528706 NR Description: P0583G08.7 [Oryza sativa (japonica
  misc_feature (164)..(410): Homolog of NCBI NO: 15528706 NR Description: P0583G08.7 [Oryza sativa (japonica
  misc_feature (1)..(410): Homolog of NCBI NO: 28416687 NR Description: At1g70550 [Arabidopsis thaliana]
  misc_feature (117)..(410): Homolog of NCBI NO: 6573746 NR Description: F20B24.18 [Arabidopsis thaliana]
  misc_feature (1)..(410): Homolog of NCBI NO: 15220207 NR Description: putative carboxyl-terminal peptidase; protein id:
  misc_feature (1)..(84): Homolog of NCBI NO: 6573746 NR Description: F20B24.18 [Arabidopsis thaliana]
  misc_feature (1)..(410): Homolog of NCBI NO: 25345695 NR Description: protein F26F24.22 [imported] - Arabidopsis
  misc_feature (1)..(409): Homolog of NCBI NO: 34913794 NR Description: OSJNBa0026J14.25 [Oryza sativa (japonica
  misc_feature (1)..(410): Homolog of NCBI NO: 21389708 NR Description: putative carboxyl-terminal proteinase [Gossypium
  misc_feature (1)..(410): Homolog of NCBI NO: 15240622 NR Description: putative protein
  misc_feature (1)..(410): Homolog of NCBI NO: 28416687 NR Description: At1g70550 [Arabidopsis thaliana]
  misc_feature (164)..(410): Homolog of NCBI NO: 15528706 NR Description: P0583G08.7 [Oryza sativa (japonica
  misc_feature (1)..(163): Homolog of NCBI NO: 15528706 NR Description: P0583G08.7 [Oryza sativa (japonica
  misc_feature (1)..(410): Homolog of NCBI NO: 15220207 NR Description: putative carboxyl-terminal peptidase; protein id:
  misc_feature (117)..(410): Homolog of NCBI NO: 6573746 NR Description: F20B24.18 [Arabidopsis thaliana]
  misc_feature (1)..(409): Homolog of NCBI NO: 34913794 NR Description: OSJNBa0026J14.25 [Oryza sativa (japonica
  misc_feature (1)..(410): Homolog of NCBI NO: 25345695 NR Description: protein F26F24.22 [imported] - Arabidopsis
  misc_feature (1)..(84): Homolog of NCBI NO: 6573746 NR Description: F20B24.18 [Arabidopsis thaliana]
  misc_feature (1)..(410): Homolog of NCBI NO: 15240622 NR Description: putative protein
  misc_feature (1)..(410): Homolog of NCBI NO: 21389708 NR Description: putative carboxyl-terminal proteinase [Gossypium

SEQ ID NO: 4576 - DNA, 1337 bp, Zea mays subsp. mays
  misc_feature (1)..(1337): Ceres Seq. ID no. 13499111
  misc_feature: MA Experiment ID: 108504 Result: Down-regulated in Transcription
  misc_feature: MA Experiment 108504 PARAMETER Experiment Name: Zm_Drought_P Parameter: Age (day) Value: 8
  misc_feature: MA Experiment 108504 PARAMETER Experiment Name: Zm_Drought_P Parameter: Organism Value: Zea mays
  misc_feature: MA Experiment 108504 PARAMETER Experiment Name: Zm_Drought_P Parameter: Plant Line Value: 35A19
  misc_feature: MA Experiment 108504 PARAMETER Experiment Name: Zm_Drought_P Parameter: Timepoint (hr) Value: 12
  misc_feature: MA Experiment 108504 PARAMETER Experiment Name: Zm_Drought_P Parameter: Tissue Value: Aerial
  misc_feature: MA Experiment 108504 PARAMETER Experiment Name: Zm_Drought_P Parameter: Treatment Value: Drought vs. No Drought
  misc_feature: MA Experiment ID: 108523 Result: Down-regulated in Transcription
  misc_feature: MA Experiment 108523 PARAMETER Experiment Name: Zm_42deg_Heat_P Parameter: Age (day) Value: 8
  misc_feature: MA Experiment 108523 PARAMETER Experiment Name: Zm_42deg_Heat_P Parameter: Organism Value: Zea mays
  misc_feature: MA Experiment 108523 PARAMETER Experiment Name: Zm_42deg_Heat_P Parameter: Plant Line Value: 35A19
  misc_feature: MA Experiment 108523 PARAMETER Experiment Name: Zm_42deg_Heat_P Parameter: Temperature (deg C) Value: 42 vs. 22
  misc_feature: MA Experiment 108523 PARAMETER Experiment Name: Zm_42deg_Heat_P Parameter: Timepoint (hr) Value: 6
  misc_feature: MA Experiment 108523 PARAMETER Experiment Name: Zm_42deg_Heat_P Parameter: Tissue Value: Aerial
  misc_feature: MA Experiment ID: 108527 Result: Down-regulated in Transcription
  misc_feature: MA Experiment 108527 PARAMETER Experiment Name: Zm_5mM_NO_P Parameter: Age (day) Value: 8
  misc_feature: MA Experiment 108527 PARAMETER Experiment Name: Zm_5mM_NO_P Parameter: Organism Value: Zea mays
  misc_feature: MA Experiment 108527 PARAMETER Experiment Name: Zm_5mM_NO_P Parameter: Plant Line Value: 35A19
  misc_feature: MA Experiment 108527 PARAMETER Experiment Name: Zm_5mM_NO_P Parameter: Timepoint (hr) Value: 6
  misc_feature: MA Experiment 108527 PARAMETER Experiment Name: Zm_5mM_NO_P Parameter: Tissue Value: Aerial
  misc_feature: MA Experiment 108527 PARAMETER Experiment Name: Zm_5mM_NO_P Parameter: Treatment Value: 5mM NO vs. No Treatment
  misc_feature: MA Experiment ID: 108529 Result: Down-regulated in Transcription
  misc_feature: MA Experiment 108529 PARAMETER Experiment Name: Zm_Imbibed_Seeds_P Parameter: Age (day) Value: 5 vs. 2
  misc_feature: MA Experiment 108529 PARAMETER Experiment Name: Zm_Imbibed_Seeds_P Parameter: Organism Value: Zea mays
  misc_feature: MA Experiment 108529 PARAMETER Experiment Name: Zm_Imbibed_Seeds_P Parameter: Plant Line Value: 35A19
  misc_feature: MA Experiment 108529 PARAMETER Experiment Name: Zm_Imbibed_Seeds_P Parameter: Tissue Value: Roots vs. Embryo
  misc_feature: MA Experiment ID: 108535 Result: Up-regulated in Transcription
  misc_feature: MA Experiment 108535 PARAMETER Experiment Name: Zm_Meristem_P Parameter: Age (day) Value: 8
  misc_feature: MA Experiment 108535 PARAMETER Experiment Name: Zm_Meristem_P Parameter: Organism Value: Zea mays
  misc_feature: MA Experiment 108535 PARAMETER Experiment Name: Zm_Meristem_P Parameter: Plant Line Value: 35A19
  misc_feature: MA Experiment 108535 PARAMETER Experiment Name: Zm_Meristem_P Parameter: Tissue Value: Root Meristem vs. Above Root Meristem
  misc_feature: MA Experiment ID: 108536 Result: Down-regulated in Transcription
  misc_feature: MA Experiment 108536 PARAMETER Experiment Name: Zm_Meristem_P Parameter: Age (day) Value: 8
  misc_feature: MA Experiment 108536 PARAMETER Experiment Name: Zm_Meristem_P Parameter: Organism Value: Zea mays
  misc_feature: MA Experiment 108536 PARAMETER Experiment Name: Zm_Meristem_P Parameter: Plant Line Value: 35A19
  misc_feature: MA Experiment 108536 PARAMETER Experiment Name: Zm_Meristem_P Parameter: Tissue Value: Shoot Meristem vs. Above Shoot Meristem
  misc_feature: MA Experiment ID: 108543 Result: Up-regulated in Transcription
  misc_feature: MA Experiment ID: 108556 Result: Down-regulated in Transcription
  misc_feature: MA Experiment 108556 PARAMETER Experiment Name: Zm_Drought_P Parameter: Age (day) Value: 9
  misc_feature: MA Experiment 108556 PARAMETER Experiment Name: Zm_Drought_P Parameter: Organism Value: Zea mays
  misc_feature: MA Experiment 108556 PARAMETER Experiment Name: Zm_Drought_P Parameter: Plant Line Value: 35A19
  misc_feature: MA Experiment 108556 PARAMETER Experiment Name: Zm_Drought_P Parameter: Timepoint (hr) Value: 24
  misc_feature: MA Experiment 108556 PARAMETER Experiment Name: Zm_Drought_P Parameter: Tissue Value: Aerial
  misc_feature: MA Experiment 108556 PARAMETER Experiment Name: Zm_Drought_P Parameter: Treatment Value: Drought vs. No Drought
  misc_feature: MA Experiment ID: 108597 Result: Down-regulated in Transcription
  misc_feature: MA Experiment 108597 PARAMETER Experiment Name: Zm_100uM_ABA_P Parameter: Age (day) Value: 9
  misc_feature: MA Experiment 108597 PARAMETER Experiment Name: Zm_100uM_ABA_P Parameter: Organism Value: Zea mays
  misc_feature: MA Experiment 108597 PARAMETER Experiment Name: Zm_100uM_ABA_P Parameter: Plant Line Value: 35A19
  misc_feature: MA Experiment 108597 PARAMETER Experiment Name: Zm_100uM_ABA_P Parameter: Timepoint (hr) Value: 24
  misc_feature: MA Experiment 108597 PARAMETER Experiment Name: Zm_100uM_ABA_P Parameter: Tissue Value: Aerial
  misc_feature: MA Experiment 108597 PARAMETER Experiment Name: Zm_100uM_ABA_P Parameter: Treatment Value: 100uM ABA vs. No Treatment
  misc_feature: MA Experiment ID: 108687 Result: Down-regulated in Transcription
  misc_feature: MA Experiment 108687 PARAMETER Experiment Name: Zm_Embryos-Flowers__P Parameter: Tissue Value: Embryo vs. Aerial+
  misc_feature: MA Experiment ID: 20000477 Result: Down-regulated in Transcription
  misc_feature: MA Experiment 20000477 PARAMETER Experiment Name: Zm_5mM_SA_P Parameter: Age (day) Value: 10
  misc_feature: MA Experiment 20000477 PARAMETER Experiment Name: Zm_5mM_SA_P Parameter: Organism Value: Zea mays
  misc_feature: MA Experiment 20000477 PARAMETER Experiment Name: Zm_5mM_SA_P Parameter: Plant Line Value: 35A19
  misc_feature: MA Experiment 20000477 PARAMETER Experiment Name: Zm_5mM_SA_P Parameter: Timepoint (hr) Value: 48
  misc_feature: MA Experiment 20000477 PARAMETER Experiment Name: Zm_5mM_SA_P Parameter: Tissue Value: Aerial
  misc_feature: MA Experiment 20000477 PARAMETER Experiment Name: Zm_5mM_SA_P Parameter: Treatment Value: 5mM SA vs. No Treatment
  misc_feature: MA Experiment ID: 20000478 Result: Down-regulated in Transcription
  misc_feature: MA Experiment 20000478 PARAMETER Experiment Name: Zm_5mM_SA_P Parameter: Age (day) Value: 11
  misc_feature: MA Experiment 20000478 PARAMETER Experiment Name: Zm_5mM_SA_P Parameter: Organism Value: Zea mays
  misc_feature: MA Experiment 20000478 PARAMETER Experiment Name: Zm_5mM_SA_P Parameter: Plant Line Value: 35A19
  misc_feature: MA Experiment 20000478 PARAMETER Experiment Name: Zm_5mM_SA_P Parameter: Timepoint (hr) Value: 72
  misc_feature: MA Experiment 20000478 PARAMETER Experiment Name: Zm_5mM_SA_P Parameter: Tissue Value: Aerial
  misc_feature: MA Experiment 20000478 PARAMETER Experiment Name: Zm_5mM_SA_P Parameter: Treatment Value: 5mM SA vs. No Treatment
  misc_feature: MA Experiment ID: 20000479 Result: Down-regulated in Transcription
  misc_feature: MA Experiment 20000479 PARAMETER Experiment Name: Zm_Drought_P Parameter: Age (day) Value: 10
  misc_feature: MA Experiment 20000479 PARAMETER Experiment Name: Zm_Drought_P Parameter: Organism Value: Zea mays
  misc_feature: MA Experiment 20000479 PARAMETER Experiment Name: Zm_Drought_P Parameter: Plant Line Value: 35A19
  misc_feature: MA Experiment 20000479 PARAMETER Experiment Name: Zm_Drought_P Parameter: Timepoint (hr) Value: 48
  misc_feature: MA Experiment 20000479 PARAMETER Experiment Name: Zm_Drought_P Parameter: Tissue Value: Aerial
  misc_feature: MA Experiment 20000479 PARAMETER Experiment Name: Zm_Drought_P Parameter: Treatment Value: Drought vs. No Drought
  misc_feature: MA Experiment ID: 20000480 Result: Down-regulated in Transcription
  misc_feature: MA Experiment 20000480 PARAMETER Experiment Name: Zm_Drought_P Parameter: Age (day) Value: 11
  misc_feature: MA Experiment 20000480 PARAMETER Experiment Name: Zm_Drought_P Parameter: Organism Value: Zea mays
  misc_feature: MA Experiment 20000480 PARAMETER Experiment Name: Zm_Drought_P Parameter: Plant Line Value: 35A19
  misc_feature: MA Experiment 20000480 PARAMETER Experiment Name: Zm_Drought_P Parameter: Timepoint (hr) Value: 72
  misc_feature: MA Experiment 20000480 PARAMETER Experiment Name: Zm_Drought_P Parameter: Tissue Value: Aerial
  misc_feature: MA Experiment 20000480 PARAMETER Experiment Name: Zm_Drought_P Parameter: Treatment Value: Drought vs. No Drought
  misc_feature: MA Experiment ID: 20000488 Result: Down-regulated in Transcription
  misc_feature: MA Experiment 20000488 PARAMETER Experiment Name: Zm_50mM_NH4NO3_L_to_H_P Parameter: Organism Value: Zea mays
  misc_feature: MA Experiment 20000488 PARAMETER Experiment Name: Zm_50mM_NH4NO3_L_to_H_P Parameter: Timepoint (hr) Value: 8
  misc_feature: MA Experiment 20000488 PARAMETER Experiment Name: Zm_50mM_NH4NO3_L_to_H_P Parameter: Tissue Value: Leaves
  misc_feature: MA Experiment 20000488 PARAMETER Experiment Name: Zm_50mM_NH4NO3_L_to_H_P Parameter: Treatment Value: 50mM NH4NO3 vs. 100mM Mannitol
  misc_feature: MA Experiment ID: 20000626 Result: Down-regulated in Transcription
  misc_feature: MA Experiment 20000626 PARAMETER Experiment Name: Zm_Herbicide-Treatments_P Parameter: Timepoint (hr) Value: 12
  misc_feature: MA Experiment 20000626 PARAMETER Experiment Name: Zm_Herbicide-Treatments_P Parameter: Tissue Value: Aerial
  misc_feature: MA Experiment 20000626 PARAMETER Experiment Name: Zm_Herbicide-Treatments_P Parameter: Treatment Value: Roundup vs. No Treatment
gcacgagaccattacctagaacatcctaatcgaaaaatgtcatttgacagcgcaacacggcgctgcagggtaaagatctcccccgctcgccggtctctctgcccaggccagcaggacgaagaagaagccggccgggaagacccaggcctgaccgcctgagctaggggagaggaggacgacgatggggctgctgtctcagcgggtggagcggtcggagatggagcccggcgaccacatctacacctggcgcgccggctacacctactcccaccacgggatttacgtcggcggcagcaaggtggtgcacttcacgcggaagagggaggcgggcggcgcgggtctggactcggccatcgccgtgtccagcctcctcctctcgcggggctcggacgagtgccccagcttcccggactgcggcttccagctccccgacagcggcgtggtgctgacctgcgtggactgcttcctcggcggcggcgcgctgcaccgctnngagtacggcgtgcccgccgcggcgttcctggccaaggtccgcgggggcacgtccaccacggcgcgcgccgacccgggcgacgccgccgtgcgccgcgccatgcacctcctccggcacggcttcggcgactacgacgtgttcgagaacaactgcgaggacttcgcgctctactgcaagacggggctcctgctcctccccgccgccgcggctggcggcggggtcgggaggagcgggcaggccgcggccgccctcggcgtgccgctggccgcgctcttctccaccccgttcaagctcgtggccgccggcccgctcggcatggccgccgtcaccgcgggcgtgtactgcgccggcaggtacgtcaccgacatcggggtgaggacggacgtggtgaaggtggaggtgaaggacctgtcggcgcacctcggctggcgccgcgccagggctcaggagaagaagaagaagcagcagcaggaggaggcgccggcggcggccaagagcttgcttccgctcaagcggaaacgggagacctgcgtttgattggcgtgcggttgcaaatagatttgatttcttcgtctttagttactgcatagaaattaataagcccgatatagatagatatatgtcctagcgttcttgcccgatgccccgatcgatattgttcgttgttctttgtacgtactctgtatcattctaagagtttcagttactcctacatacattcttcattactgcaacaagatagttgagaacacagttgttaattgagctgagctgtacgtctcgtactgttccacaatagaatgcgaaggcatgcatgaggtccacgacatttggtccatttctg

SEQ ID NO: 4577 - protein, 282 aa, Zea mays subsp. mays
  peptide (1)..(282): Ceres Seq. ID no. 13499112
  misc_feature (105)..(186): Pfam Name: NC domain Pfam Description: NC domain
  misc_feature (1)..(243): Homolog of NCBI NO: 21594170 NR Description: unknown [Arabidopsis thaliana]
  misc_feature (1)..(243): Homolog of NCBI NO: 18396282 NR Description: expressed protein [Arabidopsis thaliana]
  misc_feature (1)..(245): Homolog of NCBI NO: 18415178 NR Description: expressed protein [Arabidopsis thaliana]
  misc_feature (1)..(210): Homolog of NCBI NO: 15237327 NR Description: hypothetical protein [Arabidopsis thaliana]
  misc_feature (197)..(256): Homolog of NCBI NO: 15237330 NR Description: expressed protein [Arabidopsis thaliana]
  misc_feature (1)..(190): Homolog of NCBI NO: 15237330 NR Description: expressed protein [Arabidopsis thaliana]
  misc_feature (32)..(245): Homolog of NCBI NO: 9758417 NR Description: gb|AAF32477.1~gene_id:MHF15.11~similar to unknown
  misc_feature (1)..(255): Homolog of NCBI NO: 22328196 NR Description: expressed protein [Arabidopsis thaliana]
  misc_feature (1)..(264): Homolog of NCBI NO: 21592684 NR Description: unknown [Arabidopsis thaliana]
  misc_feature (1)..(264): Homolog of NCBI NO: 18378812 NR Description: expressed protein [Arabidopsis thaliana]
  misc_feature (104)..(104): Xaa is any aa, unknown or other
MGLLSQRVERSEMEPGDHIYTWRAGYTYSHHGIYVGGSKVVHFTRKREAGGAGLDSAIAVSSLLLSRGSDECPSFPDCGFQLPDSGVVLTCVDCFLGGGALHRXEYGVPAAAFLAKVRGGTSTTARADPGDAAVRRAMHLLRHGFGDYDVFENNCEDFALYCKTGLLLLPAAAAGGGVGRSGQAAAALGVPLAALFSTPFKLVAAGPLGMAAVTAGVYCAGRYVTDIGVRTDVVKVEVKDLSAHLGWRRARAQEKKKKQQQEEAPAAAKSLLPLKRKRETCV

SEQ ID NO: 4578 - protein, 270 aa, Zea mays subsp. mays
  peptide (1)..(270): Ceres Seq. ID no. 13499113
  misc_feature (93)..(174): Pfam Name: NC domain Pfam Description: NC domain
  misc_feature (1)..(198): Homolog of NCBI NO: 15237327 NR Description: hypothetical protein [Arabidopsis thaliana]
  misc_feature (20)..(233): Homolog of NCBI NO: 9758417 NR Description: gb|AAF32477.1~gene_id:MHF15.11~similar to unknown
  misc_feature (185)..(244): Homolog of NCBI NO: 15237330 NR Description: expressed protein [Arabidopsis thaliana]
  misc_feature (1)..(178): Homolog of NCBI NO: 15237330 NR Description: expressed protein [Arabidopsis thaliana]
  misc_feature (1)..(231): Homolog of NCBI NO: 21594170 NR Description: unknown [Arabidopsis thaliana]
  misc_feature (1)..(231): Homolog of NCBI NO: 18396282 NR Description: expressed protein [Arabidopsis thaliana]
  misc_feature (1)..(233): Homolog of NCBI NO: 18415178 NR Description: expressed protein [Arabidopsis thaliana]
  misc_feature (1)..(243): Homolog of NCBI NO: 22328196 NR Description: expressed protein [Arabidopsis thaliana]
  misc_feature (1)..(252): Homolog of NCBI NO: 21592684 NR Description: unknown [Arabidopsis thaliana]
  misc_feature (1)..(252): Homolog of NCBI NO: 18378812 NR Description: expressed protein [Arabidopsis thaliana]
  misc_feature (92)..(92): Xaa is any aa, unknown or other
MEPGDHIYTWRAGYTYSHHGIYVGGSKVVHFTRKREAGGAGLDSAIAVSSLLLSRGSDECPSFPDCGFQLPDSGVVLTCVDCFLGGGALHRXEYGVPAAAFLAKVRGGTSTTARADPGDAAVRRAMHLLRHGFGDYDVFENNCEDFALYCKTGLLLLPAAAAGGGVGRSGQAAAALGVPLAALFSTPFKLVAAGPLGMAAVTAGVYCAGRYVTDIGVRTDVVKVEVKDLSAHLGWRRARAQEKKKKQQQEEAPAAAKSLLPLKRKRETCV

SEQ ID NO: 4579 - protein, 145 aa, Zea mays subsp. mays
  peptide (1)..(145): Ceres Seq. ID no. 13499114
  misc_feature (1)..(73): Homolog of NCBI NO: 15237327 NR Description: hypothetical protein [Arabidopsis thaliana]
  misc_feature (1)..(108): Homolog of NCBI NO: 9758417 NR Description: gb|AAF32477.1~gene_id:MHF15.11~similar to unknown
  misc_feature (60)..(119): Homolog of NCBI NO: 15237330 NR Description: expressed protein [Arabidopsis thaliana]
  misc_feature (1)..(53): Homolog of NCBI NO: 15237330 NR Description: expressed protein [Arabidopsis thaliana]
  misc_feature (1)..(106): Homolog of NCBI NO: 21594170 NR Description: unknown [Arabidopsis thaliana]
  misc_feature (1)..(106): Homolog of NCBI NO: 18396282 NR Description: expressed protein [Arabidopsis thaliana]
  misc_feature (1)..(108): Homolog of NCBI NO: 18415178 NR Description: expressed protein [Arabidopsis thaliana]
  misc_feature (1)..(118): Homolog of NCBI NO: 22328196 NR Description: expressed protein [Arabidopsis thaliana]
  misc_feature (1)..(127): Homolog of NCBI NO: 21592684 NR Description: unknown [Arabidopsis thaliana]
  misc_feature (1)..(127): Homolog of NCBI NO: 18378812 NR Description: expressed protein [Arabidopsis thaliana]
MHLLRHGFGDYDVFENNCEDFALYCKTGLLLLPAAAAGGGVGRSGQAAAALGVPLAALFSTPFKLVAAGPLGMAAVTAGVYCAGRYVTDIGVRTDVVKVEVKDLSAHLGWRRARAQEKKKKQQQEEAPAAAKSLLPLKRKRETCV

SEQ ID NO: 4580 - DNA, 890 bp, Zea mays subsp. mays
  misc_feature (1)..(890): Ceres Seq. ID no. 12387086
  misc_feature: MA Experiment ID: 108522 Result: Down-regulated in Transcription
  misc_feature: MA Experiment 108522 PARAMETER Experiment Name: Zm_42deg_Heat_P Parameter: Age (day) Value: 8
  misc_feature: MA Experiment 108522 PARAMETER Experiment Name: Zm_42deg_Heat_P Parameter: Organism Value: Zea mays
  misc_feature: MA Experiment 108522 PARAMETER Experiment Name: Zm_42deg_Heat_P Parameter: Plant Line Value: 35A19
  misc_feature: MA Experiment 108522 PARAMETER Experiment Name: Zm_42deg_Heat_P Parameter: Temperature (deg C) Value: 42 vs. 22
  misc_feature: MA Experiment 108522 PARAMETER Experiment Name: Zm_42deg_Heat_P Parameter: Timepoint (hr) Value: 1
  misc_feature: MA Experiment 108522 PARAMETER Experiment Name: Zm_42deg_Heat_P Parameter: Tissue Value: Aerial
  misc_feature: MA Experiment ID: 108523 Result: Down-regulated in Transcription
  misc_feature: MA Experiment 108523 PARAMETER Experiment Name: Zm_42deg_Heat_P Parameter: Age (day) Value: 8
  misc_feature: MA Experiment 108523 PARAMETER Experiment Name: Zm_42deg_Heat_P Parameter: Organism Value: Zea mays
  misc_feature: MA Experiment 108523 PARAMETER Experiment Name: Zm_42deg_Heat_P Parameter: Plant Line Value: 35A19
  misc_feature: MA Experiment 108523 PARAMETER Experiment Name: Zm_42deg_Heat_P Parameter: Temperature (deg C) Value: 42 vs. 22
  misc_feature: MA Experiment 108523 PARAMETER Experiment Name: Zm_42deg_Heat_P Parameter: Timepoint (hr) Value: 6
  misc_feature: MA Experiment 108523 PARAMETER Experiment Name: Zm_42deg_Heat_P Parameter: Tissue Value: Aerial
  misc_feature: MA Experiment ID: 108544 Result: Up-regulated in Transcription
aaaaaatgacttttttgttgtctgatctaatgggaatgtacggaatctcgtctcccatctcgcacttgagttgagactactgttgtgactattgtgtgcgtgagagagaaacagaagaggaaaaggaatccatggcggcgacgctggcgaggagggcggggcgctccgcggcgacgacgctatggggcgcggcgaggggcttcgcatcggtggggtccgacatcgtctctgcggctcccggcgtgtcgctgcagaaggcgcggtcctgggacgagggcgtcgccaccaagttctctaccacgcctctcaaggacatcttctacgggaagaaggtggtcatcttcggcttgcccggtgcatatacaggggtttgttcacaagcgcacgttcctagttacaagaagaatattgacaagttgaaagcaaaaggaatcgactctgttatctgtgtagctgtgaatgatccgtatgtcctggatggatgggcaaaaaagctagacgctaaagatacaattgagttctatggtgactttgatgggagtttccacaaaagcttggatttggagatagacctttctgctgctttgcttggccgccgttctcacaggtggtccgcctttgttgacgatggtaagatcaagtctttcaatgttgaggaagcaccgtccgactttaaggtttctggtgcggaggtgatcttggaccagatctgagctcctcaatgaacttcggccatcttcagtttgtgcggcatacttcctctgcagcagccgaataaaattaaatctcttacgacccgtgtaagatgttaaagatacgatgcgccccagactgtatggcctcggcctcggtttttctggaatgaattgatcagtgttcactgtgtgcgt

SEQ ID NO: 4581 - protein, 193 aa, Zea mays subsp. mays
  peptide (1)..(193): Ceres Seq. ID no. 12387087
  misc_feature (31)..(191): Pfam Name: AhpC/TSA family Pfam Description: AhpC/TSA family
  misc_feature (31)..(191): Pfam Name: AhpC/TSA family Pfam Description: AhpC/TSA family
  misc_feature (61)..(193): Homolog of NCBI NO: 27376428 NR Description: peroxiredoxin [Bradyrhizobium japonicum]
  misc_feature (58)..(190): Homolog of NCBI NO: 27367181 NR Description: Peroxiredoxin [Vibrio vulnificus CMCP6]
  misc_feature (56)..(191): Homolog of NCBI NO: 15964668 NR Description: HYPOTHETICAL PEROXIREDOXIN PROTEIN [Sinorhizobium
  misc_feature (62)..(193): Homolog of NCBI NO: 15888122 NR Description: AGR_C_1423p [Agrobacterium tumefaciens]
  misc_feature (48)..(193): Homolog of NCBI NO: 23501379 NR Description: ahpC/TSA family protein [Brucella suis 1330]
  misc_feature (61)..(193): Homolog of NCBI NO: 27376428 NR Description: peroxiredoxin [Bradyrhizobium japonicum]
  misc_feature (56)..(191): Homolog of NCBI NO: 15964668 NR Description: HYPOTHETICAL PEROXIREDOXIN PROTEIN [Sinorhizobium
  misc_feature (48)..(193): Homolog of NCBI NO: 23501379 NR Description: ahpC/TSA family protein [Brucella suis 1330]
  misc_feature (1)..(193): Homolog of NCBI NO: 34903114 NR Description: unnamed protein product [Oryza sativa (japonica
  misc_feature (11)..(193): Homolog of NCBI NO: 7658343 NR Description: unknown protein; 13384-11892 [Arabidopsis
  misc_feature (11)..(193): Homolog of NCBI NO: 18397457 NR Description: expressed protein
  misc_feature (6)..(193): Homolog of NCBI NO: 21553531 NR Description: unknown [Arabidopsis thaliana]
  misc_feature (48)..(193): Homolog of NCBI NO: 17987739 NR Description: THIOL PEROXIDASE [Brucella melitensis]
  misc_feature (62)..(193): Homolog of NCBI NO: 15888122 NR Description: AGR_C_1423p [Agrobacterium tumefaciens]
  misc_feature (58)..(190): Homolog of NCBI NO: 27367181 NR Description: Peroxiredoxin [Vibrio vulnificus CMCP6]
  misc_feature (48)..(193): Homolog of NCBI NO: 17987739 NR Description: THIOL PEROXIDASE [Brucella melitensis]
  misc_feature (6)..(193): Homolog of NCBI NO: 21553531 NR Description: unknown [Arabidopsis thaliana]
  misc_feature (11)..(193): Homolog of NCBI NO: 18397457 NR Description: expressed protein
  misc_feature (11)..(193): Homolog of NCBI NO: 7658343 NR Description: unknown protein; 13384-11892 [Arabidopsis
  misc_feature (1)..(193): Homolog of NCBI NO: 34903114 NR Description: unnamed protein product [Oryza sativa (japonica
MAATLARRAGRSAATTLWGAARGFASVGSDIVSAAPGVSLQKARSWDEGVATKFSTTPLKDIFYGKKVVIFGLPGAYTGVCSQAHVPSYKKNIDKLKAKGIDSVICVAVNDPYVLDGWAKKLDAKDTIEFYGDFDGSFHKSLDLEIDLSAALLGRRSHRWSAFVDDGKIKSFNVEEAPSDFKVSGAEVILDQI

SEQ ID NO: 4582 - DNA, 1666 bp, Zea mays subsp. mays
  misc_feature (1)..(1666): Ceres Seq. ID no. 12409899
  misc_feature: MA Experiment ID: 108535 Result: Up-regulated in Transcription
  misc_feature: MA Experiment 108535 PARAMETER Experiment Name: Zm_Meristem_P Parameter: Age (day) Value: 8
  misc_feature: MA Experiment 108535 PARAMETER Experiment Name: Zm_Meristem_P Parameter: Organism Value: Zea mays
  misc_feature: MA Experiment 108535 PARAMETER Experiment Name: Zm_Meristem_P Parameter: Plant Line Value: 35A19
  misc_feature: MA Experiment 108535 PARAMETER Experiment Name: Zm_Meristem_P Parameter: Tissue Value: Root Meristem vs. Above Root Meristem
  misc_feature: MA Experiment ID: 108544 Result: Down-regulated in Transcription
  misc_feature: MA Experiment ID: 108556 Result: Down-regulated in Transcription
  misc_feature: MA Experiment 108556 PARAMETER Experiment Name: Zm_Drought_P Parameter: Age (day) Value: 9
  misc_feature: MA Experiment 108556 PARAMETER Experiment Name: Zm_Drought_P Parameter: Organism Value: Zea mays
  misc_feature: MA Experiment 108556 PARAMETER Experiment Name: Zm_Drought_P Parameter: Plant Line Value: 35A19
  misc_feature: MA Experiment 108556 PARAMETER Experiment Name: Zm_Drought_P Parameter: Timepoint (hr) Value: 24
  misc_feature: MA Experiment 108556 PARAMETER Experiment Name: Zm_Drought_P Parameter: Tissue Value: Aerial
  misc_feature: MA Experiment 108556 PARAMETER Experiment Name: Zm_Drought_P Parameter: Treatment Value: Drought vs. No Drought
  misc_feature: MA Experiment ID: 108689 Result: Up-regulated in Transcription
  misc_feature: MA Experiment 108689 PARAMETER Experiment Name: Zm_Drought_Roots_P Parameter: Age (day) Value: 9
  misc_feature: MA Experiment 108689 PARAMETER Experiment Name: Zm_Drought_Roots_P Parameter: Organism Value: Zea mays
  misc_feature: MA Experiment 108689 PARAMETER Experiment Name: Zm_Drought_Roots_P Parameter: Plant Line Value: 35A19
  misc_feature: MA Experiment 108689 PARAMETER Experiment Name: Zm_Drought_Roots_P Parameter: Timepoint (hr) Value: 24
  misc_feature: MA Experiment 108689 PARAMETER Experiment Name: Zm_Drought_Roots_P Parameter: Tissue Value: Roots
  misc_feature: MA Experiment 108689 PARAMETER Experiment Name: Zm_Drought_Roots_P Parameter: Treatment Value: Drought vs. No Drought
  misc_feature: MA Experiment ID: 20000477 Result: Down-regulated in Transcription
  misc_feature: MA Experiment 20000477 PARAMETER Experiment Name: Zm_5mM_SA_P Parameter: Age (day) Value: 10
  misc_feature: MA Experiment 20000477 PARAMETER Experiment Name: Zm_5mM_SA_P Parameter: Organism Value: Zea mays
  misc_feature: MA Experiment 20000477 PARAMETER Experiment Name: Zm_5mM_SA_P Parameter: Plant Line Value: 35A19
  misc_feature: MA Experiment 20000477 PARAMETER Experiment Name: Zm_5mM_SA_P Parameter: Timepoint (hr) Value: 48
  misc_feature: MA Experiment 20000477 PARAMETER Experiment Name: Zm_5mM_SA_P Parameter: Tissue Value: Aerial
  misc_feature: MA Experiment 20000477 PARAMETER Experiment Name: Zm_5mM_SA_P Parameter: Treatment Value: 5mM SA vs. No Treatment
  misc_feature: MA Experiment ID: 20000478 Result: Down-regulated in Transcription
  misc_feature: MA Experiment 20000478 PARAMETER Experiment Name: Zm_5mM_SA_P Parameter: Age (day) Value: 11
  misc_feature: MA Experiment 20000478 PARAMETER Experiment Name: Zm_5mM_SA_P Parameter: Organism Value: Zea mays
  misc_feature: MA Experiment 20000478 PARAMETER Experiment Name: Zm_5mM_SA_P Parameter: Plant Line Value: 35A19
  misc_feature: MA Experiment 20000478 PARAMETER Experiment Name: Zm_5mM_SA_P Parameter: Timepoint (hr) Value: 72
  misc_feature: MA Experiment 20000478 PARAMETER Experiment Name: Zm_5mM_SA_P Parameter: Tissue Value: Aerial
  misc_feature: MA Experiment 20000478 PARAMETER Experiment Name: Zm_5mM_SA_P Parameter: Treatment Value: 5mM SA vs. No Treatment
  misc_feature: MA Experiment ID: 20000479 Result: Down-regulated in Transcription
  misc_feature: MA Experiment 20000479 PARAMETER Experiment Name: Zm_Drought_P Parameter: Age (day) Value: 10
  misc_feature: MA Experiment 20000479 PARAMETER Experiment Name: Zm_Drought_P Parameter: Organism Value: Zea mays
  misc_feature: MA Experiment 20000479 PARAMETER Experiment Name: Zm_Drought_P Parameter: Plant Line Value: 35A19
  misc_feature: MA Experiment 20000479 PARAMETER Experiment Name: Zm_Drought_P Parameter: Timepoint (hr) Value: 48
  misc_feature: MA Experiment 20000479 PARAMETER Experiment Name: Zm_Drought_P Parameter: Tissue Value: Aerial
  misc_feature: MA Experiment 20000479 PARAMETER Experiment Name: Zm_Drought_P Parameter: Treatment Value: Drought vs. No Drought
  misc_feature: MA Experiment ID: 20000480 Result: Down-regulated in Transcription
  misc_feature: MA Experiment 20000480 PARAMETER Experiment Name: Zm_Drought_P Parameter: Age (day) Value: 11
  misc_feature: MA Experiment 20000480 PARAMETER Experiment Name: Zm_Drought_P Parameter: Organism Value: Zea mays
  misc_feature: MA Experiment 20000480 PARAMETER Experiment Name: Zm_Drought_P Parameter: Plant Line Value: 35A19
  misc_feature: MA Experiment 20000480 PARAMETER Experiment Name: Zm_Drought_P Parameter: Timepoint (hr) Value: 72
  misc_feature: MA Experiment 20000480 PARAMETER Experiment Name: Zm_Drought_P Parameter: Tissue Value: Aerial
  misc_feature: MA Experiment 20000480 PARAMETER Experiment Name: Zm_Drought_P Parameter: Treatment Value: Drought vs. No Drought
  misc_feature: MA Experiment ID: 20000535 Result: Up-regulated in Transcription
  misc_feature: MA Experiment 20000535 PARAMETER Experiment Name: Zm_Hybrid_Seed_Dev_P Parameter: DAP Value: 30 vs. 12
  misc_feature: MA Experiment 20000535 PARAMETER Experiment Name: Zm_Hybrid_Seed_Dev_P Parameter: Organism Value: Zea mays
  misc_feature: MA Experiment 20000535 PARAMETER Experiment Name: Zm_Hybrid_Seed_Dev_P Parameter: Plant Line Value: 35A19
  misc_feature: MA Experiment 20000535 PARAMETER Experiment Name: Zm_Hybrid_Seed_Dev_P Parameter: Tissue Value: Embryo vs. Unfert Floret
  misc_feature: MA Experiment ID: 20001610 Result: Up-regulated in Transcription
  misc_feature: MA Experiment 20001610 PARAMETER Experiment Name: Zm_50ppm_KNO3_L-to-H_P Parameter: Age (day) Value: 19
  misc_feature: MA Experiment 20001610 PARAMETER Experiment Name: Zm_50ppm_KNO3_L-to-H_P Parameter: Organism Value: Zea mays
  misc_feature: MA Experiment 20001610 PARAMETER Experiment Name: Zm_50ppm_KNO3_L-to-H_P Parameter: Plant Line Value: 35A19
  misc_feature: MA Experiment 20001610 PARAMETER Experiment Name: Zm_50ppm_KNO3_L-to-H_P Parameter: Timepoint (hr) Value: 2
  misc_feature: MA Experiment 20001610 PARAMETER Experiment Name: Zm_50ppm_KNO3_L-to-H_P Parameter: Tissue Value: Roots
  misc_feature: MA Experiment 20001610 PARAMETER Experiment Name: Zm_50ppm_KNO3_L-to-H_P Parameter: Treatment Value: 50ppm KNO3 vs. 50ppm KCl
tttttttgtttggatgagatcgctgcaacattgttcttgatccacacttgcctgatcttaccgtctcgttcgtgttcgtgccagcaaccagcgaaaatgggtgccggaggcaggatgaccgagaaggagcgggagaagcatgagcaggagcaggtcgcccgtgctaccggcggtggcgcggcagtgcagcggtcgccggtggagaagccgccgttcacgttggggcagatcaagaaggcgatcccgccgcactgcttcgagcgctccgtgctgaggtccttctcgtacgtggcccacgacctgtcgctcgccgcggcgctcctctacctcgcggtggccgtgataccggcgctaccctgcccgctccgctacgcggcctggccgctgtactgggtggcccaggggtgcgtgtgcacgggcgtgtgggtgatcgcgcacgagtgcggccaccacgccttctccgaccacgcgctcctggacgacgccgtcggcctggcgctgcactcggcgctgctggtgccctacttctcgtggaagtacagccaccggcgccaccactccaacacggggtccctggagcgcgacgaggtgttcgtgccgaggaccaaggaggcgctgccgtggtacgccccgtacgtgcacggcagccccgcgggccggctggcgcacgtcgccgtgcagctcaccctgggctggccgctgtacctggccaccaacgcgtcggggcgcccgtacccgcgcttcgcctgccacttcgacccctacggcccgatctacggcgaccgggagcgcgcccagatcttcgtctcggacgccggcgtcgcggccgtggcgttcgggctgtacaagctggcggcggcgttcgggctctggtgggtggtgcgcgtgtacgccgtgcccgctgctgatcgtcaacgcgtggctggtgctcatcacgtacctgcagcacacccacccggcgctgccccactacgactcgggcgagtgggactggctgcgcggcgcgctcgccaccgtcgaccgagactacggcgtcctcaaccgcgtgttccaccacatcacggacacgcacgtcgcgcaccacctcttctccaccatgccgcactaccacgccgtggaggccaccagggcgatcaggcccgtcctcggcgagtactaccagttcgacccgacccctgtcgccaaggccacctggcgcgaggccagggagtgcatctacgtcgagcctgagaaccgcaaccgcaagggcgtcttctggtacaacagcaagttctagccgccgcttgctttttccctaggaatgggaggagaaatcaggatgagaagatggtaatgtctgcatctacctgtctaatggttagtcaccagtctttagacaggaagagagcatttgggcttcagaaaaggaggcttactgcactactgcagtgccatcgctagatttaaggcaaattcagtgtgtctgtgccccatggctgtgagctttgggtactctcaagtagtcaagttctcttgtttttgtttttagtcgtcgctgttgtaggcttgccggcggcggtcgttgcgtggccgcgccttgtcgtgtgcgtcttgccatctcttcgtgctcccttcgtgttgttgtaaaacactagtctggtgtctttggcggaataacagatcgtcg

SEQ ID NO: 4583 - protein, 409 aa, Zea mays subsp. mays
  peptide (1)..(409): Ceres Seq. ID no. 12409900
  misc_feature (130)..(300): Pfam Name: Fatty acid desaturase Pfam Description: Fatty acid desaturase
  misc_feature (70)..(242): Homolog of NCBI NO: 39652599 NR Description: oleate delta12 desaturase [Aspergillus oryzae]
  misc_feature (33)..(300): Homolog of NCBI NO: 17225582 NR Description: delta-12 fatty acid desaturase [Gossypium
  misc_feature (33)..(300): Homolog of NCBI NO: 7433295 NR Description: omega-6 desaturase, microsomal - upland cotton
  misc_feature (33)..(300): Homolog of NCBI NO: 23428547 NR Description: delta-12 fatty acid desaturase [Persea americana]
  misc_feature (33)..(300): Homolog of NCBI NO: 1345977 NR Description: Omega-6 fatty acid desaturase, endoplasmic
  misc_feature (33)..(300): Homolog of NCBI NO: 8886726 NR Description: omega-6 fatty acid desaturase [Sesamum indicum]
  misc_feature (33)..(300): Homolog of NCBI NO: 34903462 NR Description: putative omega-6 fatty acid desaturase
  misc_feature (33)..(300): Homolog of NCBI NO: 27261181 NR Description: delta 12 oleic acid desaturase FAD2 [Vernicia
  misc_feature (33)..(300): Homolog of NCBI NO: 28564441 NR Description: delta 12-acyl-lipid-desaturase [Punica granatum]
  misc_feature (33)..(300): Homolog of NCBI NO: 28371827 NR Description: delta-12 oleate desaturase [Punica granatum]
FFCLDEIAATLFLIHTCLILPSRSCSCQQPAKMGAGGRMTEKEREKHEQEQVARATGGGAAVQRSPVEKPPFTLGQIKKAIPPHCFERSVLRSFSYVAHDLSLAAALLYLAVAVIPALPCPLRYAAWPLYWVAQGCVCTGVWVIAHECGHHAFSDHALLDDAVGLALHSALLVPYFSWKYSHRRHHSNTGSLERDEVFVPRTKEALPWYAPYVHGSPAGRLAHVAVQLTLGWPLYLATNASGRPYPRFACHFDPYGPIYGDRERAQIFVSDAGVAAVAFGLYKLAAAFGLWWVVRVYAVPAADRQRVAGAHHVPAAHPPGAAPLRLGRVGLAARRARHRRPRLRRPQPRVPPHHGHARRAPPLLHHAALPRRGGHQGDQARPRRVLPVRPDPCRQGHLARGQGVHLRRA

SEQ ID NO: 4584 - protein, 377 aa, Zea mays subsp. mays
  peptide (1)..(377): Ceres Seq. ID no. 12409901
  misc_feature (98)..(268): Pfam Name: Fatty acid desaturase Pfam Description: Fatty acid desaturase
  misc_feature (38)..(210): Homolog of NCBI NO: 39652599 NR Description: oleate delta12 desaturase [Aspergillus oryzae]
  misc_feature (1)..(268): Homolog of NCBI NO: 17225582 NR Description: delta-12 fatty acid desaturase [Gossypium
  misc_feature (1)..(268): Homolog of NCBI NO: 7433295 NR Description: omega-6 desaturase, microsomal - upland cotton
  misc_feature (1)..(268): Homolog of NCBI NO: 23428547 NR Description: delta-12 fatty acid desaturase [Persea americana]
  misc_feature (1)..(268): Homolog of NCBI NO: 1345977 NR Description: Omega-6 fatty acid desaturase, endoplasmic
  misc_feature (1)..(268): Homolog of NCBI NO: 8886726 NR Description: omega-6 fatty acid desaturase [Sesamum indicum]
  misc_feature (1)..(268): Homolog of NCBI NO: 34903462 NR Description: putative omega-6 fatty acid desaturase
  misc_feature (1)..(268): Homolog of NCBI NO: 27261181 NR Description: delta 12 oleic acid desaturase FAD2 [Vernicia
  misc_feature (1)..(268): Homolog of NCBI NO: 28564441 NR Description: delta 12-acyl-lipid-desaturase [Punica granatum]
  misc_feature (1)..(268): Homolog of NCBI NO: 28371827 NR Description: delta-12 oleate desaturase [Punica granatum]
MGAGGRMTEKEREKHEQEQVARATGGGAAVQRSPVEKPPFTLGQIKKAIPPHCFERSVLRSFSYVAHDLSLAAALLYLAVAVIPALPCPLRYAAWPLYWVAQGCVCTGVWVIAHECGHHAFSDHALLDDAVGLALHSALLVPYFSWKYSHRRHHSNTGSLERDEVFVPRTKEALPWYAPYVHGSPAGRLAHVAVQLTLGWPLYLATNASGRPYPRFACHFDPYGPIYGDRERAQIFVSDAGVAAVAFGLYKLAAAFGLWWVVRVYAVPAADRQRVAGAHHVPAAHPPGAAPLRLGRVGLAARRARHRRPRLRRPQPRVPPHHGHARRAPPLLHHAALPRRGGHQGDQARPRRVLPVRPDPCRQGHLARGQGVHLRRA

SEQ ID NO: 4585 - protein, 371 aa, Zea mays subsp. mays
  peptide (1)..(371): Ceres Seq. ID no. 12409902
  misc_feature (92)..(262): Pfam Name: Fatty acid desaturase Pfam Description: Fatty acid desaturase
  misc_feature (32)..(204): Homolog of NCBI NO: 39652599 NR Description: oleate delta12 desaturase [Aspergillus oryzae]
  misc_feature (1)..(262): Homolog of NCBI NO: 17225582 NR Description: delta-12 fatty acid desaturase [Gossypium
  misc_feature (1)..(262): Homolog of NCBI NO: 7433295 NR Description: omega-6 desaturase, microsomal - upland cotton
  misc_feature (1)..(262): Homolog of NCBI NO: 23428547 NR Description: delta-12 fatty acid desaturase [Persea americana]
  misc_feature (1)..(262): Homolog of NCBI NO: 1345977 NR Description: Omega-6 fatty acid desaturase, endoplasmic
  misc_feature (1)..(262): Homolog of NCBI NO: 8886726 NR Description: omega-6 fatty acid desaturase [Sesamum indicum]
  misc_feature (1)..(262): Homolog of NCBI NO: 34903462 NR Description: putative omega-6 fatty acid desaturase
  misc_feature (1)..(262): Homolog of NCBI NO: 27261181 NR Description: delta 12 oleic acid desaturase FAD2 [Vernicia
  misc_feature (1)..(262): Homolog of NCBI NO: 28564441 NR Description: delta 12-acyl-lipid-desaturase [Punica granatum]
  misc_feature (1)..(262): Homolog of NCBI NO: 28371827 NR Description: delta-12 oleate desaturase [Punica granatum]
MTEKEREKHEQEQVARATGGGAAVQRSPVEKPPFTLGQIKKAIPPHCFERSVLRSFSYVAHDLSLAAALLYLAVAVIPALPCPLRYAAWPLYWVAQGCVCTGVWVIAHECGHHAFSDHALLDDAVGLALHSALLVPYFSWKYSHRRHHSNTGSLERDEVFVPRTKEALPWYAPYVHGSPAGRLAHVAVQLTLGWPLYLATNASGRPYPRFACHFDPYGPIYGDRERAQIFVSDAGVAAVAFGLYKLAAAFGLWWVVRVYAVPAADRQRVAGAHHVPAAHPPGAAPLRLGRVGLAARRARHRRPRLRRPQPRVPPHHGHARRAPPLLHHAALPRRGGHQGDQARPRRVLPVRPDPCRQGHLARGQGVHLRRA

SEQ ID NO: 4586 - DNA, 1318 bp, Zea mays subsp. mays
  misc_feature (1)..(1318): Ceres Seq. ID no. 12350973
  misc_feature: MA Experiment ID: 108528 Result: Up-regulated in Transcription
  misc_feature: MA Experiment 108528 PARAMETER Experiment Name: Zm_Imbibed_Seeds_P Parameter: Age (day) Value: 5 vs. 2
  misc_feature: MA Experiment 108528 PARAMETER Experiment Name: Zm_Imbibed_Seeds_P Parameter: Organism Value: Zea mays
  misc_feature: MA Experiment 108528 PARAMETER Experiment Name: Zm_Imbibed_Seeds_P Parameter: Plant Line Value: 35A19
  misc_feature: MA Experiment 108528 PARAMETER Experiment Name: Zm_Imbibed_Seeds_P Parameter: Tissue Value: Aerial vs. Embryo
  misc_feature: MA Experiment ID: 108529 Result: Up-regulated in Transcription
  misc_feature: MA Experiment 108529 PARAMETER Experiment Name: Zm_Imbibed_Seeds_P Parameter: Age (day) Value: 5 vs. 2
  misc_feature: MA Experiment 108529 PARAMETER Experiment Name: Zm_Imbibed_Seeds_P Parameter: Organism Value: Zea mays
  misc_feature: MA Experiment 108529 PARAMETER Experiment Name: Zm_Imbibed_Seeds_P Parameter: Plant Line Value: 35A19
  misc_feature: MA Experiment 108529 PARAMETER Experiment Name: Zm_Imbibed_Seeds_P Parameter: Tissue Value: Roots vs. Embryo
  misc_feature: MA Experiment ID: 108530 Result: Up-regulated in Transcription
  misc_feature: MA Experiment 108530 PARAMETER Experiment Name: Zm_Imbibed_Seeds_P Parameter: Age (day) Value: 6 vs. 2
  misc_feature: MA Experiment 108530 PARAMETER Experiment Name: Zm_Imbibed_Seeds_P Parameter: Organism Value: Zea mays
  misc_feature: MA Experiment 108530 PARAMETER Experiment Name: Zm_Imbibed_Seeds_P Parameter: Plant Line Value: 35A19
  misc_feature: MA Experiment 108530 PARAMETER Experiment Name: Zm_Imbibed_Seeds_P Parameter: Tissue Value: Aerial vs. Embryo
  misc_feature: MA Experiment ID: 108534 Result: Up-regulated in Transcription
  misc_feature: MA Experiment 108534 PARAMETER Experiment Name: Zm_4deg_Cold_P Parameter: Age (hr) Value: 8
  misc_feature: MA Experiment 108534 PARAMETER Experiment Name: Zm_4deg_Cold_P Parameter: Organism Value: Zea mays
  misc_feature: MA Experiment 108534 PARAMETER Experiment Name: Zm_4deg_Cold_P Parameter: Plant Line Value: 35A19
  misc_feature: MA Experiment 108534 PARAMETER Experiment Name: Zm_4deg_Cold_P Parameter: Temperature (deg C) Value: 4 vs. 22
  misc_feature: MA Experiment 108534 PARAMETER Experiment Name: Zm_4deg_Cold_P Parameter: Timepoint (hr) Value: 6
  misc_feature: MA Experiment 108534 PARAMETER Experiment Name: Zm_4deg_Cold_P Parameter: Tissue Value: Aerial
  misc_feature: MA Experiment ID: 108535 Result: Down-regulated in Transcription
  misc_feature: MA Experiment 108535 PARAMETER Experiment Name: Zm_Meristem_P Parameter: Age (day) Value: 8
  misc_feature: MA Experiment 108535 PARAMETER Experiment Name: Zm_Meristem_P Parameter: Organism Value: Zea mays
  misc_feature: MA Experiment 108535 PARAMETER Experiment Name: Zm_Meristem_P Parameter: Plant Line Value: 35A19
  misc_feature: MA Experiment 108535 PARAMETER Experiment Name: Zm_Meristem_P Parameter: Tissue Value: Root Meristem vs. Above Root Meristem
  misc_feature: MA Experiment ID: 108543 Result: Up-regulated in Transcription
  misc_feature: MA Experiment ID: 108545 Result: Up-regulated in Transcription
  misc_feature: MA Experiment 108545 PARAMETER Experiment Name: Zm_Imbibed_Seeds_P Parameter: Age (day) Value: 3 vs. 2
  misc_feature: MA Experiment 108545 PARAMETER Experiment Name: Zm_Imbibed_Seeds_P Parameter: Organism Value: Zea mays
  misc_feature: MA Experiment 108545 PARAMETER Experiment Name: Zm_Imbibed_Seeds_P Parameter: Plant Line Value: 35A19
  misc_feature: MA Experiment 108545 PARAMETER Experiment Name: Zm_Imbibed_Seeds_P Parameter: Tissue Value: Aerial vs. Embryo
  misc_feature: MA Experiment ID: 108546 Result: Up-regulated in Transcription
  misc_feature: MA Experiment 108546 PARAMETER Experiment Name: Zm_Imbibed_Seeds_P Parameter: Age (day) Value: 3 vs. 2
  misc_feature: MA Experiment 108546 PARAMETER Experiment Name: Zm_Imbibed_Seeds_P Parameter: Organism Value: Zea mays
  misc_feature: MA Experiment 108546 PARAMETER Experiment Name: Zm_Imbibed_Seeds_P Parameter: Plant Line Value: 35A19
  misc_feature: MA Experiment 108546 PARAMETER Experiment Name: Zm_Imbibed_Seeds_P Parameter: Tissue Value: Roots vs. Embryo
  misc_feature: MA Experiment ID: 108547 Result: Up-regulated in Transcription
  misc_feature: MA Experiment 108547 PARAMETER Experiment Name: Zm_Imbibed_Seeds_P Parameter: Age (day) Value: 4 vs. 2
  misc_feature: MA Experiment 108547 PARAMETER Experiment Name: Zm_Imbibed_Seeds_P Parameter: Organism Value: Zea mays
  misc_feature: MA Experiment 108547 PARAMETER Experiment Name: Zm_Imbibed_Seeds_P Parameter: Plant Line Value: 35A19
  misc_feature: MA Experiment 108547 PARAMETER Experiment Name: Zm_Imbibed_Seeds_P Parameter: Tissue Value: Aerial vs. Embryo
  misc_feature: MA Experiment ID: 108559 Result: Down-regulated in Transcription
  misc_feature: MA Experiment 108559 PARAMETER Experiment Name: Zm_5mM_NO_P Parameter: Age (day) Value: 8
  misc_feature: MA Experiment 108559 PARAMETER Experiment Name: Zm_5mM_NO_P Parameter: Organism Value: Zea mays
  misc_feature: MA Experiment 108559 PARAMETER Experiment Name: Zm_5mM_NO_P Parameter: Plant Line Value: 35A19
  misc_feature: MA Experiment 108559 PARAMETER Experiment Name: Zm_5mM_NO_P Parameter: Timepoint (hr) Value: 12
  misc_feature: MA Experiment 108559 PARAMETER Experiment Name: Zm_5mM_NO_P Parameter: Tissue Value: Aerial
  misc_feature: MA Experiment 108559 PARAMETER Experiment Name: Zm_5mM_NO_P Parameter: Treatment Value: 5mM NO vs. No Treatment
  misc_feature: MA Experiment ID: 108689 Result: Down-regulated in Transcription
  misc_feature: MA Experiment 108689 PARAMETER Experiment Name: Zm_Drought_Roots_P Parameter: Age (day) Value: 9
  misc_feature: MA Experiment 108689 PARAMETER Experiment Name: Zm_Drought_Roots_P Parameter: Organism Value: Zea mays
  misc_feature: MA Experiment 108689 PARAMETER Experiment Name: Zm_Drought_Roots_P Parameter: Plant Line Value: 35A19
  misc_feature: MA Experiment 108689 PARAMETER Experiment Name: Zm_Drought_Roots_P Parameter: Timepoint (hr) Value: 24
  misc_feature: MA Experiment 108689 PARAMETER Experiment Name: Zm_Drought_Roots_P Parameter: Tissue Value: Roots
  misc_feature: MA Experiment 108689 PARAMETER Experiment Name: Zm_Drought_Roots_P Parameter: Treatment Value: Drought vs. No Drought
  misc_feature: MA Experiment ID: 20000108 Result: Down-regulated in Transcription
  misc_feature: MA Experiment 20000108 PARAMETER Experiment Name: Zm_Root-Tips_P Parameter: Age (day) Value: 12
  misc_feature: MA Experiment 20000108 PARAMETER Experiment Name: Zm_Root-Tips_P Parameter: Organism Value: Zea mays
  misc_feature: MA Experiment 20000108 PARAMETER Experiment Name: Zm_Root-Tips_P Parameter: Tissue Value: Root tips vs. Root mid region    35
  misc_feature: MA Experiment 20000108 PARAMETER Experiment Name: Zm_Root-Tips_P Parameter: Tissue Value: Root tips vs. Root mid region   Sequence Listing-Misc Features (4)
  misc_feature: MA Experiment ID: 20000478 Result: Down-regulated in Transcription
  misc_feature: MA Experiment 20000478 PARAMETER Experiment Name: Zm_5mM_SA_P Parameter: Age (day) Value: 11
  misc_feature: MA Experiment 20000478 PARAMETER Experiment Name: Zm_5mM_SA_P Parameter: Organism Value: Zea mays
  misc_feature: MA Experiment 20000478 PARAMETER Experiment Name: Zm_5mM_SA_P Parameter: Plant Line Value: 35A19
  misc_feature: MA Experiment 20000478 PARAMETER Experiment Name: Zm_5mM_SA_P Parameter: Timepoint (hr) Value: 72
  misc_feature: MA Experiment 20000478 PARAMETER Experiment Name: Zm_5mM_SA_P Parameter: Tissue Value: Aerial
  misc_feature: MA Experiment 20000478 PARAMETER Experiment Name: Zm_5mM_SA_P Parameter: Treatment Value: 5mM SA vs. No Treatment
  misc_feature: MA Experiment ID: 20000479 Result: Down-regulated in Transcription
  misc_feature: MA Experiment 20000479 PARAMETER Experiment Name: Zm_Drought_P Parameter: Age (day) Value: 10
  misc_feature: MA Experiment 20000479 PARAMETER Experiment Name: Zm_Drought_P Parameter: Organism Value: Zea mays
  misc_feature: MA Experiment 20000479 PARAMETER Experiment Name: Zm_Drought_P Parameter: Plant Line Value: 35A19
  misc_feature: MA Experiment 20000479 PARAMETER Experiment Name: Zm_Drought_P Parameter: Timepoint (hr) Value: 48
  misc_feature: MA Experiment 20000479 PARAMETER Experiment Name: Zm_Drought_P Parameter: Tissue Value: Aerial
  misc_feature: MA Experiment 20000479 PARAMETER Experiment Name: Zm_Drought_P Parameter: Treatment Value: Drought vs. No Drought
  misc_feature: MA Experiment ID: 20001608 Result: Down-regulated in Transcription
  misc_feature: MA Experiment 20001608 PARAMETER Experiment Name: Zm_50ppm_KNO3_L-to-H_P Parameter: Age (day) Value: 21
  misc_feature: MA Experiment 20001608 PARAMETER Experiment Name: Zm_50ppm_KNO3_L-to-H_P Parameter: Organism Value: Zea mays
  misc_feature: MA Experiment 20001608 PARAMETER Experiment Name: Zm_50ppm_KNO3_L-to-H_P Parameter: Plant Line Value: 35A19
  misc_feature: MA Experiment 20001608 PARAMETER Experiment Name: Zm_50ppm_KNO3_L-to-H_P Parameter: Timepoint (hr) Value: 48
  misc_feature: MA Experiment 20001608 PARAMETER Experiment Name: Zm_50ppm_KNO3_L-to-H_P Parameter: Tissue Value: Shoots
  misc_feature: MA Experiment 20001608 PARAMETER Experiment Name: Zm_50ppm_KNO3_L-to-H_P Parameter: Treatment Value: 50ppm KNO3 vs. 50ppm KCl
attccatcacagattcacagccaactaaagagaaggagagcgtgtgttcgtttcgagaacgcacgcacagacgccatggaggtgacaccaaaccacaccctgaccgtgaccgggtgggcggccatgaacgagtccgccggcaaggtggagcccttcgtcttcaagagaagggagaacggcccggacgacgtgacgatcaaagtgcagtactgcggcatgtgccacacggacctgcacttcatcaacaacgactggggcatcaccacgtacccgctggtcccggggcacgagatcacgggcgtggtcaccaaggccgggcgcaacgtcacgggcttccgtgtcggcgaccgcgtcggcgtgggctgcatcgccgcctcctgcctggactgcgaccactgccgccgctccgaggagaactactgcgaccgtgtggcgctcacctacaacggcgtcttctgggacggcagcgtcacgtacggcggctactcgcgcgcgctggtggcggacaagcgcttcgtggtgcgcgtccccgacgcgctgccgctggacgccgccgcgccgctgctgtgcgcgggcgtcacggtgtacagccccatgaagcaccacggcatgctggggcaccccggcgccagcctcggcgtcgtcgggctcggcggcctcggccacgtcgccgtcaagctcgccaaggcgttcggtctccgcgtcaccgtcgtcagcacgtcgccggccaaggaggccgaggccagggcccggctcggcgccgaccgcttcgtcgtcagcaccgacgacgcgcagatgcgggacgcggccaggtccctcgactacgtcatcgacaccgtctccgccaagcactcgctcggacccatcctggacctgctcaaggtcagcggcaagctcgtgctcgtcgccgcgccggaccagcccgtcgagctcccctccttcccgctcatctttgggaagaggaccgtcagcgggagcatgacgggagggatcagggagacgcaggagatgctcgacctctgcgcccgccacaacatcacctgcgacatcgagctcgtctccacggacgggatcaacgccgcgctcgcgcgcctcgcacgcaacgacgtccgataccgcttcgtcatcgacatcgccggcgactccacctcaaaactatagttcattcaattcgttgcattattatcatctatcaatatcgtcaccagtggcaggcatggcctctggttgcttgcattttgctctctatccatatcaagtgtgtgtcagcatgggccagcgtgcatattgcgccattgcttgcagcaaataaacattc

SEQ ID NO: 4587 - protein, 438 aa, Zea mays subsp. mays
  peptide (1)..(438): Ceres Seq. ID no. 12350974
SITDSQPTKEKESVCSFRERTHRRHGGDTKPHPDRDRVGGHERVRRQGGALRLQEKGERPGRRDDQSAVLRHVPHGPALHQQRLGHHHVPAGPGARDHGRGHQGRAQRHGLPCRRPRRRGLHRRLLPGLRPLPPLRGELLRPCGAHLQRRLLGRQRHVRRLLARAGGGQALRGARPRRAAAGRRRAAAVRGRHGVQPHEAPRHAGAPRRQPRRRRARRPRPRRRQARQGVRSPRHRRQHVAGQGGRGQGPARRRPLRRQHRRRADAGRGQVPRLRHRHRLRQALARTHPGPAQGQRQARARRRAGPARRAPLLPAHLWEEDRQREHDGRDQGDAGDARPLRPPQHHLRHRARLHGRDQRRARAPRTQRRPIPLRHRHRRRLHLKTIVHSIRCIIIIYQYRHQWQAWPLVACILLSIHIKCVSAWASVHIAPLLAANKH

SEQ ID NO: 4588 - protein, 386 aa, Zea mays subsp. mays
  peptide (1)..(386): Ceres Seq. ID no. 12350975
  misc_feature (41)..(379): Homolog of NCBI NO: 15233643 NR Description: cinnamyl-alcohol dehydrogenase ELI3-2
  misc_feature (32)..(378): Homolog of NCBI NO: 14279694 NR Description: sinapyl alcohol dehydrogenase [Populus
  misc_feature (34)..(384): Homolog of NCBI NO: 10720088 NR Description: Probable mannitol dehydrogenase (NAD-dependent
  misc_feature (32)..(379): Homolog of NCBI NO: 21592964 NR Description: cinnamyl-alcohol dehydrogenase CAD1 [Arabidopsis
  misc_feature (32)..(379): Homolog of NCBI NO: 1168728 NR Description: Probable mannitol dehydrogenase (NAD-dependent
  misc_feature (26)..(378): Homolog of NCBI NO: 10720093 NR Description: Probable mannitol dehydrogenase (NAD-dependent
  misc_feature (32)..(379): Homolog of NCBI NO: 15235022 NR Description: cinnamyl-alcohol dehydrogenase CAD1
  misc_feature (32)..(379): Homolog of NCBI NO: 2146727 NR Description: cinnamyl-alcohol dehydrogenase (EC 1.1.1.195)
  misc_feature (32)..(386): Homolog of NCBI NO: 22475166 NR Description: putative sinapyl alcohol dehydrogenase
  misc_feature (26)..(382): Homolog of NCBI NO: 38344562 NR Description: OSJNBa0065B15.8 [Oryza sativa (japonica
IPSQIHSQLKRRRACVRFENARTDAMEVTPNHTLTVTGWAAMNESAGKVEPFVFKRRENGPDDVTIKVQYCGMCHTDLHFINNDWGITTYPLVPGHEITGVVTKAGRNVTGFRVGDRVGVGCIAASCLDCDHCRRSEENYCDRVALTYNGVFWDGSVTYGGYSRALVADKRFVVRVPDALPLDAAAPLLCAGVTVYSPMKHHGMLGHPGASLGVVGLGGLGHVAVKLAKAFGLRVTVVSTSPAKEAEARARLGADRFVVSTDDAQMRDAARSLDYVIDTVSAKHSLGPILDLLKVSGKLVLVAAPDQPVELPSFPLIFGKRTVSGSMTGGIRETQEMLDLCARHNITCDIELVSTDGINAALARLARNDVRYRFVIDIAGDSTSKL

SEQ ID NO: 4589 - protein, 361 aa, Zea mays subsp. mays
  peptide (1)..(361): Ceres Seq. ID no. 12350976
  misc_feature (16)..(354): Homolog of NCBI NO: 15233643 NR Description: cinnamyl-alcohol dehydrogenase ELI3-2
  misc_feature (7)..(353): Homolog of NCBI NO: 14279694 NR Description: sinapyl alcohol dehydrogenase [Populus
  misc_feature (9)..(359): Homolog of NCBI NO: 10720088 NR Description: Probable mannitol dehydrogenase (NAD-dependent
  misc_feature (7)..(354): Homolog of NCBI NO: 21592964 NR Description: cinnamyl-alcohol dehydrogenase CAD1 [Arabidopsis
  misc_feature (7)..(354): Homolog of NCBI NO: 1168728 NR Description: Probable mannitol dehydrogenase (NAD-dependent
  misc_feature (1)..(353): Homolog of NCBI NO: 10720093 NR Description: Probable mannitol dehydrogenase (NAD-dependent
  misc_feature (7)..(354): Homolog of NCBI NO: 15235022 NR Description: cinnamyl-alcohol dehydrogenase CAD1
  misc_feature (7)..(354): Homolog of NCBI NO: 2146727 NR Description: cinnamyl-alcohol dehydrogenase (EC 1.1.1.195)
  misc_feature (7)..(361): Homolog of NCBI NO: 22475166 NR Description: putative sinapyl alcohol dehydrogenase
  misc_feature (1)..(357): Homolog of NCBI NO: 38344562 NR Description: OSJNBa0065B15.8 [Oryza sativa (japonica
MEVTPNHTLTVTGWAAMNESAGKVEPFVFKRRENGPDDVTIKVQYCGMCHTDLHFINNDWGITTYPLVPGHEITGVVTKAGRNVTGFRVGDRVGVGCIAASCLDCDHCRRSEENYCDRVALTYNGVFWDGSVTYGGYSRALVADKRFVVRVPDALPLDAAAPLLCAGVTVYSPMKHHGMLGHPGASLGVVGLGGLGHVAVKLAKAFGLRVTVVSTSPAKEAEARARLGADRFVVSTDDAQMRDAARSLDYVIDTVSAKHSLGPILDLLKVSGKLVLVAAPDQPVELPSFPLIFGKRTVSGSMTGGIRETQEMLDLCARHNITCDIELVSTDGINAALARLARNDVRYRFVIDIAGDSTSKL

SEQ ID NO: 4590 - DNA, 1522 bp, Zea mays subsp. mays
  misc_feature (1)..(1522): Ceres Seq. ID no. 12341968
  misc_feature: MA Experiment ID: 108527 Result: Up-regulated in Transcription
  misc_feature: MA Experiment 108527 PARAMETER Experiment Name: Zm_5mM_NO_P Parameter: Age (day) Value: 8
  misc_feature: MA Experiment 108527 PARAMETER Experiment Name: Zm_5mM_NO_P Parameter: Organism Value: Zea mays
  misc_feature: MA Experiment 108527 PARAMETER Experiment Name: Zm_5mM_NO_P Parameter: Plant Line Value: 35A19
  misc_feature: MA Experiment 108527 PARAMETER Experiment Name: Zm_5mM_NO_P Parameter: Timepoint (hr) Value: 6
  misc_feature: MA Experiment 108527 PARAMETER Experiment Name: Zm_5mM_NO_P Parameter: Tissue Value: Aerial
  misc_feature: MA Experiment 108527 PARAMETER Experiment Name: Zm_5mM_NO_P Parameter: Treatment Value: 5mM NO vs. No Treatment
  misc_feature: MA Experiment ID: 108529 Result: Up-regulated in Transcription
  misc_feature: MA Experiment 108529 PARAMETER Experiment Name: Zm_Imbibed_Seeds_P Parameter: Age (day) Value: 5 vs. 2
  misc_feature: MA Experiment 108529 PARAMETER Experiment Name: Zm_Imbibed_Seeds_P Parameter: Organism Value: Zea mays
  misc_feature: MA Experiment 108529 PARAMETER Experiment Name: Zm_Imbibed_Seeds_P Parameter: Plant Line Value: 35A19
  misc_feature: MA Experiment 108529 PARAMETER Experiment Name: Zm_Imbibed_Seeds_P Parameter: Tissue Value: Roots vs. Embryo
  misc_feature: MA Experiment ID: 108540 Result: Down-regulated in Transcription
  misc_feature: MA Experiment 108540 PARAMETER Experiment Name: Zm_20percent_PEG_P Parameter: Age (day) Value: 8
  misc_feature: MA Experiment 108540 PARAMETER Experiment Name: Zm_20percent_PEG_P Parameter: Organism Value: Zea mays
  misc_feature: MA Experiment 108540 PARAMETER Experiment Name: Zm_20percent_PEG_P Parameter: Plant Line Value: 35A19
  misc_feature: MA Experiment 108540 PARAMETER Experiment Name: Zm_20percent_PEG_P Parameter: Timepoint (hr) Value: 6
  misc_feature: MA Experiment 108540 PARAMETER Experiment Name: Zm_20percent_PEG_P Parameter: Tissue Value: Aerial
  misc_feature: MA Experiment 108540 PARAMETER Experiment Name: Zm_20percent_PEG_P Parameter: Treatment Value: 20percent PEG vs. No Treatment
  misc_feature: MA Experiment ID: 108543 Result: Up-regulated in Transcription
  misc_feature: MA Experiment ID: 108546 Result: Up-regulated in Transcription
  misc_feature: MA Experiment 108546 PARAMETER Experiment Name: Zm_Imbibed_Seeds_P Parameter: Age (day) Value: 3 vs. 2
  misc_feature: MA Experiment 108546 PARAMETER Experiment Name: Zm_Imbibed_Seeds_P Parameter: Organism Value: Zea mays
  misc_feature: MA Experiment 108546 PARAMETER Experiment Name: Zm_Imbibed_Seeds_P Parameter: Plant Line Value: 35A19
  misc_feature: MA Experiment 108546 PARAMETER Experiment Name: Zm_Imbibed_Seeds_P Parameter: Tissue Value: Roots vs. Embryo
  misc_feature: MA Experiment ID: 108689 Result: Down-regulated in Transcription
  misc_feature: MA Experiment 108689 PARAMETER Experiment Name: Zm_Drought_Roots_P Parameter: Age (day) Value: 9
  misc_feature: MA Experiment 108689 PARAMETER Experiment Name: Zm_Drought_Roots_P Parameter: Organism Value: Zea mays
  misc_feature: MA Experiment 108689 PARAMETER Experiment Name: Zm_Drought_Roots_P Parameter: Plant Line Value: 35A19
  misc_feature: MA Experiment 108689 PARAMETER Experiment Name: Zm_Drought_Roots_P Parameter: Timepoint (hr) Value: 24
  misc_feature: MA Experiment 108689 PARAMETER Experiment Name: Zm_Drought_Roots_P Parameter: Tissue Value: Roots
  misc_feature: MA Experiment 108689 PARAMETER Experiment Name: Zm_Drought_Roots_P Parameter: Treatment Value: Drought vs. No Drought
  misc_feature: MA Experiment ID: 20000477 Result: Down-regulated in Transcription
  misc_feature: MA Experiment 20000477 PARAMETER Experiment Name: Zm_5mM_SA_P Parameter: Age (day) Value: 10
  misc_feature: MA Experiment 20000477 PARAMETER Experiment Name: Zm_5mM_SA_P Parameter: Organism Value: Zea mays
  misc_feature: MA Experiment 20000477 PARAMETER Experiment Name: Zm_5mM_SA_P Parameter: Plant Line Value: 35A19
  misc_feature: MA Experiment 20000477 PARAMETER Experiment Name: Zm_5mM_SA_P Parameter: Timepoint (hr) Value: 48
  misc_feature: MA Experiment 20000477 PARAMETER Experiment Name: Zm_5mM_SA_P Parameter: Tissue Value: Aerial
  misc_feature: MA Experiment 20000477 PARAMETER Experiment Name: Zm_5mM_SA_P Parameter: Treatment Value: 5mM SA vs. No Treatment
  misc_feature: MA Experiment ID: 20000479 Result: Down-regulated in Transcription
  misc_feature: MA Experiment 20000479 PARAMETER Experiment Name: Zm_Drought_P Parameter: Age (day) Value: 10
  misc_feature: MA Experiment 20000479 PARAMETER Experiment Name: Zm_Drought_P Parameter: Organism Value: Zea mays
  misc_feature: MA Experiment 20000479 PARAMETER Experiment Name: Zm_Drought_P Parameter: Plant Line Value: 35A19
  misc_feature: MA Experiment 20000479 PARAMETER Experiment Name: Zm_Drought_P Parameter: Timepoint (hr) Value: 48
  misc_feature: MA Experiment 20000479 PARAMETER Experiment Name: Zm_Drought_P Parameter: Tissue Value: Aerial
  misc_feature: MA Experiment 20000479 PARAMETER Experiment Name: Zm_Drought_P Parameter: Treatment Value: Drought vs. No Drought
  misc_feature: MA Experiment ID: 20000480 Result: Down-regulated in Transcription
  misc_feature: MA Experiment 20000480 PARAMETER Experiment Name: Zm_Drought_P Parameter: Age (day) Value: 11
  misc_feature: MA Experiment 20000480 PARAMETER Experiment Name: Zm_Drought_P Parameter: Organism Value: Zea mays
  misc_feature: MA Experiment 20000480 PARAMETER Experiment Name: Zm_Drought_P Parameter: Plant Line Value: 35A19
  misc_feature: MA Experiment 20000480 PARAMETER Experiment Name: Zm_Drought_P Parameter: Timepoint (hr) Value: 72
  misc_feature: MA Experiment 20000480 PARAMETER Experiment Name: Zm_Drought_P Parameter: Tissue Value: Aerial
  misc_feature: MA Experiment 20000480 PARAMETER Experiment Name: Zm_Drought_P Parameter: Treatment Value: Drought vs. No Drought
  misc_feature: MA Experiment ID: 20000492 Result: Down-regulated in Transcription
  misc_feature: MA Experiment 20000492 PARAMETER Experiment Name: Zm_Hybrid_Seed_Dev_P Parameter: DAP Value: 12
  misc_feature: MA Experiment 20000492 PARAMETER Experiment Name: Zm_Hybrid_Seed_Dev_P Parameter: Organism Value: Zea mays
  misc_feature: MA Experiment 20000492 PARAMETER Experiment Name: Zm_Hybrid_Seed_Dev_P Parameter: Plant Line Value: 35A19
  misc_feature: MA Experiment 20000492 PARAMETER Experiment Name: Zm_Hybrid_Seed_Dev_P Parameter: Tissue Value: Fert Kernel vs. Unfert Floret
accatcctcctcttcctcgaacggtcgaaccgccgaaagcacgcaccccgccgccgcgtaccctcccctcacccgctcaccatcgccggccgccgttcggcgcgacgcggattcgaatccggaaagcgggcgatgggggcgaagcgcgcggtgctggtgggcatcaattaccagggcaccaaagcggagctcaagggctgccacaacgacgtcgctcgcatgcgccggtgcctcgtcgaccgcttcggattcgacgagtccggcatccgcgtcctcatagatgacggctccgcgccgcagcccacgggggccaacatccggcgggaactcgcgcgcctcgtcggggacgcgcggcccggggacctcctcttcttccactacagcgggcacggcatacggctgcccgccgagaccgggaaggacgacgacaccggctacgacgagtgcatcgtgccctgcgacatgaaccttatcacagaccaagatttcacggagcttgcgcaaaaagtccccagtggctgtctctttaccatagtttctgattcgtgccacagtggagggctacttgacaagaccaaggagcagattgggcacagcaccaagcagaagcagaagcagacccagacccagacccagagccgggaacttgaggaacggtctccttctggcaccagcttccgggaattcctcaaaggtactgttcgggaagcgtttgagtctcaaggaattcacctgccccaccgtagccgtagccaccagcaagggagcggtcacggcgacgacggtgaccaagagtcgcgctacatcaacacagccgatgcccacgtcaaaaaccggtcgctacctctctcgacattgatcgagatgctgaaggagaagactgggaaggacgacattgatgtagggtcaatccggctaacgctttttaacctcttcaaagacgatgccagcccgaagataaagaagttcatgaaggtcatgctgaacaagttacagcaggggcagcacggaggcattgtgggcttcatgggcgctctggcacaggaggtcctgaaagccaagctcgatggcaaggaagaagaagagttcgacccggcaatgaaacagcacgtgcacagcgatcaagaggtgtacgccgggacgacggcaagggtgccgagcaacggtgtcctgatcagtgggtgccagaccgaccagacgtctgccgacgcgaccacgccgaagggggtgtcctacggtgcgctcagcaatgccatccaggccatcctcgcggagcgtgggacggtaacgaacaaggagctcgtgctgaaagcgcgcaagatgctgtcgaaacagggctacacccaacagcctgggctctactgcagcgatgagaatgccagtgcggcttttatatgctgatgatgattcattgggtttgtcctgtggattgcaatatttgtattttgtctctaagtgcatgtgagttggactggtggttatgttttttcgctgagatttgggaatgtatcgtttctttcgc

SEQ ID NO: 4591 - protein, 466 aa, Zea mays subsp. mays
  peptide (1)..(466): Ceres Seq. ID no. 12341969
  misc_feature (48)..(466): Pfam Name: Caspase domain Pfam Description: Caspase domain
  misc_feature (48)..(466): Pfam Name: Caspase domain Pfam Description: Caspase domain
  misc_feature (48)..(466): Homolog of NCBI NO: 15219345 NR Description: hypothetical protein common family
  misc_feature (47)..(466): Homolog of NCBI NO: 15219342 NR Description: hypothetical protein common family; protein id:
  misc_feature (48)..(466): Homolog of NCBI NO: 40644374 NR Description: metacaspase type II [Picea abies]
  misc_feature (53)..(466): Homolog of NCBI NO: 23343885 NR Description: metacaspase 1 [Lycopersicon esculentum]
  misc_feature (260)..(466): Homolog of NCBI NO: 15219340 NR Description: hypothetical protein common family; protein id:
  misc_feature (48)..(466): Homolog of NCBI NO: 33304380 NR Description: metacaspase 7 [Arabidopsis thaliana]
  misc_feature (47)..(466): Homolog of NCBI NO: 15219342 NR Description: hypothetical protein common family; protein id:
  misc_feature (53)..(466): Homolog of NCBI NO: 23343885 NR Description: metacaspase 1 [Lycopersicon esculentum]
  misc_feature (260)..(466): Homolog of NCBI NO: 15219340 NR Description: hypothetical protein common family; protein id:
  misc_feature (47)..(217): Homolog of NCBI NO: 15219340 NR Description: hypothetical protein common family; protein id:
  misc_feature (46)..(466): Homolog of NCBI NO: 29367583 NR Description: latex-abundant protein-like protein
  misc_feature (45)..(466): Homolog of NCBI NO: 34908928 NR Description: putative latex-abundant protein
  misc_feature (47)..(466): Homolog of NCBI NO: 4235430 NR Description: latex-abundant protein [Hevea brasiliensis]
  misc_feature (48)..(466): Homolog of NCBI NO: 40644374 NR Description: metacaspase type II [Picea abies]
  misc_feature (48)..(466): Homolog of NCBI NO: 15219345 NR Description: hypothetical protein common family
  misc_feature (48)..(466): Homolog of NCBI NO: 33304380 NR Description: metacaspase 7 [Arabidopsis thaliana]
  misc_feature (47)..(217): Homolog of NCBI NO: 15219340 NR Description: hypothetical protein common family; protein id:
  misc_feature (47)..(466): Homolog of NCBI NO: 4235430 NR Description: latex-abundant protein [Hevea brasiliensis]
  misc_feature (45)..(466): Homolog of NCBI NO: 34908928 NR Description: putative latex-abundant protein
  misc_feature (46)..(466): Homolog of NCBI NO: 29367583 NR Description: latex-abundant protein-like protein
TILLFLERSNRRKHAPRRRVPSPHPLTIAGRRSARRGFESGKRAMGAKRAVLVGINYQGTKAELKGCHNDVARMRRCLVDRFGFDESGIRVLIDDGSAPQPTGANIRRELARLVGDARPGDLLFFHYSGHGIRLPAETGKDDDTGYDECIVPCDMNLITDQDFTELAQKVPSGCLFTIVSDSCHSGGLLDKTKEQIGHSTKQKQKQTQTQTQSRELEERSPSGTSFREFLKGTVREAFESQGIHLPHRSRSHQQGSGHGDDGDQESRYINTADAHVKNRSLPLSTLIEMLKEKTGKDDIDVGSIRLTLFNLFKDDASPKIKKFMKVMLNKLQQGQHGGIVGFMGALAQEVLKAKLDGKEEEEFDPAMKQHVHSDQEVYAGTTARVPSNGVLISGCQTDQTSADATTPKGVSYGALSNAIQAILAERGTVTNKELVLKARKMLSKQGYTQQPGLYCSDENASAAFIC

SEQ ID NO: 4592 - protein, 422 aa, Zea mays subsp. mays
  peptide (1)..(422): Ceres Seq. ID no. 12341970
  misc_feature (4)..(422): Pfam Name: Caspase domain Pfam Description: Caspase domain
  misc_feature (4)..(422): Pfam Name: Caspase domain Pfam Description: Caspase domain
  misc_feature (3)..(173): Homolog of NCBI NO: 15219340 NR Description: hypothetical protein common family; protein id:
  misc_feature (216)..(422): Homolog of NCBI NO: 15219340 NR Description: hypothetical protein common family; protein id:
  misc_feature (4)..(422): Homolog of NCBI NO: 33304380 NR Description: metacaspase 7 [Arabidopsis thaliana]
  misc_feature (4)..(422): Homolog of NCBI NO: 15219345 NR Description: hypothetical protein common family
  misc_feature (3)..(422): Homolog of NCBI NO: 15219342 NR Description: hypothetical protein common family; protein id:
  misc_feature (3)..(173): Homolog of NCBI NO: 15219340 NR Description: hypothetical protein common family; protein id:
  misc_feature (4)..(422): Homolog of NCBI NO: 33304380 NR Description: metacaspase 7 [Arabidopsis thaliana]
  misc_feature (3)..(422): Homolog of NCBI NO: 15219342 NR Description: hypothetical protein common family; protein id:
  misc_feature (2)..(422): Homolog of NCBI NO: 29367583 NR Description: latex-abundant protein-like protein
  misc_feature (1)..(422): Homolog of NCBI NO: 34908928 NR Description: putative latex-abundant protein
  misc_feature (3)..(422): Homolog of NCBI NO: 4235430 NR Description: latex-abundant protein [Hevea brasiliensis]
  misc_feature (9)..(422): Homolog of NCBI NO: 23343885 NR Description: metacaspase 1 [Lycopersicon esculentum]
  misc_feature (4)..(422): Homolog of NCBI NO: 40644374 NR Description: metacaspase type II [Picea abies]
  misc_feature (4)..(422): Homolog of NCBI NO: 15219345 NR Description: hypothetical protein common family
  misc_feature (216)..(422): Homolog of NCBI NO: 15219340 NR Description: hypothetical protein common family; protein id:
  misc_feature (4)..(422): Homolog of NCBI NO: 40644374 NR Description: metacaspase type II [Picea abies]
  misc_feature (9)..(422): Homolog of NCBI NO: 23343885 NR Description: metacaspase 1 [Lycopersicon esculentum]
  misc_feature (3)..(422): Homolog of NCBI NO: 4235430 NR Description: latex-abundant protein [Hevea brasiliensis]
  misc_feature (1)..(422): Homolog of NCBI NO: 34908928 NR Description: putative latex-abundant protein
  misc_feature (2)..(422): Homolog of NCBI NO: 29367583 NR Description: latex-abundant protein-like protein
MGAKRAVLVGINYQGTKAELKGCHNDVARMRRCLVDRFGFDESGIRVLIDDGSAPQPTGANIRRELARLVGDARPGDLLFFHYSGHGIRLPAETGKDDDTGYDECIVPCDMNLITDQDFTELAQKVPSGCLFTIVSDSCHSGGLLDKTKEQIGHSTKQKQKQTQTQTQSRELEERSPSGTSFREFLKGTVREAFESQGIHLPHRSRSHQQGSGHGDDGDQESRYINTADAHVKNRSLPLSTLIEMLKEKTGKDDIDVGSIRLTLFNLFKDDASPKIKKFMKVMLNKLQQGQHGGIVGFMGALAQEVLKAKLDGKEEEEFDPAMKQHVHSDQEVYAGTTARVPSNGVLISGCQTDQTSADATTPKGVSYGALSNAIQAILAERGTVTNKELVLKARKMLSKQGYTQQPGLYCSDENASAAFIC

SEQ ID NO: 4593 - protein, 393 aa, Zea mays subsp. mays
  peptide (1)..(393): Ceres Seq. ID no. 12341971
  misc_feature (1)..(393): Pfam Name: Caspase domain Pfam Description: Caspase domain
  misc_feature (1)..(393): Pfam Name: Caspase domain Pfam Description: Caspase domain
  misc_feature (1)..(144): Homolog of NCBI NO: 15219340 NR Description: hypothetical protein common family; protein id:
  misc_feature (187)..(393): Homolog of NCBI NO: 15219340 NR Description: hypothetical protein common family; protein id:
  misc_feature (1)..(393): Homolog of NCBI NO: 33304380 NR Description: metacaspase 7 [Arabidopsis thaliana]
  misc_feature (1)..(393): Homolog of NCBI NO: 15219345 NR Description: hypothetical protein common family
  misc_feature (1)..(393): Homolog of NCBI NO: 15219342 NR Description: hypothetical protein common family; protein id:
  misc_feature (1)..(144): Homolog of NCBI NO: 15219340 NR Description: hypothetical protein common family; protein id:
  misc_feature (1)..(393): Homolog of NCBI NO: 33304380 NR Description: metacaspase 7 [Arabidopsis thaliana]
  misc_feature (1)..(393): Homolog of NCBI NO: 15219342 NR Description: hypothetical protein common family; protein id:
  misc_feature (1)..(393): Homolog of NCBI NO: 29367583 NR Description: latex-abundant protein-like protein
  misc_feature (1)..(393): Homolog of NCBI NO: 34908928 NR Description: putative latex-abundant protein
  misc_feature (1)..(393): Homolog of NCBI NO: 4235430 NR Description: latex-abundant protein [Hevea brasiliensis]
  misc_feature (1)..(393): Homolog of NCBI NO: 23343885 NR Description: metacaspase 1 [Lycopersicon esculentum]
  misc_feature (1)..(393): Homolog of NCBI NO: 40644374 NR Description: metacaspase type II [Picea abies]
  misc_feature (1)..(393): Homolog of NCBI NO: 15219345 NR Description: hypothetical protein common family
  misc_feature (187)..(393): Homolog of NCBI NO: 15219340 NR Description: hypothetical protein common family; protein id:
  misc_feature (1)..(393): Homolog of NCBI NO: 40644374 NR Description: metacaspase type II [Picea abies]
  misc_feature (1)..(393): Homolog of NCBI NO: 23343885 NR Description: metacaspase 1 [Lycopersicon esculentum]
  misc_feature (1)..(393): Homolog of NCBI NO: 4235430 NR Description: latex-abundant protein [Hevea brasiliensis]
  misc_feature (1)..(393): Homolog of NCBI NO: 34908928 NR Description: putative latex-abundant protein
  misc_feature (1)..(393): Homolog of NCBI NO: 29367583 NR Description: latex-abundant protein-like protein
MRRCLVDRFGFDESGIRVLIDDGSAPQPTGANIRRELARLVGDARPGDLLFFHYSGHGIRLPAETGKDDDTGYDECIVPCDMNLITDQDFTELAQKVPSGCLFTIVSDSCHSGGLLDKTKEQIGHSTKQKQKQTQTQTQSRELEERSPSGTSFREFLKGTVREAFESQGIHLPHRSRSHQQGSGHGDDGDQESRYINTADAHVKNRSLPLSTLIEMLKEKTGKDDIDVGSIRLTLFNLFKDDASPKIKKFMKVMLNKLQQGQHGGIVGFMGALAQEVLKAKLDGKEEEEFDPAMKQHVHSDQEVYAGTTARVPSNGVLISGCQTDQTSADATTPKGVSYGALSNAIQAILAERGTVTNKELVLKARKMLSKQGYTQQPGLYCSDENASAAFIC

SEQ ID NO: 4594 - DNA, 1630 bp, Zea mays subsp. mays
  misc_feature (1)..(1630): Ceres Seq. ID no. 12362880
  misc_feature: MA Experiment ID: 108543 Result: Up-regulated in Transcription
gcacgagaccattacctagaacatcctaatcgaaaaaattggatcttggatccatctccatgggtgcctccagtacttgcccttgccaccacttcagctcgtcttccatcctcaccaagcgggccatcgccttcgtgctctacgccctcgtccccctcgccctcatccactacctcctatctcttcctccccgtctcccctctcctcccaccaccggcgccgccacctccccgtcacggccgcagcaggcggaggaggctccggcagcgcggtgcgattactcggacggggagtgggtgcgggccgcggcaggtcctcggtacaacgggtcgagctgcggcgagacgatcaaggccggccagaactgcgaggcgcacgggcggccggacacggggtacatctactggcggtggcgcccgcgcgggtgcgcgctgccgccgttcgacccggaggagttcctgagcgcggtgcgcggtcgccacgtggccttcgttggcgactcgctcgcgcggaaccagtgcgagtccctggtgtgcctgctcgcctccgcgttcccggcccagctggtgcgcggcgctggcggcggcgacggggacggggacggcgacgagctccgcaagttccggcgctgggcgttcccgtcgcacaacgcgacggtgtcggtgttctggtcgccgttcctagtgaacggcacggagaggcccaagtcgccggcggcggcgggagggctggaccacaaccggatctacttcgaccagcccgacgagcggtgggcggcggcggtcccggggttcgacgtggtggtgctgtcggcggggcagtggtacctgaactcggccatgttctacgaccgtggcgccgtcatcggctgccatcgatgcccggagcccaaccgcaccgagacgggcttcttcggcgtgttccgcctcgccgtccgcaacgcgctccgcgaggtcatagcccgcgtcgccgccacgtcctcgcccgcgcgcccccggctggctgtgatgacgacgttctcgcccgcgcacttccagggggattgggacagcccgaccgcgtgcgtgcgcactcagccgtacgcgcgcggggagcgggagatggagtacatggatctggagatgctgcgcgccggggtggaggaggtcgccgcggccggcgaggacgcgagggtgcgcgggggcggcctggcggtggaggcgctgcaggtgacgcggctggcggcgatgcgcccggacgggcacccgggcctgtacacccgggcgttcccgttcgccaagggtgcgagggatcggatgcccaacgactgtgtgcactggtgcctgcccgggcccatcgacacgtggaacgagatcctgctgcagctcgtcaagcgatgggccatcggcgtcggcaccgacacctcgtcgccatcgccatgaactggtcttaccatgagaggttcgaagctaccgagtggccgtttggatgggcgattttggtccaaatccttgcgatggatttcgaattatttactcactcaagcgctttagattttgtagagttggcctttcgttcaagcgctcagtcaggtatctttcgcttgtattttaatgataccagaactggaatcagcttaattagtcagctt

SEQ ID NO: 4595 - protein, 453 aa, Zea mays subsp. mays
  peptide (1)..(453): Ceres Seq. ID no. 12362881
  misc_feature (293)..(437): Pfam Name: Arabidopsis proteins of unknown function Pfam Description: Arabidopsis proteins of unknown function
  misc_feature (19)..(437): Homolog of NCBI NO: 34898640 NR Description: hypothetical protein~similar to Oryza sativa
  misc_feature (72)..(439): Homolog of NCBI NO: 15237213 NR Description: putative protein; protein id: At5g15900.1
  misc_feature (1)..(209): Homolog of NCBI NO: 28393189 NR Description: unknown protein [Arabidopsis thaliana]
  misc_feature (186)..(435): Homolog of NCBI NO: 28393189 NR Description: unknown protein [Arabidopsis thaliana]
  misc_feature (1)..(209): Homolog of NCBI NO: 15234058 NR Description: hypothetical protein; protein id: At4g01080.1
  misc_feature (186)..(435): Homolog of NCBI NO: 15234058 NR Description: hypothetical protein; protein id: At4g01080.1
  misc_feature (18)..(439): Homolog of NCBI NO: 34900856 NR Description: P0458G06.13 [Oryza sativa (japonica
  misc_feature (18)..(439): Homolog of NCBI NO: 34900868 NR Description: P0458G06.23 [Oryza sativa (japonica
  misc_feature (293)..(442): Homolog of NCBI NO: 15223079 NR Description: unknown protein
  misc_feature (20)..(299): Homolog of NCBI NO: 15223079 NR Description: unknown protein
MGASSTCPCHHFSSSSILTKRAIAFVLYALVPLALIHYLLSLPPRLPSPPTTGAATSPSRPQQAEEAPAARCDYSDGEWVRAAAGPRYNGSSCGETIKAGQNCEAHGRPDTGYIYWRWRPRGCALPPFDPEEFLSAVRGRHVAFVGDSLARNQCESLVCLLASAFPAQLVRGAGGGDGDGDGDELRKFRRWAFPSHNATVSVFWSPFLVNGTERPKSPAAAGGLDHNRIYFDQPDERWAAAVPGFDVVVLSAGQWYLNSAMFYDRGAVIGCHRCPEPNRTETGFFGVFRLAVRNALREVIARVAATSSPARPRLAVMTTFSPAHFQGDWDSPTACVRTQPYARGEREMEYMDLEMLRAGVEEVAAAGEDARVRGGGLAVEALQVTRLAAMRPDGHPGLYTRAFPFAKGARDRMPNDCVHWCLPGPIDTWNEILLQLVKRWAIGVGTDTSSPSP

SEQ ID NO: 4596 - protein, 251 aa, Zea mays subsp. mays
  peptide (1)..(251): Ceres Seq. ID no. 12362882
  misc_feature (87)..(142): Pfam Name: Collagen triple helix repeat (20 copies) Pfam Description: Collagen triple helix repeat (20 copies)
MPGAQPHRDGLLRRVPPRRPQRAPRGHSPRRRHVLARAPPAGCDDDVLARALPGGLGQPDRVRAHSAVRARGAGDGVHGSGDAARRGGGGRRGRRGREGARGRPGGGGAAGDAAGGDAPGRAPGPVHPGVPVRQGCEGSDAQRLCALVPARAHRHVERDPAAARQAMGHRRRHRHLVAIAMNWSYHERFEATEWPFGWAILVQILAMDFELFTHSSALDFVELAFRSSAQSGIFRLYFNDTRTGISLISQL

SEQ ID NO: 4597 - DNA, 1190 bp, Zea mays subsp. mays
  misc_feature (1)..(1190): Ceres Seq. ID no. 12565974
  misc_feature: MA Experiment ID: 108535 Result: Up-regulated in Transcription
  misc_feature: MA Experiment 108535 PARAMETER Experiment Name: Zm_Meristem_P Parameter: Age (day) Value: 8
  misc_feature: MA Experiment 108535 PARAMETER Experiment Name: Zm_Meristem_P Parameter: Organism Value: Zea mays
  misc_feature: MA Experiment 108535 PARAMETER Experiment Name: Zm_Meristem_P Parameter: Plant Line Value: 35A19
  misc_feature: MA Experiment 108535 PARAMETER Experiment Name: Zm_Meristem_P Parameter: Tissue Value: Root Meristem vs. Above Root Meristem
  misc_feature: MA Experiment ID: 20000108 Result: Up-regulated in Transcription
  misc_feature: MA Experiment 20000108 PARAMETER Experiment Name: Zm_Root-Tips_P Parameter: Age (day) Value: 12
  misc_feature: MA Experiment 20000108 PARAMETER Experiment Name: Zm_Root-Tips_P Parameter: Organism Value: Zea mays
  misc_feature: MA Experiment 20000108 PARAMETER Experiment Name: Zm_Root-Tips_P Parameter: Tissue Value: Root tips vs. Root mid region    35
  misc_feature: MA Experiment 20000108 PARAMETER Experiment Name: Zm_Root-Tips_P Parameter: Tissue Value: Root tips vs. Root mid region   Sequence Listing-Misc Features (4)
  misc_feature: MA Experiment ID: 20000534 Result: Down-regulated in Transcription
  misc_feature: MA Experiment 20000534 PARAMETER Experiment Name: Zm_Hybrid_Pollen_P Parameter: Age (day) Value: 8
  misc_feature: MA Experiment 20000534 PARAMETER Experiment Name: Zm_Hybrid_Pollen_P Parameter: Organism Value: Zea mays
  misc_feature: MA Experiment 20000534 PARAMETER Experiment Name: Zm_Hybrid_Pollen_P Parameter: Plant Line Value: 35A19
  misc_feature: MA Experiment 20000534 PARAMETER Experiment Name: Zm_Hybrid_Pollen_P Parameter: Tissue Value: Pollen vs. Aerial
  misc_feature: MA Experiment ID: 20000535 Result: Up-regulated in Transcription
  misc_feature: MA Experiment 20000535 PARAMETER Experiment Name: Zm_Hybrid_Seed_Dev_P Parameter: DAP Value: 30 vs. 12
  misc_feature: MA Experiment 20000535 PARAMETER Experiment Name: Zm_Hybrid_Seed_Dev_P Parameter: Organism Value: Zea mays
  misc_feature: MA Experiment 20000535 PARAMETER Experiment Name: Zm_Hybrid_Seed_Dev_P Parameter: Plant Line Value: 35A19
  misc_feature: MA Experiment 20000535 PARAMETER Experiment Name: Zm_Hybrid_Seed_Dev_P Parameter: Tissue Value: Embryo vs. Unfert Floret
aaaatactccgcctgcatctccaaagcacactgctccctctggcttcccgcctcctcttcggctccttcgcgtcccgacgccccctcatggccaccgccgccgccaccgcagcagcagtagtctcctccccggctgccccacgcgccggggccgccgccgcctcccgccgggggttcgtcacgtttggtggaggcgccgcccgcttctctcccacgctgcggtccggccgtgggttctctggtgtgcaaacccatgttgccgctgttgaacaagcaattgtaaaagatgctaccaagctggaagctccagttgttgttgttacaggtgcatctagagggattggtaaggcaactgctctagcccttggaaaagcaggatgcaaggttctggtaaactatgcccggtcctcgaaagaggctgaagaggtctccaaagagattgaagcatctggtggtgaggctatcaccttcggaggagatgtttcaaaagaagctgatgtagagtctatgatgaaagcagctctagataaatggggaacaatagatgtgctggtaaataatgcagggattacacgagacacattgttgatgaggatgaagaaatctcagtggcaagacgtaattgatctgaatcttactggtgtcttcctttgtacacaggctgcaacaaaagtaatgatgaaaaagagaaagggaaaaattatcaacattgcatctgtagttggtcttactggcaatgttggccaagctaattatagcgcagccaaggctggagtgattggtttcacaaaaacagttgccagggagtatgcaagcagaaatatcaatgtgaatgctattgcaccagggttcattgcatctgatatgactgccgaacttggagaagagcttgagaagaaaatcttgtcaaccattccgttagggagatatggccaaccagaggaagttgcagggttggtcgagttcctggcccttaaccccgcagctagctatatgactggacaggtgcttacaattgacggagggatggtaatgtaagatttgagttagcttgatgcacttctacttttgctgagcatttaatgttgaacacccttgttgtgcacgggcgattttggacaacaaattagtgttgtctctttctttgtaatactctctggtaataaatctagcatgtggaatggaagttg

SEQ ID NO: 4598 - protein, 345 aa, Zea mays subsp. mays
  peptide (1)..(345): Ceres Seq. ID no. 12565975
  misc_feature (33)..(345): Homolog of NCBI NO: 99753 NR Description: 3-oxoacyl-
  misc_feature (99)..(345): Homolog of NCBI NO: 14422253 NR Description: 3-oxyacyl-[acyl carrier protein] reductase
  misc_feature (33)..(345): Homolog of NCBI NO: 18395461 NR Description: putative 3-oxoacyl (acyl-carrier protein)
  misc_feature (102)..(345): Homolog of NCBI NO: 13096234 NR Description: Chain A, The X-Ray Structure Of Beta-Keto Acyl
  misc_feature (83)..(345): Homolog of NCBI NO: 14422247 NR Description: 3-oxyacyl-[acyl-carrier protein] reductase
  misc_feature (83)..(345): Homolog of NCBI NO: 14422249 NR Description: 3-oxyacyl-[acyl carrier protein] reductase
  misc_feature (82)..(345): Homolog of NCBI NO: 14422263 NR Description: beta-oxyacyl-[acyl-carrier protein] reductase
  misc_feature (82)..(345): Homolog of NCBI NO: 14422251 NR Description: 3-oxyacyl-[acyl carrier protein] reductase
  misc_feature (31)..(345): Homolog of NCBI NO: 119791 NR Description: 3-oxoacyl-
  misc_feature (30)..(345): Homolog of NCBI NO: 38346116 NR Description: OSJNBb0006N15.11 [Oryza sativa (japonica
KILRLHLQSTLLPLASRLLFGSFASRRPLMATAAATAAAVVSSPAAPRAGAAAASRRGFVTFGGGAARFSPTLRSGRGFSGVQTHVAAVEQAIVKDATKLEAPVVVVTGASRGIGKATALALGKAGCKVLVNYARSSKEAEEVSKEIEASGGEAITFGGDVSKEADVESMMKAALDKWGTIDVLVNNAGITRDTLLMRMKKSQWQDVIDLNLTGVFLCTQAATKVMMKKRKGKIINIASVVGLTGNVGQANYSAAKAGVIGFTKTVAREYASRNINVNAIAPGFIASDMTAELGEELEKKILSTIPLGRYGQPEEVAGLVEFLALNPAASYMTGQVLTIDGGMVM

SEQ ID NO: 4599 - protein, 316 aa, Zea mays subsp. mays
  peptide (1)..(316): Ceres Seq. ID no. 12565976
  misc_feature (4)..(316): Homolog of NCBI NO: 99753 NR Description: 3-oxoacyl-
  misc_feature (70)..(316): Homolog of NCBI NO: 14422253 NR Description: 3-oxyacyl-[acyl carrier protein] reductase
  misc_feature (4)..(316): Homolog of NCBI NO: 18395461 NR Description: putative 3-oxoacyl (acyl-carrier protein)
  misc_feature (73)..(316): Homolog of NCBI NO: 13096234 NR Description: Chain A, The X-Ray Structure Of Beta-Keto Acyl
  misc_feature (54)..(316): Homolog of NCBI NO: 14422247 NR Description: 3-oxyacyl-[acyl-carrier protein] reductase
  misc_feature (54)..(316): Homolog of NCBI NO: 14422249 NR Description: 3-oxyacyl-[acyl carrier protein] reductase
  misc_feature (53)..(316): Homolog of NCBI NO: 14422263 NR Description: beta-oxyacyl-[acyl-carrier protein] reductase
  misc_feature (53)..(316): Homolog of NCBI NO: 14422251 NR Description: 3-oxyacyl-[acyl carrier protein] reductase
  misc_feature (2)..(316): Homolog of NCBI NO: 119791 NR Description: 3-oxoacyl-
  misc_feature (1)..(316): Homolog of NCBI NO: 38346116 NR Description: OSJNBb0006N15.11 [Oryza sativa (japonica
MATAAATAAAVVSSPAAPRAGAAAASRRGFVTFGGGAARFSPTLRSGRGFSGVQTHVAAVEQAIVKDATKLEAPVVVVTGASRGIGKATALALGKAGCKVLVNYARSSKEAEEVSKEIEASGGEAITFGGDVSKEADVESMMKAALDKWGTIDVLVNNAGITRDTLLMRMKKSQWQDVIDLNLTGVFLCTQAATKVMMKKRKGKIINIASVVGLTGNVGQANYSAAKAGVIGFTKTVAREYASRNINVNAIAPGFIASDMTAELGEELEKKILSTIPLGRYGQPEEVAGLVEFLALNPAASYMTGQVLTIDGGMVM

SEQ ID NO: 4600 - protein, 176 aa, Zea mays subsp. mays
  peptide (1)..(176): Ceres Seq. ID no. 12565977
  misc_feature (1)..(176): Homolog of NCBI NO: 99753 NR Description: 3-oxoacyl-
  misc_feature (1)..(176): Homolog of NCBI NO: 14422253 NR Description: 3-oxyacyl-[acyl carrier protein] reductase
  misc_feature (1)..(176): Homolog of NCBI NO: 18395461 NR Description: putative 3-oxoacyl (acyl-carrier protein)
  misc_feature (1)..(176): Homolog of NCBI NO: 13096234 NR Description: Chain A, The X-Ray Structure Of Beta-Keto Acyl
  misc_feature (1)..(176): Homolog of NCBI NO: 14422247 NR Description: 3-oxyacyl-[acyl-carrier protein] reductase
  misc_feature (1)..(176): Homolog of NCBI NO: 14422249 NR Description: 3-oxyacyl-[acyl carrier protein] reductase
  misc_feature (1)..(176): Homolog of NCBI NO: 14422263 NR Description: beta-oxyacyl-[acyl-carrier protein] reductase
  misc_feature (1)..(176): Homolog of NCBI NO: 14422251 NR Description: 3-oxyacyl-[acyl carrier protein] reductase
  misc_feature (1)..(176): Homolog of NCBI NO: 119791 NR Description: 3-oxoacyl-
  misc_feature (1)..(176): Homolog of NCBI NO: 38346116 NR Description: OSJNBb0006N15.11 [Oryza sativa (japonica
MMKAALDKWGTIDVLVNNAGITRDTLLMRMKKSQWQDVIDLNLTGVFLCTQAATKVMMKKRKGKIINIASVVGLTGNVGQANYSAAKAGVIGFTKTVAREYASRNINVNAIAPGFIASDMTAELGEELEKKILSTIPLGRYGQPEEVAGLVEFLALNPAASYMTGQVLTIDGGMVM

SEQ ID NO: 4601 - DNA, 431 bp, Zea mays subsp. mays
  misc_feature (1)..(431): Ceres Seq. ID no. 12376962
  misc_feature: MA Experiment ID: 108523 Result: Up-regulated in Transcription
  misc_feature: MA Experiment 108523 PARAMETER Experiment Name: Zm_42deg_Heat_P Parameter: Age (day) Value: 8
  misc_feature: MA Experiment 108523 PARAMETER Experiment Name: Zm_42deg_Heat_P Parameter: Organism Value: Zea mays
  misc_feature: MA Experiment 108523 PARAMETER Experiment Name: Zm_42deg_Heat_P Parameter: Plant Line Value: 35A19
  misc_feature: MA Experiment 108523 PARAMETER Experiment Name: Zm_42deg_Heat_P Parameter: Temperature (deg C) Value: 42 vs. 22
  misc_feature: MA Experiment 108523 PARAMETER Experiment Name: Zm_42deg_Heat_P Parameter: Timepoint (hr) Value: 6
  misc_feature: MA Experiment 108523 PARAMETER Experiment Name: Zm_42deg_Heat_P Parameter: Tissue Value: Aerial
  misc_feature: MA Experiment ID: 108535 Result: Down-regulated in Transcription
  misc_feature: MA Experiment 108535 PARAMETER Experiment Name: Zm_Meristem_P Parameter: Age (day) Value: 8
  misc_feature: MA Experiment 108535 PARAMETER Experiment Name: Zm_Meristem_P Parameter: Organism Value: Zea mays
  misc_feature: MA Experiment 108535 PARAMETER Experiment Name: Zm_Meristem_P Parameter: Plant Line Value: 35A19
  misc_feature: MA Experiment 108535 PARAMETER Experiment Name: Zm_Meristem_P Parameter: Tissue Value: Root Meristem vs. Above Root Meristem
  misc_feature: MA Experiment ID: 20000492 Result: Up-regulated in Transcription
  misc_feature: MA Experiment 20000492 PARAMETER Experiment Name: Zm_Hybrid_Seed_Dev_P Parameter: DAP Value: 12
  misc_feature: MA Experiment 20000492 PARAMETER Experiment Name: Zm_Hybrid_Seed_Dev_P Parameter: Organism Value: Zea mays
  misc_feature: MA Experiment 20000492 PARAMETER Experiment Name: Zm_Hybrid_Seed_Dev_P Parameter: Plant Line Value: 35A19
  misc_feature: MA Experiment 20000492 PARAMETER Experiment Name: Zm_Hybrid_Seed_Dev_P Parameter: Tissue Value: Fert Kernel vs. Unfert Floret
tagatttgatggtgcagttcccgagccacgaaaggggattagaagtgggcatgtgcctgggagcaaatgtgttccgtttcctcaggttcttgacagctcacaaaagctattgccttcagatgagctccgtaaacggtttgagcaagaaggaatatcacttgatcagcctcttgttacctcttgtggcactggtgtgacagcatgtgtattagccttgttgcaactgctgtttagtctcttcataataggacgcccgtgctcttcatagaggacctcttgattgtatttgccccgtgctgtgattctatggaggttggttggatgcttggatgtaaggctggggaagcgaagccttttggccttcactgtaaaagctgcaacagaaaaactgtcacatgcactgaattataagataactccccttgatctcc

SEQ ID NO: 4602 - protein, 88 aa, Zea mays subsp. mays
  peptide (1)..(88): Ceres Seq. ID no. 12376963
  misc_feature (1)..(72): Pfam Name: Rhodanese-like domain Pfam Description: Rhodanese-like domain
  misc_feature (1)..(83): Homolog of NCBI NO: 22960827 NR Description: hypothetical protein [Rhodopseudomonas palustris]
  misc_feature (1)..(72): Homolog of NCBI NO: 13470599 NR Description: thiosulfate sulfurtransferase [Mesorhizobium
  misc_feature (2)..(72): Homolog of NCBI NO: 25288797 NR Description: hypothetical protein F3O9.26 [imported] -
  misc_feature (1)..(72): Homolog of NCBI NO: 14571545 NR Description: thiosulfate transferase [Triticum aestivum]
  misc_feature (1)..(72): Homolog of NCBI NO: 30684873 NR Description: mercaptopyruvate sulfurtransferase (Mst2/Rdh2)
  misc_feature (1)..(72): Homolog of NCBI NO: 25456716 NR Description: thiosulfate sulfurtransferase (EC 2.8.1.1)
  misc_feature (1)..(72): Homolog of NCBI NO: 18394364 NR Description: mercaptopyruvate sulfurtransferase (Mst2/Rdh2)
  misc_feature (1)..(72): Homolog of NCBI NO: 25288794 NR Description: thiosulfate sulfurtransferase (EC 2.8.1.1) Mst1
  misc_feature (1)..(72): Homolog of NCBI NO: 18412307 NR Description: mercaptopyruvate sulfurtransferase (Mst1/Rdh1)
  misc_feature (1)..(72): Homolog of NCBI NO: 4406372 NR Description: thiosulfate sulfurtransferase [Datisca glomerata]
RFDGAVPEPRKGIRSGHVPGSKCVPFPQVLDSSQKLLPSDELRKRFEQEGISLDQPLVTSCGTGVTACVLALLQLLFSLFIIGRPCSS

SEQ ID NO: 4603 - protein, 64 aa, Zea mays subsp. mays
  peptide (1)..(64): Ceres Seq. ID no. 12376964
DLMVQFPSHERGLEVGMCLGANVFRFLRFLTAHKSYCLQMSSVNGLSKKEYHLISLLLPLVALV

SEQ ID NO: 4604 - protein, 62 aa, Zea mays subsp. mays
  peptide (1)..(62): Ceres Seq. ID no. 12376965
MVQFPSHERGLEVGMCLGANVFRFLRFLTAHKSYCLQMSSVNGLSKKEYHLISLLLPLVALV

SEQ ID NO: 4605 - DNA, 2165 bp, Zea mays subsp. mays
  misc_feature (1)..(2165): Ceres Seq. ID no. 13493004
  misc_feature: MA Experiment ID: 108535 Result: Down-regulated in Transcription
  misc_feature: MA Experiment 108535 PARAMETER Experiment Name: Zm_Meristem_P Parameter: Age (day) Value: 8
  misc_feature: MA Experiment 108535 PARAMETER Experiment Name: Zm_Meristem_P Parameter: Organism Value: Zea mays
  misc_feature: MA Experiment 108535 PARAMETER Experiment Name: Zm_Meristem_P Parameter: Plant Line Value: 35A19
  misc_feature: MA Experiment 108535 PARAMETER Experiment Name: Zm_Meristem_P Parameter: Tissue Value: Root Meristem vs. Above Root Meristem
  misc_feature: MA Experiment ID: 108543 Result: Up-regulated in Transcription
  misc_feature: MA Experiment ID: 108687 Result: Down-regulated in Transcription
  misc_feature: MA Experiment 108687 PARAMETER Experiment Name: Zm_Embryos-Flowers__P Parameter: Tissue Value: Embryo vs. Aerial+
  misc_feature: MA Experiment ID: 20000477 Result: Down-regulated in Transcription
  misc_feature: MA Experiment 20000477 PARAMETER Experiment Name: Zm_5mM_SA_P Parameter: Age (day) Value: 10
  misc_feature: MA Experiment 20000477 PARAMETER Experiment Name: Zm_5mM_SA_P Parameter: Organism Value: Zea mays
  misc_feature: MA Experiment 20000477 PARAMETER Experiment Name: Zm_5mM_SA_P Parameter: Plant Line Value: 35A19
  misc_feature: MA Experiment 20000477 PARAMETER Experiment Name: Zm_5mM_SA_P Parameter: Timepoint (hr) Value: 48
  misc_feature: MA Experiment 20000477 PARAMETER Experiment Name: Zm_5mM_SA_P Parameter: Tissue Value: Aerial
  misc_feature: MA Experiment 20000477 PARAMETER Experiment Name: Zm_5mM_SA_P Parameter: Treatment Value: 5mM SA vs. No Treatment
  misc_feature: MA Experiment ID: 20000478 Result: Down-regulated in Transcription
  misc_feature: MA Experiment 20000478 PARAMETER Experiment Name: Zm_5mM_SA_P Parameter: Age (day) Value: 11
  misc_feature: MA Experiment 20000478 PARAMETER Experiment Name: Zm_5mM_SA_P Parameter: Organism Value: Zea mays
  misc_feature: MA Experiment 20000478 PARAMETER Experiment Name: Zm_5mM_SA_P Parameter: Plant Line Value: 35A19
  misc_feature: MA Experiment 20000478 PARAMETER Experiment Name: Zm_5mM_SA_P Parameter: Timepoint (hr) Value: 72
  misc_feature: MA Experiment 20000478 PARAMETER Experiment Name: Zm_5mM_SA_P Parameter: Tissue Value: Aerial
  misc_feature: MA Experiment 20000478 PARAMETER Experiment Name: Zm_5mM_SA_P Parameter: Treatment Value: 5mM SA vs. No Treatment
  misc_feature: MA Experiment ID: 20000480 Result: Down-regulated in Transcription
  misc_feature: MA Experiment 20000480 PARAMETER Experiment Name: Zm_Drought_P Parameter: Age (day) Value: 11
  misc_feature: MA Experiment 20000480 PARAMETER Experiment Name: Zm_Drought_P Parameter: Organism Value: Zea mays
  misc_feature: MA Experiment 20000480 PARAMETER Experiment Name: Zm_Drought_P Parameter: Plant Line Value: 35A19
  misc_feature: MA Experiment 20000480 PARAMETER Experiment Name: Zm_Drought_P Parameter: Timepoint (hr) Value: 72
  misc_feature: MA Experiment 20000480 PARAMETER Experiment Name: Zm_Drought_P Parameter: Tissue Value: Aerial
  misc_feature: MA Experiment 20000480 PARAMETER Experiment Name: Zm_Drought_P Parameter: Treatment Value: Drought vs. No Drought
  misc_feature: MA Experiment ID: 20000492 Result: Down-regulated in Transcription
  misc_feature: MA Experiment 20000492 PARAMETER Experiment Name: Zm_Hybrid_Seed_Dev_P Parameter: DAP Value: 12
  misc_feature: MA Experiment 20000492 PARAMETER Experiment Name: Zm_Hybrid_Seed_Dev_P Parameter: Organism Value: Zea mays
  misc_feature: MA Experiment 20000492 PARAMETER Experiment Name: Zm_Hybrid_Seed_Dev_P Parameter: Plant Line Value: 35A19
  misc_feature: MA Experiment 20000492 PARAMETER Experiment Name: Zm_Hybrid_Seed_Dev_P Parameter: Tissue Value: Fert Kernel vs. Unfert Floret
  misc_feature: MA Experiment ID: 20000535 Result: Down-regulated in Transcription
  misc_feature: MA Experiment 20000535 PARAMETER Experiment Name: Zm_Hybrid_Seed_Dev_P Parameter: DAP Value: 30 vs. 12
  misc_feature: MA Experiment 20000535 PARAMETER Experiment Name: Zm_Hybrid_Seed_Dev_P Parameter: Organism Value: Zea mays
  misc_feature: MA Experiment 20000535 PARAMETER Experiment Name: Zm_Hybrid_Seed_Dev_P Parameter: Plant Line Value: 35A19
  misc_feature: MA Experiment 20000535 PARAMETER Experiment Name: Zm_Hybrid_Seed_Dev_P Parameter: Tissue Value: Embryo vs. Unfert Floret
tacctagaacatcctaatcgaaaaatgcgttactgtaccaatggctccccacctcctggccgtggccgtggccgtggcggccatcatcgccaccgtctcgttgctggcgcccggcgccgctgcctacccgtggccagtttgtgggacgagcaacgacttcgagcccaacagcacataccaggccaacctcaacctcctcgccgccatgctgcccaacaacgtgtccgcatccccggtcctctacgccaccgccgtcgtcggcgccgtcccggagcaggtctggggcatgggactctgccgcggcgacgccaacgccagcagctgcctcgcctgcctcacccaggcgttccaggacctgcccaacgactgctcctacaacaaggacgccgccatctactacgacccctgcaccctccactactccgacgtccacaccctcgccgacgacgacaccggcccgacgaccatgtcgtacaacatcaacaacaacgccaacgtcacctcggacccggcccggttcgagcgcctcctcgccgccctcgtcaacgccaccgccgagcacgccgcgtccaactccacccggcgattcgccacgggggaggccgacgccgacttcgaccggcagttccccaaggtgtacgcgctggcgcagtgcacgccggaccagacgccggcgcagtgccgcaagtgcctcgccggcctcatatcgcagtcgctggacgggttccagaacaacatcggaggcagggtgctctgggtcaactgcacctggcggtacgagacctcgcccttcttcaatggaccggccatggtgcgcctggcatcgtcgtcgagccctccggcagcggcagcggcaggtggaggggagaggaagtacagcgtgttcatcgtggttcttgcagttgtgctgcccactctagctgccctgaatcttgtgttttgcttctgtttctggcggcggccagcaccacaggcaaagcagtcacagcccatgtattccaccgaagcagaggacgtggaaacggtggactccatgatgatcgacgtctccgccctgcgagccgcaacagggaatttcgacgagagcaacaagctcggcgaaggcgggtttggcgcggtgtacaagggcgtcctcccggacggcgacgagatagcggtgaagcgtctgtcgaagagctcgacgcagggagtggaggagctgaagaacgagctcgcgctggtcgccaggctgaggcacaggaacctcgtcaggctcgtcggcgtgtgcctggagcagcaagaacggctgctcgtctacgagtttgtccccaaccggagcctcgacctggtactcttcggtaccgacacgcgtgagccgctcagctgggagcagaggtacaggatcataaacggcatcgctcgaggcctgcagtacctccacgaggactcccagctcaaggtagtccaccgtgatctcaaggccagcaacatcctgctagacgtggagatgaaccccaagatctcagatttcggcctcgcgaggatcttcggccgggaccagacgcaggccgtcaccagccgcgttgtcggaacctatgggtacctagcaccagaatacctgatgcgcgggaactactccgtgaaatcggacgccttcagcttcggcgtcatggtgctggagatcgtcaccgggaggaagaacaacggcagctcccacaagtccggagacctcttgaccaccgtatgggagcactgggaggccgggacggtggcggagctggtggacccgtccctgggcggaagcttcccggagggcgacgtgctgaggtgcatccacatcggtctgctctgcgtccagggggaccccgctgcccgcccggtgatgtcgtccgtcgtgacgatgcttggaaccgacacggtcaccctccaggctccatccaagccgggattcttcgccagaaagagtggcactagcacgaccgtgtccgctgatgatgggtcgatttagagattgccactagagtacagagttgccagaaagagtagctcctttttttaacgatagccatctctatcgctaataagatcctgcgttttattagtatgggaggcatgggattattgaaggtctccttgactctaaagaaaatgtcttaggacagacttgagcctaaacgtctttgttc

SEQ ID NO: 4606 - protein, 648 aa, Zea mays subsp. mays
  peptide (1)..(648): Ceres Seq. ID no. 13493005
  misc_feature (1)..(640): Homolog of NCBI NO: 28812103 NR Description: P0458H05.27 [Oryza sativa (japonica
  misc_feature (2)..(648): Homolog of NCBI NO: 28812096 NR Description: P0458H05.20 [Oryza sativa (japonica
  misc_feature (1)..(638): Homolog of NCBI NO: 28812099 NR Description: P0458H05.23 [Oryza sativa (japonica
  misc_feature (8)..(647): Homolog of NCBI NO: 28812097 NR Description: P0458H05.21 [Oryza sativa (japonica
  misc_feature (1)..(647): Homolog of NCBI NO: 28812101 NR Description: P0458H05.25 [Oryza sativa (japonica
  misc_feature (4)..(272): Homolog of NCBI NO: 34898846 NR Description: OJ1058_A12.21 [Oryza sativa (japonica
  misc_feature (321)..(639): Homolog of NCBI NO: 34898846 NR Description: OJ1058_A12.21 [Oryza sativa (japonica
  misc_feature (16)..(644): Homolog of NCBI NO: 34898856 NR Description: OJ1058_A12.26 [Oryza sativa (japonica
  misc_feature (1)..(276): Homolog of NCBI NO: 34898858 NR Description: OJ1058_A12.27 [Oryza sativa (japonica
  misc_feature (320)..(646): Homolog of NCBI NO: 34898858 NR Description: OJ1058_A12.27 [Oryza sativa (japonica
MAPHLLAVAVAVAAIIATVSLLAPGAAAYPWPVCGTSNDFEPNSTYQANLNLLAAMLPNNVSASPVLYATAVVGAVPEQVWGMGLCRGDANASSCLACLTQAFQDLPNDCSYNKDAAIYYDPCTLHYSDVHTLADDDTGPTTMSYNINNNANVTSDPARFERLLAALVNATAEHAASNSTRRFATGEADADFDRQFPKVYALAQCTPDQTPAQCRKCLAGLISQSLDGFQNNIGGRVLWVNCTWRYETSPFFNGPAMVRLASSSSPPAAAAAGGGERKYSVFIVVLAVVLPTLAALNLVFCFCFWRRPAPQAKQSQPMYSTEAEDVETVDSMMIDVSALRAATGNFDESNKLGEGGFGAVYKGVLPDGDEIAVKRLSKSSTQGVEELKNELALVARLRHRNLVRLVGVCLEQQERLLVYEFVPNRSLDLVLFGTDTREPLSWEQRYRIINGIARGLQYLHEDSQLKVVHRDLKASNILLDVEMNPKISDFGLARIFGRDQTQAVTSRVVGTYGYLAPEYLMRGNYSVKSDAFSFGVMVLEIVTGRKNNGSSHKSGDLLTTVWEHWEAGTVAELVDPSLGGSFPEGDVLRCIHIGLLCVQGDPAARPVMSSVVTMLGTDTVTLQAPSKPGFFARKSGTSTTVSADDGSI
